United States Patent Application Publication US 2014/0057251 A1 - sequence listing, part 40

SEQ ID NO: 43313 - DNA, 4663 bp, Cannabis sativa
tagtacatatcaaagtttgaaggacataatttagtaaatatcaaagtttgagagcatggtttagtacataaacaatcactgaaacagtaaaattgaatgaacttggataaaatttcttaaatttaactatctcaatagttcggagagaatttttaaccgaaaaaaaatttataaaataccatttgatatatgtaaaaattcgagaaaaaaaattactaattagccaaaagaaaaatgttagaagttggcactcaacgtaacactattttaatgaataaattactctgtgtgttaactcacgtgcaagtgacacgcaccgtgaaagcatatctatctattgtaatcctcctatgaatgaacttgctacagttggtctaagaagaagaagatgagtgctgccaaagtcggcatcgcttctccgatcataagctctgcaaccttctccttcgccaaacacgcctattctgtatgcttcttcttttcctgcattccctctttttccctttccctttctctttccttttttatttttcttacctagtttctcagcagccaaacagaatttggcttcaatttttgggctcaccgaaacataaaagccgtatgaggttggtgcaatgcgctcgcgcttctatctcaagaactgggcaaggttcccttttgcctcgtgaaccttttaatttgtggtttcttgactgtacttctcacttcaagtttcgatttttgaaaatgttgtttttggtttgagttcacagctgcttttgatcctgaacttcggttagtgcttgaacttgctacagactctgagttatatgagcttgagaatatcctttttggtcaaaggtgaatatctgttttcacaagcttgtgtgaagaaatactcaaatagtaaactatcaatcaatttgatgcaataatatggctttgtttttcttcataagcatgtgcattattaattaagattttagttctttgaaaacccaatatgattgaccttgatgtcattgttaatcttcagttactttagccctttactcaaatcgataacgacgagaactgatgtagattacgccatgatcgaagaggatcttcaagaaagagagcacttcatagaagcacttgagtctcgattcttattccttgcagctgatgctcgctcaaccttaaggttattattatgctttatattgtcaaagtaaatgtgcagtcaaagatttcatatgttagcttaatgatagtttctctaagttgtactttatgattttatttttcacatgtaactgtattcatagtaatgtttcttttaaatttgaaagaatcaattcataggttatttaaagcagttggtatttttttaatatatacttgaaagtttgtttcaaacaatgattttgatgattggagtttgtttattgcctttttaggggttggaggccatcgtataggagtgttttacttgctgtaagaaaggagttgaaaattcagtgctcaaacaagttgtcgaccgaagacctcgaagcagagatctttcttcatttgttgcatgattgcacaaggcatgtttctcagcttcctgatacaatttagcagcatgtctaaatttcatgtagttgaacaaatcgaattcttagttccttttataatcagggcgctataatagtaaataaaccatttccttttcatttccagaattaggatggtgtttctttcgccaaaacattacctttctgttcactttgcagtcaatactgaagatatattactcatgttagcaataaaatttgacaaaatgaccacaatggggatgtttttgctatcattatgggatacctttatggtgacttcagccatgaggcaattaccctctgagtgctcttgttaagaaaatgaattctctatttctatttgctgaatgacatttgacttgtaaattattactgcatatcatggcatgttatgtcttcaataagtcaataagcctttccttcttataaactattctgctgactttcagtatgtacttgtcttcatgtagtgaagaacttgaagcttttccagggttattagaattctctggagcatccaatgcagaaggtggtttagaatttggactcagtcgatggaaagtacaggctctttcagctttgaaagatgtccggtcggtggttttgaaggtattcttaatttttttataagaataaaataggctgcaagtttctccaatttgtactttaactgatttgattttttcccttttatagggtggtggtataatcactttggcaaagatttttcaagtggtaggataatgttttgttgttttgttgcattttccttcatatttgtctccaatttaccatttcatttgtggtaggtgtcaaagagattatcgggaaaggtgtttgcagaagctgctaattatcaaattaaaagggaagttataagaaaggtacatgtttgttatggtctaatcttatcaatttctgcagtaagaatttttatgcttacccttcttcattgttcaaagcttaaaaagcaatccaaatttccaaatgtaagcaacttaatgtgaaaaattgaaattccttgctatctattatttttccagtaaagtacttatgggtgtgttgatgtattgatgtgttacgcgttaatattagtttaatcaatcaaagtgattaggattatagaagctgacttgtcaaactcttaatggctgagatggaatatcttaagtgagctatgttaataatcctaaagggttcgttaaataaacagttggggatgagttagtataaatagtggggctgattaattgtaagagataggaattaatttgtattggttagagtaaaatttactttgggagatatcgaagtatcgaaaagcttggaaagatttgtaatacttattttgatatcaataagatttctgttttctaattccttcaatattggaatggaacactagtgtatcatgatggtttcacaaaacatgtttgtttgtacagtttgtagagtacaattacttagatccaatgtttaaaattgtgtttttattgcgcgcttcaaggtgcacctcattttgaggtgaaaaaaaatgcactattgcgtgcgcctcaatatttggaagagaggcgtacgcttcaaacgtgtgaggcagtggaaaatggtctgaggcataaaaaagagtgaggcgcacgcctaaaaaaaacaagattttagggtttttttagcctattttcattcaacttaaaagaaagcccaataacatttaacttaagaaaagggcccaataaaacacaataaaactcaaacagatagataaaaaaaagcccaactaaaaactaaacctacacaatttatattaaaagatcaaatatatttcttagggttagtagccatgagaccccctccttcatcttctcaatcgcacatccaaagaagagagagagtaaaaaaaagagaaactgttgctgatgcttcctccttatttttagttactctaaaatattattttaattcaataattgaggcttacgccttgcctaacagaaaaaaaaacaccacgagacttaaattcgcaattttaaacattgcttagatcagctcaatacatatcaaagttgattgcctttgagaaaaggggctcacaaaactaggtgaaaatctaattaaaatatcaggtttcaacctggaagtgttcaaattgggagactatcaaagatgagctcatggaagtgttaaatgcttatgaaagagacggaagaatagaaggcagtatcaatgaaactttcatttgtcttattcccaaaagacttaatagttgtaaggtaaaagacttcagactgaccagcctcattactagcgtatacaagattatcgctaaagttcttgctacaggactaagaagagttttggaagatacgatatcaggaactcagtttgcttttgtggaaggtagacaaatactggactcggtcctagtaaccaatgaggccgtcgaagattatagatggcgaggcaagaatggttttgttttcaagaaagcatatgacagagtaatggttttgttgaaaaagggatttgttgaaaaatggaggaaatggattagagaatgtatctcaacaacatcattgtctattttcatcaatgggagaacaagcggaagcttcaaagggtctaggggacttagacaaagagaaccactatctcctttccttcttacattggtggctaatgttcttgggagaatggtggataaagcggtggaatcaggcacttttttcggtgtttaatgtcggcaaagataagatgcaaatttagtcatttacaattagtggatgacattctattttttgaaaatgatgaggaatcatttcaagagtttgatagaattgttgaaacttgtaggagccaactattgggtctatgcttgaacaaaaatgtggtggggcaatgtgctactcaaattgggtgcgaagtacgcagttagcctataacatatcttggcatgcctctaggtggttcgactaggaagaggagtttttgggtttcggttatggacaaatgtgccaagacacttgatggttggaaatgttccttctaatctagagggggcagacttactcttattcagtctgtcctatcttcccttccaatct

SEQ ID NO: 43314 - DNA, 4055 bp, Cannabis sativa
  modified_base (2944)..(2947): a, c, t, g, unknown or other
taaaatataatttattagaaaaaataattaacaacaaaatccaatcaatcaatgtatcaatttatatatatattctataaaaagtgtgtctatgtaagagaattcttggtttaatgatttattttcttttaataaaaactaacaggaaattaacgtctccgttaactttcatctacctctatcatccaccaagtataaaattaataataataaaaaaatatcacaaccccatttatcgcaatttcaatcgtatacattatatttcttctctttctacaacatacaacgattaaaaacatcacaaacgcatatatagttttgggcttaatattgggtctccctattgagcatcggagcttgaattcaagtttttcatagaattcaagtttttctttttctttttcttgccgaaattgatgtctctctacgtggaaaccccgaaggggcaagacgtgtttgctttggaggagattagtgtatcgaattccatagggattttcaagaaagcatcaaagccgttggttataaatggagaagcgcatcagattccgttcagtgataacacattttatttcgtcttctcaggcgacggccggctggaaaaatctccacggctgttagattttgctttagagattgtacggacactaaaactcgaagggtatgcggttgttcatattggggcaaaagatacgtatagtttcattcatttcttgctttattcaattgctccagctcattaacaatacgtgatatagatggttatgattcatccatgccttttatatgtttttttttttttttaaaaagaatgtgtttttcttagccaagggattaagaaaaactctcataaagagaatggtaataagtgtttagctcctgggtacaaaaaagattgggttaggaaagctgaccaattgattatggaagaacccttaaaggcatgacttactttgaagaggaacatttagaatgttaagtatctgccatcaatgactgatataagccttaagagtaggtatgtttatgttgatgttggtgaagaaacttaaaatatggaaatcaacaagaatttaaactatatttttgcaattataaagctttgaaattgctcatcttccaatttttgagaattcaactattagagtctgtctttaagaatggtttactagattgatggcttgacttctgcattgtcttaattattagacattaattgattattgatcttatgaaattcaagccacataaagggtagtatgaagctggtaaacaaagacatcaagaaagtcgtcggagtagaaaggtttgtttgatcttcttgaatggtgcaattattagtttggggtggaaaataacatgaaatatcttttattttctttattctctcaatttttttcatttaggatgataatgatgaggaaagcaataatggtggttgggagtttgttggcaaaaaaaccccaaagacaacaacacaaggtatgttttcttacatttcttctagtgttggataccatttatgaactcaaatatttgaggcattttgaactgtctaacttgcttgcaacaacaccaaaggaccacttgattggatgttgatttgtattgtgatagtgtagattatttgagggtttatatacgattgaatcgagaatttctaaaggtttgacacttaaccacttgagtttattgatacctgggctatagaagaaatggattttcattcttaggttttaggttcactaatgagaatttgtaagaagaattactgtatatggctgacttggctttaaattcaataaacagttggctacccgtacttgagaatttgtaatgatgcttagggatttaataagtattataagaaagtgggtgtaaactgattaaacagactcaagaggggtagctcaaatggtgagcatgtagttttctctcacaagatatgaggtttgagtcccttctgggcactagcataacaattgctatagtttcctagcttctaatattgtagggttaggggatcctactttaaaatgatactaataaaaaaaagtgattaagcaagatttcacaatcatacattcttggttctatttgcaattgctctctccctctttgatacatatctacatgtaaagaaatgagtttctatttatctttgttgggatagtggggtgattaaagattagactcggaaagataaaatttggctgactacttggttgagtgcgtatcttgtatgtttctttagtgtatgtaatagtactttcattatatgggtcctatcctaggtagccaagtaagccaaactatgtggcattatctaagagttcgtatattcgttggtttacatttgaagaaattcttaaaaaaactgaatattaaaataaatttatcgttactttttaaattttagttttctggtagattgcttttttattcttttctaattaaaaaataatttcaaatttagatatttgtagatttttttggttaaaaaatttagatattggtggttagttgtaacaataagtatttataaaactattctttagtatccactaaatcatagcatactaatttgtggtgttatacccgaaattcagctggtacttcagaggatgacatatgtcaaccttggagtatacaaatcaacaaatataatggcaattatgttaaagaatattaaatgaaataactcattaaatgcaaagtcaatagggtatatttataactcatagactgaataatctttaacgagacaaggatgtacgaactattgattcacgtattgatgagaaatcattttgcgtcagaggacacagtcatatggaggacatcaataatacttagcgaggcatgtacctggcgatacgtagagaaatgatgacgagacgtgtttgctgttataacacttagcatgtaaagaccgcttagcttnnnnttggaaattagcagataattaggatttaattatggaaattatttattaattccaaattattaatttatgatgatttatttgaattcagaatgcatttttgtgttacatatagaaatttcatgattttgctttttcagtgccaggcaacattggaacgcggtgtttggttattagaatcccatcctagtatttttagtatagcgggaaagtttagttagaaattgggaatgtcgagattagtcgggattttggaatttcccaaaatacccttagtgccttttaagtggttttggtaagggaagggcaatatagtctttttgccattagtagtttgtcctttagtggacttagtttaattaataaattgattctcttttatgggttgtatgctgatattggtatgttaataagcataatctattcatttttataatttttacaagaaaataagaaaatttccaaaagattgcatttcactctcaagctctctctctctctctctttcgaaaccctcaaaaccagctagggttggtatgtttttctccatttacaagctggttctagtagatattaagggatcttaaactctaggtaagtctcttgtagttcactctttggtttcttgtttttgaagaaaatgaattatgcaggctttgtgagatttgttgttgtagttactgttagtgtttgttgttgttttcagtggttatattatgctaggttatgttgaattaggcttgaattgtgggatgttattaggtttgagcaagctttgagttttggaactcaagcttggctctttaatggcaaattttgttttagttcttgtagttgtgttttactgccttgaatatgttctttgggatatatggagcaggtctggaaagtttggtatgatttagggttgttttaagtgagatatgaatttttgaatctttcctgcactgaaccggaattccggttccgggggacctgtaggaaccagaattctggttggtccccaagaaaccccgctgaactggaattctggttgggaaccggtctaccggttcgggcagttttgggaaccctagtttttcttatttttgagatgtttagggtattgcca

SEQ ID NO: 43315 - DNA, 3913 bp, Cannabis sativa
  modified_base (100)..(106): a, c, t, g, unknown or other
tattgcaactagcactgcaacctgaattgcaataaaaaatcgtataaaaacccttattgcaactattgcaaccaatttagaaatccaaaccgtaaatttnnnnnnnaaaaaaaaaaaagttaaaagaaatagtatataagataattttcctatataattattttgttaaataaacatgataaattatataatcatctacaaacaaatttatttatactgtgactttccaaagaagcctttaatagactcttacaatagttaattcgtttattttgtgtaatttaataactatttgattgaatctagaaataataattaaaaaaaaaacctgcacaataaacacttaaagcatttgattcgctgctagttctcgttgatactgacatttatacagtatataaatacaaagttcataaaactaataattaacataattacattattgtatgttatccaattgtttattaataaataggtgtaatctgaatgcaaatttttataatccaattatttggcaataataaactcggcacccggagattcccaagctaagaatagtgacttaattacagtgttgtttagtcatgattaattgtttgttttttcctaatgtccaaattaatcatttattaaataactttaatgttgatactctatattctcatctaattaaaaattgttgccttcgtttaaatacaaatttattaatatattactttccattataaagtgatttgaaatggtttggattagttttatattattatatttgttttataataatttatcgatgattaaagtgctggtataattctcaacgattagttgggagtttacaacatgtggatgcgtgttagttgtggataagaggctctaaagtttcacaattgtaatactaattaataagataaacaactacagcaaaaaaaaaaaaaaagattctttttcaagtacaaatacatactttcatacttttacttttgttctaggagccttttctattttcatacttttaagtaattatacatggggtgttatgaaatcactccaatgtgaggtttgagattcctcaaatgagagaaaaatatatataaatatatttttatataatcacaagttatttcaccttaaaaagtctgttttatcacttgatgggtacttaatacttatattgttgtcaaataatttagttttattgttgaaatgtattttgagatcgaacatgtatcagtgtttttaataggtttaaatgagattatattattagtttgcattattttagtaagaatattaaaaaaaaataaaatttgaatacaccaatgaaaaattacattttattggaaataattataaggatttttttctagcaaaatatttataactattattattcttttaaattgatttgcctttacattatatatcataactactcaaatctttattaatttttttttttttgaaaaaattgtagactatatataatcaaaattaatttttataataattatcattaatttaagagttttctacatatattaattgcacgtagttatttcaatgagattgttataaaatattagtggtctttgtcaccacctaaagataacactttgcgattagttagcttaaatgatataaaactcaatacttaattaaactaattgtaatataacaccttaaaaagtactagacactattagtattttctagtatttctcgatttataattatgttttacattcatatatagcttcaattttgtttgaattttcacaatccataaacttgatctagtgaccaaataatgcaaataagattcttgttaagaaaaatacatataaaatttatttttgtctcatggatatttttctttttattctactttcttactttaattttaacttgttttattgagtggttaaattttagctgcttgtacattatatttctttgacttgtttcttactaaattactttatggattagctcgtatttacattttaggaactcagtagtgctatagaaaaaaagcattaatcatagatattgacatctataacttctctttaagaagtgaaatgatcattttcttttagcttggttaaagacgttaaatgatagaatactcattttagaaattttattagtttactgaaatatcatttacaaaaaaatagagtatttttatattaaagggtaaaacaataattttagccctaatttattctagaccgtctataaaagattagttgataactatggcaaaaataatgactaattaataacttacctatattacttataaagtaaactataaagagtaatttacggtataaatacttaaatgtaactctcagtagcagataaatacttaagtttaactctcggttgcagataaatacctaagtttaatttttgatggtaataatacataagttatatttttagaactttcgtaggtacctagtcattaagtgtcaagtcaatggccttgtggcagtccctgattagtctaagtcgttaaatttttattttttatttaaaaaattaatttaaatatataaatgaaaaaatgacacatggataatgacttgacacttaacgatcatgtgataggctagctgtaggtttgttttttgaagtattttagacatgtgttttagttaattatattcattttgtataaaattatgcttattttctacttgtttcaagtctaatgctaaaattttaaaatgaaaaagaaacatgttatatgagatgaatataatgaatttatcatggaatttggaattcaagatataatggggtaaaagattctaagttttgaatgctcaacacaccgtttgtgattgaaaatcaagtcttaagcttcaagacaattttttactatgacatgtccactttcaggaaaaatgttgtgaataaaaatttagatctctcttttaactttctaaaacatcttaaattattcaattctgagcaatattgaaagaattatggcaaaaatattatcactcgttgcaccaacaagcttgttgcccaaaaatcaaggacccagactgcaaaactgaaagggctatgctgcgttgactgacaaacagagcacattttgtagtagtgtttcgttggcaggtgttcacaactcatattgtcgctatatattgttagtgttacattttttaagttcttaaagttggatgatttcataattctgaaaatggaaaaatattattcttgtttatatgttctaagtgtttaatataatagtttatctttgcattttgcgctattgtaaggagaaatttaaagagaaatattttcatattgaagtgatgaattttatgcaatattttgcgcaattctaggttttcgcttttttagaacatggttgaaaaaagattgaacataattaagacatgtttcatttaacgccctactagattagtcgcgttatcgtgattttaatttattgtatactcctttactaatcaaagagtttattaaaaaatgtgaatagtttaaattttcataattaaactttcatcttaaatatataaatagtttacataatttaggatctcattttaaagttacaaccattttgtaaaatacttagttacaaaaattatcgcctagcggatcaaaataaagcatgttatcccaaagatcgaacactctctgtaagatcctcgctttaagcttttattgggcccttacacccacagaataatggctcttatacacgagtacgccactctcgctgcttcctggattgacgattgaccctatagaccaacaagactgtttctagcgtgctttgtcctcactctcatgttttctaggaaaatttcccaaaaggtcacccatcctaaaactaccccatgtcaagcacacttaaccatggagt

SEQ ID NO: 43316 - DNA, 2117 bp, Cannabis sativa
agtttacttttataaaacaaaaactttaaataaaatttaacaaaaaccttaaataaaactaacatttacgtggctcggcacgtaacttttacctagtatatatatatatatatattgatgaatgatcttattttattattactattttctatttacttattggatttattcttttattttaaagaagtattttatatgataggatttattcccaaatatgtaaaattatgttaataaaaactataatccaaagtattgctttgaaaataaatagaacatttccctctgaattatgaaatattttttcataaaacaattctcctagatgtatggaaataattgcaaattttcctttttgtcatatttcactcattttttaagatattttattgatgtgatcagaaactaaagatactacgttacatatttttttaactaatttatgtggcaaaatcctataaatattatagtttatgaaacaaaattattaaaataattagtatttctactctttaaactttcagtccaatctaattttgttcctatataacaattataattatacccctgatccccatacccttagtagtatgtttacttaaacaaatttatgtcttttgagaaaaataaaatagactcaaatttatatccataaaagttagttttcataaaaattaaacttttaatatattctttataatatttaaatgaaatttttaataaaaaaataaataatttttctaaatcgcttgattaattttaaaattttaatcttttttctaattttcttaatcatttaaaataatttttttaagatctaaattaattttttaagatttagtaaaaaaatattgaatctttttcatttttatttcgaggaggtacgatttgatagttgttaaagtttaggaggaaaaaaaatttagtttacaaaaatacttgagtatttaaatagaataatgacacggtaaatataaaaattcgaaaaattcttaacaaactgtatattttaaagatagaataaatattattgaatgttaagaaggcaaaatcactaattattgaaattattatttagttcttattttaaaaggaggttggcttctaaataaattcatgagccaaactaactgatatgaaatcatcgtcctaaagtaattattacgattcttcaattatattgtaatgaaaaaaatgtataacaataacaattatgttaatttaaaataatactgttcttgcagctctctttgagatggtgccatggctaagacaagatctaagatgcagggaaatcttcaatcgattgtgaaatcgattgcaaaaaagaagaaaaaaggtctttcatcctccattgatgtgaagaaaaccaagtcgatggatgaggtgttgggagtagaaccaatcgacttctcggacgaggaagagtattgaaccctggaagatcagcgagccaaatcgtctacgcagaattatcttcaggaggctctatcgcccagaacttccctgaaaacaatactgcaaaacgaagaggttgtgcatgattttaatttcttcatggaggcaaacagacgatattctgaagaggcgacaagaggagttcaagtaacacctccaattctgcgatctgggaatgttgtgagaaatctctccacatctttcgacaacaccaaagcaagcagtcaggtcaagatcacattagatgatatccatgaggaggtaaatttctggaactcatctcttatatgctatatgctgggtgctaacccccctctaactgtactagatggttttgtgagaagattatggaaggataaaatagataaagttggattgctttcatatggcatattttttatcagatttcataaagtggctgatagatattcagtgcttaatggtggctatatatttttcaataaacgaacgattataatgaaagcttgggatccaaatgtagatttcaaaaaggaagatgtgagtagggtgccggtttggataaaaatggatgatctagagttgaaatattggggggaaaagtctttattcaaaatcattgggcaggttggggtgccaataatggttgatgctgtcacaaaggaacgagataagcttag

SEQ ID NO: 43317 - DNA, 3297 bp, Cannabis sativa
  modified_base (165)..(168): a, c, t, g, unknown or other
tgtaattataatactttttgagatttaaaaaagtaaaagtagttttgtaaaaatgtttaataaattgataagcattaaaaatgtaaaaaagtaattaaatttggtacctcgtgtaaaaatcccttaaaaatataacaaaacacataattttagggtttgtacgtnnnngttttaaatacaaaaaatatttctgtactgcatcccaccaaataatacgtggacttgatataacacccaataattattaagagtttaaggggttatatctgattttgggtgtcttttccccaatagttttttattagtaaagtttattcttataaaaaaaatcaatcatcaatgtcggccctcggctatacgtaagtattatttggatcaacggatgagattcaaagttggagttcattgtttgtacttgaaggcgggagcgggacataatgatttgaattttttataaattgaaagttggagtttactgtgaagaaagtaagacagagtgtgtctgactgtcatggccttcgcctcagaaccaactccaataacagacgacgatatcgttcggttggcacaaacctgctcgcctctcccctccttcctcctttcatcaaattcacacccaattctcctttctcacctcacttctcgctcttcctcttcttcttctccctctcttgctgtcaccgaatacacacactctctcctctacttcatctctctctcccctcaaacctcatccctttcttctcttctcgcttctcttctcctttcctatactcacctctttacctctgctcgtattccccacgaccataactccctcaaaactattcaattcttcaacacccttatcgatcatgtacctgttactgctctaccccagattgctgactcgattgtttcgtattttccccatgttgttgattccgacgatacccagatcatcgaacttcttcccaggtgcctgaacttgattcgggaagcggatgagattgaatgcggcggggatctggtgaactcggtcgtcgaccgggttctaggttgcagttggtcaaaagggttatcagtgaaaatggtttcgctcattcgggagtttccccttctcgacaagggaagggttagtgagtttgtagacaaggtatttgtggaaatgacccgtgtggatttacaggatttgccttcgttcgtttatcagttgttggttttggcatccaaagggttttgcaagagagagttgatcgagaggattgttatgttttttgggtccaaaatggagagaaaggtaagctccatagttaggcaagttgaaggtactattttgctccacttaaactttgcggtgaagcaggacccttctttggcccaagaggttatgggcattgtaaggtcagattttagagctttcaatcatttcacagtagttattctgttatcactcgcaagggttcggaagtttggcgacagttcaattgggattttgaaaacagctcttcttacagcatacagtgattacaagtttgctaagtatgtcagttttctattacttgctgtaacttattagctgaatctattagataatttgatagatacatcaatcatgtaatagatatttctttttagatttttttccctctcttatataaagaatgttagtcatcttttccttttcttatagagattgcaagtggctatctgatgaattgaaggaggagtaccggcaaaatgtcaaagttgttgaaaaagctatgttaagagctgtaatttccaatttcttaaagtctcttcatatacctcaaaattcagctcacaaatgaattgagatagtgtcattgtcaactatattacttgctttattgattttcagattaatgagagcaactatggaagagaacatatagtgcctagcattgtgcagtttgcttttctgctcttagaatctgtggaagaggcaaattgtaaagatctctgccactcaaatggtctcttaggcatggaaggtcttgcttctgagatgctgaaaactctatttgaggtccaagatatggctagaaatgaggttaatgccactatatgaccatggatataatattagtacctcttttccggttgtggagcacaaaaatgcatctacacctttaatttcatatctttctttttccaaaatataaaataatggctgatacagttatggttctatagataattgagcaatgcaaatttcggatcctgtctttgaagcctgagcagagtgcagcaattacaaggtaactggcctagatgtaacattttggttttcttttggactagtattagtattatgtctgaatcctttatgatgaagcgtgctttattaaaactttgacatccaggttgcttggtagtctggtacaaagttatccatatcttttattagaccatgtatctcgtctcaaggagttgctggattattttactttcatgaatggaaaggttgcttctggcattgttactgctcttgtacccctaaccaaattcagccgtgatcttcaggtgcttccaccattaaagttagattacaattcagcttggacattcttacgttgataaacataattgataatatttgataatagaatgcttaaggtttcgaactaactgatattcatcatctaaaaagtgttaaaatgaaattagctcaccaggacctgaagtaaagctcccttggatttatatgcaatatacagacatcaaatttatcttgtgaaacatatctgaaatcttttagaatccttacttaccaagaacttttgttaccatgtaacagaaatcaagaattgtatttcttgatttgagaagaaagtaaaaacagagaattgaaatggggaagaatgactgaaatgaaactgctcaactatactttgagctagagaaactttatttataggcagacttttacaacagaaaaatgatgcagctcaatgtgagctgtcaaagttcaaaccgttacaatttgtttgttgaatgtttaactgattttctaactgtgttgaatcacctatttctctatttccaatagccccctcaagtgacataggtgaacaccaagtgtcaacttgtctctaaaataggtgaagttagaaactggtaaaggtttggtaaaaatgtttgcgacttgaaactcagtttctgcgtaatgcacatcatgttggtttgctagaacttgatcccgcacgaaatgaagatcgatcttaatatgttttgtgtgcgtggaacactggattggaggctaaagaaccggctccaagattatcacaccatagc

SEQ ID NO: 43318 - DNA, 1733 bp, Cannabis sativa
ttgtgagtagatctaagatctttgtaaaattatttccaacaatatatctccacttgatccttggctattggtaggtgatttgaatgaaattttttctcatacacacaaaaataatggacccttgagatcggacagcctaatgactgcctttagaactacaattgacagatgccatttgactgatatttctccttcgggtgatgagtttacttgggcaaaaaacaagagaaatcccactgcgttaaaggatcaattagattggtgcttcatcaacaaaatatggtcaaattctttatttttccccactttgtagcacctggactactacgagtctcatcatcgtgttttattggttcatgttaatttctcacttcagcccaaacctgttcagaagagaagatcttgttttcgttttgaaaaaaatatggttgaatgattttgagtgtactgatattatttcaagatgctgaaagtatctaaatcccgatgatcccatctcagctcttacttcaaacttagagcagtgtgtacatcagcttcaaagttggcacttcaaccagtatcggaagcttaagaatgatatctctcatgctcaaaaacatgtcaacaaactcaataattttacacccactacctcagatgccttagaaagaatacacacggttgaatccatccttgctcaactcctgctaaagaagagaaatactgacagcaaaggtctcgtttggattggttaaaagaaggtgaccgaaatacaaagtttttccatgccaaggctagtgctagacattctaacaacaagattaaatctttgttggatgataatggtgatttgattactcacacggaagaaattactaatatcatcacagattactttgagaagctttttactgcacaagaagaagatcattgggccctctcccatatgctatccacaatccttaccacttttacctcaattcaaaatgatttcttacttcgtgattttactgaaatcgaagtccttacggcactgaaaactatggcttctaacaagagtccggggttagatggcatgtaagcaatgttctatcattaccattgggatattgtggggaaccttgtttcaaaattcgctctccacactcttaataaagatatgaactgttatacccgaaattcggctatcatttaaatggaggacacgtgtcaagttaaggagaatatggatcgatgcgtgtaacggtagttacatttaatggaatagctcattaaatgcagaagtgacaaaatatatttacaacttgctgcgtataaggtcctatgcgagataaagatatacaaattgttgcctcacgtattaacgagaaaccatacgacattggatgcataaggcgagacatcaacttcgttgcgcctgggaagacgtaagcgatgcataatgactgtgaaaacacttagcatataatatacaaactaagtataacgggcgaatccaagcaactaatagcgagacgcttatcttgctataggaaggcatacttctgatactttcaccaatcagctttagatatattttagttaggttattagtcttggcgaatcagttctctcgagcagaagctgacattcgaatgatgactgctgaagtactcattattattaagaactatgattgtcaaaatgaagcgttatgccttcaagtgaagaagcaacgaggcgtacatcatcaacctcggaaagatagagga

SEQ ID NO: 43319 - DNA, 9129 bp, Cannabis sativa
  modified_base (7922)..(7929): a, c, t, g, unknown or other
atctctctagtttgtttaaggaaagacttaaacacacatgtaaccaatattctctgagataagcattctttaaactgcgaatggattattatctaatcttttttacacgtgtcgtggctatattgctgcttgaaatatgacataacaactacttatgttatttgaattatgtttatgtgttttatgaattgagtcttttgtttgactaaaataaagtattgattacattcttactgggtaagccactgagactagcttaatggtgagagagagatgggaaaaagagagaggtcatgggttcgtacttaagacccttaagatattagtaaattgtaataccactacgctacactaaaaagaaaagcttcttattgggtgcgtgtcgtttcatccttttgataaattgaaaaaagataaaatgactatacaaggcttctcagtcgtggggattaaagagaggagtgtgttattcagttgagaatggatattttctgtttcaaagaacaacaacacaattttcgagatctcctcaccaatactagtctaaagagccttgaattttttttagttgaaggcattagagtctggactttttaaatcacgaatactaaataaagttttgttgatatcagaactagtaaaaggcttaatcaaatgcgtctattttttaacattgatagtagtactcatgataaaataatccttcatgatatctcttttggcggaatttggactacccataaaacctttaaagttgtttaagttatggaagaccacctcatcatagttatccaccaaattatcatgttggtcagcaaaagaggctatatgattggcttccttgtgtttaatattagcatgaaaataagttatactttcatctcaaatctgcaaccaaataattttgcttttttgtcttagatagctttccatcattttagaacaagaatttgaggtcacctttgtcttgttctcttcattaaataactccacaatcaaagttggagctgatcaaaaagagtcttagctaaagtataagcttgttggacatcccctatcaaagttttattaaactccccaagcactttcctcactttggttaccttgaccatagtttgaaataatccagtacaacgagcaagctgctaccaattttctaacacagtctgtttaacatcttggtgctctgtccacatattgaagagtttaaaaggccgaaaccccaaattcccaacctgcaaacttttaacaatacacaggcagtagtctgaaataagaccccattgataaaaagcttcggtagagggatacaaatcaagccaatctttattcttaaaaacccaatcaattctagaataaattcttccattgtcatgcttgttatttcaagtaaacacataaccaaaactcttcaattcatcaactaaactaagagataaccaattgcaagaatcatcaagctgatcagtggacgatacaagtcgaccaccaacttgatcctccacatcaaaaacatcattaaaattacccattatgagccaaggatcaacgacaaaaggaagagaagcaagattctgccataatccctttctctcaatgatagagttcaatcaatagaccacattaagacatactcatttttgatctcaaagtgtttaaccaaacaatgcaaatattgcttatcttccagtaaaatagtaatatttacatactcaaccaaaagagcaaaattctacctttaacagtataactttgagtgaaaattccaaccacaaatattaaaatttatcataaaatcaattttattaccaccaactttaatttttaacaaagtctctagtcccactttattcaacttgcagagagtactaagagtatctccaatggtaatattttggagaatgcttgatgaggtgaaaaacttatgtggcaaaatataaggatgctataccattggaaataaaagaatgctattcttgaaatttgcattgatgccacacaatgacattgatgctatgttttttttaaacaataaaaaattaaaagtacaatatataaataatagtttaataaagaaaaaaaattatatatatataataatgtgtgatatcataattatagtatttttaaaaaatattataccattggagtgtttttagaagtaaaagtgccaaaaatgatatggaagaaaaataaaataaaatattatatttaggatgatgtggagatacagagcatcttcaaagaatgctaccattagagatgctctaatatcgttatgtttatttcctttattaatatacccctaacattttaataaagtagattacaacaatccattaagaatgatgatgtgcaatacccctacccttcttattaattctagaaggactcctaaaatatgctggcagcttcccttaatttttccttttaggtatcttctcaattgaagcctcaagccagcaatgaagataatgatgaaatttctgtaattgtattaatttcaaaatagatgctccttaatttcaccatgtcaaaactaatatttatttttctgaatgaaatttattctttttttttttaaataacaaaaatgtgggtagttttgataaaaaggtggtatgttgtattgaagcccaattatttataattttaccaataaaagtgagagcccaatagctcaacttcttggccctctccgtttctcaatctctctctctctctctcaatcttcggttctgtgtgactaactcatcggaccaacggtaccctagaaactttatcaacctcgttaactaacttatcggagatcggagatgggagaccggagagcaggaattccgtttcactcacaacaggtactctacttacgcttttaaggctgctaatgaggattaaatacagagagacgatgcaaactttgtttgtatagagttctactttcgtattcgacaaggatatgattttagctattatttaattctcttttcttttgttcttctttttaataatagttaggttttcctttataatggtcagtagttctaagattgagaaattgggtatattattatcatttgaaacgctataataatatgaatattgtgttcttaataatcataagagagtttgttctaatatggatggaaagatttgaaacgttagggccagggccagggccaaagaaacttccataattttctgattttggtttgataaaaaaaattctttttctttcatgtgagtcccattagtatagtatctgttccaaaatatattttatttcagtactgtgtttgagtttgggataattctacatcttggtattgattaagtgtttggtgacattgagaaacttctcttcaaataaaatctaatgtatggtgtttcttgtcaatttgaattgtaattattttaactatatattcatttgcatctcttcatcattgttgttaggtaggcgtttattctatacgtgatatatatatatatatatatatatatatatatttatatgccctcgcacatacatagacactaattattgttgggtgattgcaggcgactctggcggattcttttcttgctgaccttgatgacctatctgacaatgaagaagaagttgttgtgagtagaaggtttttattttttacgttcatcaagcctaaatatgtcgactttgtgttattaattatggtatgtgtggtttattttccaggatgaagataatgctgaagctggacacatggaagaagatattgatggagacttggcagacatagaaactcttaattatgatgatttggacagtgtttcaaaattgcaaaactcacagagatattccgatataatgcaggtttgttccttaaatgttcttgttaaatatatatgatatgtagtttcaatgaaatacactaaacattgtcttacatgatcaagttggattggattaaattaatgcaaatggttgaaattaaaataaattgtaataaaattgttctgcacacgtatataatggtgttgaaatacatgttaattagagtcatttttaactcatacttattttttatgcataaaaatatgtaaccattgaatattggtttgtttatatacatagatacatatatagtattataatgtgtgagaactgtattatggaatgtcattacaaatgtcttaaaaactatactcctggtaaagagtgtacactgcatctatagatatcctgattcattagaaatatgctgtattgtttgcagaaagtggaggaggcactactgaagggttctgatgaatctgaccagggaatggtattagaagatgatcccgaatatcagctgatagtggactgtaattcattgtctgttgatattgaaaatgagattgttataattcataattttattcgggacaagtaccgactgaaattcccagagcttgaatcccttgtgcatcaccctattgactacgctcgggttgtgaagaagattgggaatgaaatggatctcaccctagttgatctagaggggcttttgccatcagcaattatcatggtggtgtctgttacggcatctacaacaagtggcaagccacttccagaggaagttcttcagaagacaattgatgcttgcgatcgagcccttgctctagattctgcaaagaaaaaggttcttgattttgtagaaagtagaatggggtatattgctccaaatctgtctgctattgttgggagtgctgttgcagctaaacttatggggactgctggtggtttgtcatcactggcaaagatgccttcttgtaatgttcagcttcttggtgccaagaaaaaaaatcttgctgggttttctactgcgacatcgcaattccgtataggttatattgagcagacagaaatatttcaaaccacaccccctcctttgaaaatgcgagcaagtcgactcctagcttcaaaggcaactcttgcagcacgagtagattctataagaggagatccatctgggaacactgggagggtgttacgggaggagatacgtaagaaaattgagaaatggcaagagccccctcctgcaaaacaacctaaaccacttccagtgcctgactctgaacctaaaaagaagagaggtggtcgtcgattgaggaagatgaaggaaaggtatgaaagtttagggcttgtttggaagtaattttaattactagacattgtaattacactattataaaatacaaaatgtgtttagatgtcaagtagtaattacatttaaattcttattttatgtttggcaaatgagttttaattacatagaaaattatattgtaagagggatagctcaaatggttgtggtttgcttccacatggtttgaggttagagtccctcctaggtatctacttagttatttctgtagttttccggttcccaaaattttttagggctaggcggggttcttagcttcaaaaaaataaaataattcttatgttgatatacagatatgcagtaacagacatgcggaagctggccaatcggatgcaatttggcattcctgaagagagttccttgggtaagcttttgtctctagcttctaagtaacattatttgcatcttgcttgagttcttttctcttttagggtctagctacattattatatttttagggtcttttctcttttctaactgtttacaacaaataaaaaattatttgcatcttgcttgagttcttagatggtatcctcttactaaccttgaattgaaacagtttaggatatctttttttttttttgaaccaactaagtagttaaataaaccattttgctttaaaattattacagtaaaagtatattgctttacaattatttacagatgaagcttaaattcatgcatgtcttaaattttctaacttaacccttgacaataggtgatggacttggggaaggttatggaatgcttggtcaggctggaagcggtaagctgcgggtgtcaattggtcagaacaaacttgctgccaaagttgctaagaagtgagtgttccttctgcttttggtttatattctattttaaataagctttctttgtttatggcaaggaagctctcttagcttttgaatattgtatcatgtatttatgtcatctattatacaggtttaaagaaaagcaatatggaagtagtggtgctacatctggactcacttcaagtttagcatttacaccagtgcaggtctcatatttctttcttatgcacaggctatcttgttttatgttattactagtttgatttgattaaggcaattagttactgaaaagtaaaaaatctatggaaaattaggtggtggcatattttcgcatgaacacaattatggttcatctcttgctttatcattcattgtattgacctggatttccagacctgtttaagtgattgctcatttttttttttcaaagtgcaaaaaggaaagcttccattgatacttttagtcattcgctgttttggcttgtttatcatttatggcatatggaagctggagagattatcctttggcttgtgttatacttgatcttttcagcaatttaagtttcactttcattgccattcctttacttttcaactaaaacttgaaagaaatattaagtgcccatgttttcattacttatcttgcagggcattgagcttgcaaatccacaggcacaccagtttggcagtggaacacaaagcacctatttttcagaaatagggacattttcaaagatcaagaggacctgaaccatgtagggttagggtttgtgttgcacattcacttgtcatgaaccatggtcacattgggtgagtgacaaagtgtggggtttaagtcccttaaatgtgaaaaatcacttcatgattttgctaagtatattgtgattataatagcattaataatcgtgcctggacactgttgtgataatattttccagtttgagagtgggctcgactcagtgtacactgctctgattattactgcttactgaattttgtattttattttgaaatatggaaaaaaaagagaaaagaatagaattgaaatcaagtgttggaggctggagcaggtgataaattcttttctctcattattaatttaccattaaaattagtatttgaggctacaaacttgattttttttaaacattagaaagtaatgttgaggatatttggtcacattttgaagttgcttctttaactccagaaatctagttaaaaaaaacttaaaaaactgttaattgttgtgtgactctcacttatattttctaccctcatttcattatggttacaaaataatttgggattatcgaaattccttttaaaaaaaaaagaaatcaacattttatttattccgaaaagattttttgtttccataaaaattcaaactggaagaggttttgtcaagtgacaaaaattatctttcgtaatgcatccggcaaaactctatctataaaagatgcattcaaaaataaaaggaatggtgaaggaaattaatcaatagtcaattaagaaaaatcaaagttttcttattaaataataaataatattatgtttggataaaacaatgtattgtattaattattacgatcaaaatttttaataaaatgtatgttgtattatttaaaacataataaatggtccgtattaacttgtattataatatttacaaacgattcggggtcaactccaatctccgatccggactcgaacctgaacccgaacccgggacccatacctagtctcggacccgcgactcgggcttagactctgacacgggaccagacccgggacccaaacccggaccgggacttggacctgagccgtagtcggtgttgggatagagtgtattgaaaatatatcataactttatacaatctattaatacaagtcgataccaaacatagtattgtattaannnnnnnnaatacaatacaatataatacgataaaatataatgtggcgtacctaacgagcttttattgatgtactttaccaactcgcattaataaaggagatagtattttatggagtaatttgtggcataaatacctaagtttaactttcaattgtaaataaatacctaagtttaatttttggaggtaataatacttaagttatatttttggaactttataggttcctaaccgttaaatttaagccattaaatccacgtatcattttcttactgctatatatttgaagatatttatttgtaactggaagttaaaattaagtatttatgtcgcaaattactctattttatatgtgttttttttttcacataagatcattatttaaacaaaaaaatagtaacacattactagtattactatttgggaaagagttctttaaccaacactaccaaacgacagtagtaagtatttcactatcagtagtccctgcatatgaactcaattttagttgaagttgaagtattttttattattttttttttatgaacgtttaaagtatagtatcacaatattctacgcatgtaaatctgcatatgatgaactcaatcacattagttctttgttagtttgttgtgtagaatgtttccttcttttgtgaggaaaaatatattatcacataaaatcgttacataattttgctgcacatctagcatttatttatgtttttataaaaaaaagggaatttccatgtatgcattttccattttttttatatatatattttttatttttataaaagttgtttacattttgaggttatgttgttttcgtcttgaggttatactgtttttattttataaaaattatttttattttgaggttatgttttccatttcgagataggattttttttcataaatatcgaaaaatgtagtagagtttacttttatatatcataaataaataatgccaaaaaaaaaaatgattaaaaaataatcaaagtttaatatatgggaaaaaaaacaataaataaatttgatataacttgtaataataaggttcgctggaaaagttgtcggtgtcggaaagttagtgtcgacggaaaagttgccgaaaaaatcatcgtccccggaaaaatcactgtcgttggaaaaagtcaccagaagtaaatgtctcaaatataaataaaaaatagaactggttctataac

SEQ ID NO: 43320 - DNA, 4086 bp, Cannabis sativa
caatccttgctttaaaatttctagtaatttctcctccccaatccattaacttcttcccacaagtagcaaccttcacattgatttttaattttttatttataatttatttttattagtgtcaaaaatattaaaatttatttagcaattaattctttttgtaaggacttcttcaattaattttttatggtcaataaatttgaagttttgttgccaaaaggaatttttgacactcaaaatggttttattcttgatcgtttgattttttattatactatggtgtcgtaaggtttatgggatggaagggtcgtaactttaaagcttaatatgagtaaagcgtatgataggatgaagtagagttatcacaactttatacttcaaaaatttgactttttagttccctttcaacagagaagtatcaagttgttcatggtgatcattgaattgggattattagtattttgaatttcaatttatcatattcttacttgattattaaataattaactcaaaggacttctttcgattagtctacaatcttatacccaagtaatcttgataaattcagatcatgacttaataattaatctcaaaacactttaatattaagttactaacaaatgagtttattattgactttgaattatacattataaaactttgccaatgtatgagcatgttgagaatgtacactttactattaaattttactttacattgattgattaatctcatcctcattaatgttaattaaacaacaacaaaaactaaattaaaataataatatgtaaataatcatgttggtcattaacaaacaaccccaatttccaacagaaaaagtgttttaaaggtttgagtaaaggccaccggaaagggctccgagaatcgagtaatttctctcaggcaccactttcaaacccaaaaattcgaaaaacacctgttaagagacatagaaagaatgttgttattttgtcaagagacaagaattgcaacaaagaaactaaggtagtgttcggtaacgattaaaaacacaattttctgattaattaatcaaaaactatgaacaaactataaaattttgttaagagaaattagaaaaaaaaaaacgaaaaacaaaatggttcccgaacaaatgtgccttaaactaaactaaacattaccttcatcagcttgatatttgttcttgtcatctcctgcatatgcgagtaaattgtacttgggattccactcgacgctattcatggcggcccgacaaggaatttgatggactgtttttccagtttgagcgtttgactgtttgtttataagagaaataatattgtcatacataatcctatctaattgcttttaaaagaaaaatcttgtttaatcacaaacaatcgaaaagcttactatgtcgatgaacaagtcctcactagctgaagcaatatattcaccggtatggttgaagcttattgtccttacaggccatctggattaagataaaaaaacaaaacaaaaaaaaaaatggtgagcaaacattcattatatataaggttttgattcttattttggggaagaagcttactcgagtttcgtaaatgttctcacacaaagcatttccgagatatcccacaaactgactaaagaatcagcacttccaaccgcgaaatatctgtaaaatttaaggacaaaagaaaatgttttatttcgatgagtaaacagctaagcaaaataaagaataggatagctttgtcggataccttccggttgggtcaattgcaatgcaataacaaccggctgtatgggccataagagtgtcaagtggtcgaagagatgggtatgatagaacttcgacagtacctaaatagtgtaacaaagttaaatcatataaaccattccagtaaacagacagaagaaatacttgaatattctcataacgaaaaattgctcaccgtttccagttgttagaaagaacatatcacccttcatgttccaagctatctcatttacctggaaaataagaaaaaatatcaatccagtttagtaaaacattgtcactaacataaagctgagagagaaaagtactaagtagcctttacttcgaattacctcataattaaacttgcgcttatgaattgacttaaattttcgaacatccaaaatcgttaattcatcatcctacaacattttagatatcaaatgatgatctgaaataccactgaaaaatgcaacatgcttttatttttcagataataactcgagattccaacatcaggttgtagaaacataccctattgccaacagctatgtgtgtgccatcaggtttgtaagtgatgttaatgttctccccgctaagttctgcctgttgtgagcattttccacctgcggaaccaaaacaaccattaaggcatctccggcaacataaatgggaacatgtacgaaaatgagaaggaatcacttactacgagcatcccatagacggacagtcttatctcctgaagcagttgcaattaattcagcatgtttgggatcccaacataattgatccacactatcagtgtgtccctttaactcaatatctttagctttaccctgtaaaacaaaatgtaacataaccccaccaaacatttcaatgataataaataagcatacctgttttaataagcaagaaccagagcaaaacctttattataaaaagttaaggaacttgttgaccgactctattgtgcaaagctgtgagttttaagagttttggaacacaacagttgagaaagtgtttcttttcacagatgtatggtggtgagatttatactatgatgaggcctatcactcaaactgtgactgtgataatgtatattcatagtggtcctctaaactagtataattcttggttttcattgttctaatttgtgatgttcaggtacaagtaaccactacccttttctaaacttttttacaggtaccaagtttagagagagaactaagagaataacaagggcggcacagaatttgtgtgtgtactgagcaaggaggtgtaatctacaagcactgtaattctttggtttcagatcaaagaaagtacatccaaactcaatttacttgtaaatctgtaattgaaccttgtatatacttgtgttctattatattcaaatctttgctacatcatagctttcagcatcattcacaattttaggtcatgattcattttgctgacttagtgttgaaatttctgagttataattacttgtggagccgactaacctaagcaatctcggtaccaagttgagagagagagaactaagagacgagggagggctgcacagaacttgtgtgagtttgatcacaagcttctcaagtgagatagttgtaatctgagaaaacagatttttttgaaaaagataaagcagccattgttaagactggccaaaccccgttatgtattaagagccctcacttgtgacggaagaaaaccgtagttacaatattttagcgaataattaccctaacacacacaataaccaactataaactcaaagaaaatgaaatatgcaaaaaatttcaatctctacattccctacccaaatctaaaaatgataaatcctcaaaatgtttggttttgaaaaattggtaccgaatgacaagcattgtaattctttggtttcagatcaataaagcattgtaattctttggtttgagcatagcttttattttcgattctttgctacatcatagcttttagcatcattcacaattttaggtcttaattcattttgctgatttagtgatgaaatttctgagttataattactggttcatgactgaggtgaatgtgattcactacacattatttatgtctctgtagatattaccaattctccaaattactcagaaaatgaaactattgtctcttaagcaacaaattagaacagaaaaagttcaaagttcaaagctttaagagtgaaattgaatggggaacttacatgaccatggggttcgatatgccaaaccctagcagtttgatcaacggagccggaggcaagcttagttccggtgcaattccaagccacggaatgaacctaattcaataaataaaattaaaatcaatag

SEQ ID NO: 43321 - DNA, 1384 bp, Cannabis sativa
aatttctgttgcattacatgctgcttccatttcttccgagttttgatcattggtcttcgagtaaatatcatttaactccggaaatatttcttcgtatatctattttcttttttgtatctcatctggaacttacttaaaggtactttagcaaagttttgctaactttactgtcaattcatatgtcaaagagttgcactctgcttatgatgcacttgatttgttagaataacattttgtttcttcctgcagaaacgtcttaagcacaggaaatcaatgcttattgtaagtaatgcatatgtacttgatctttaaactgatatgtttaaagaaaatcttatttgaatgatttgagctcttcttctttttaactaagtgatgcattttacttaatttatgtaggaaagaatagagctgcaggaattttcattgggttcatgtccacctagcttaggtcttcaagggactcgttggctgacttcaaatgatcaggtttgcttttgttttcctctcttgctttaatttaaacatttaagtcttcgtatacttattatgtacgtgtatcttgctcttagtttctcagttatatttatgctgtcttaaatgcaatgatttgttcttgttttcttcgatcttcatatagttttgtgtgcctattgacagagattcatgcgtttaggatttgactgggacacaaatgacatgagcattttgttgcttgctaagctggccaagccgttcatggggactgctcggattgttataaatagtctacatattaagggtgatgtatgtaaagttgtttccttacaagtattgattatcttcatagatacaagacattcattcactgttcttgaacttgctaattgggtactgactgctgtatttgctgcttgttgcatattagttggcgattcacttttctttcttatgatggaaattacatgcagatattcagccataagcttctttatttttggatgtgatcatttcatttggtatattaattgtagtggggatactttctcaccatcaaaggcaaagaaataaattttcttttcctataatgccacatttaggactgcatttatatcataaataagtatagaatttttccttgtttgtcagatgtttgtttcttgtattagttaaagcattgatgcaatttatatacagatgatctttatgtttagtttaattcaattaattctgctttctttgaaaaacatcaatagcaatttacctttacttttgtagtttctcacatgcaccttagcagctttaattgtaaagatggtttggtgtttcaatggcattagtagctatgtataacttgaagctgttaatattgtttccaaggtgttacttatttcaaaattgatct

SEQ ID NO: 43322 - DNA, 3191 bp, Cannabis sativa
  modified_base (2938)..(2941): a, c, t, g, unknown or other
tgtatatgtatatgtatatgctagattgatgttacatataataattaattttctatttaattaggtgatgttaagtgtaatataagtttgtttaatttttctattaggttaatgtatacatatttttttaatttttgaaaagtttgagattttgatttttgaagatttttttctaagctattgcgactatattgatgtgttctttaaatgtaattatatatacatattttatatgtacaataaaaatcaagtgagatatcgtgatgaatatatgatttgaaaggccagaaacaaagttgtttggtataaatatattcatgacatactttagtaaaccgtactaagaaaatttaattaaatatttcttactttaatatgttactgattatatatttaatttattggctatgattttaattctctcatactaatacaagatcatacattcataaatgaatataattttttttgaaatttatatattataaattatttaaataataatttaataatcaactatatttaaattgttcactttatttaatatttcaaatgtctaatacaattttttaaagaataaccctcaataactcatgttgttatttgaaattataatacttatatttttctttttagaagaatctcctcaaagaatactaccaactagatcaaaacactctaaaagaggttgaggacacaaattcattgattgttcgcatctatcataagaatgttctaaatacaaggaggataacctgaccaccaaacaatactaatcatgataatcatgtaaacatggtaatagctaaggtgtgttcatagttctagaacaaaacatgaaacaacattcttaaaaaaattacaatcatgaataatgtcttgtaaaacaagacacaaagacgaatcaagtgatatccgactacttaacttaatcacaatgctttgacaactcgtctaaaattgaaatttattttttacttttactctttatttctttactatgaaaatggtaagttattagacaattttcaaactaaaatctaataaaagggcattgatccataaattcatatttcattatttctataacttctactagtttttgttttttaataaaataatagttatggtttacgatctaccaataaaatttcaagtatatttgtaacatactttccaaacttcctcactataactatatacttagcttttggtacttcatgtcttaatcacacatgacaaatgttttctatcttattattaggctttcaattccacacaccaatatcaaaacaagaatggttgttgttattcaaagaatatgtgtatttgactgtttgtgttagagattatttctaaattttaataaatatcccacttggaaaagtaaaacaaaatcaacgtaatattcctagctagtgtgatgagagaaatctctgacaattattcatcaaccatgtattggatgacccatttaaattattatttctaacttgctaagttgttacttttcaactccttgtttgcaaaacactctatagcttatatatctgatataataaaaataaatagaagagcattgttatcaatttggaagtatccttgtcagtttgatgttacattaaaccaaatgatttcttgtgagaaaaataattaattataaaatattcatggcacccatttcatattttcactcctttgatattagtcatataaagtgttttttaaaatttccctaaattaattgaccatagtagtgagaagagttcatgtaattatagatgattttcactcaatttgaaccataactagtcttatagatggttcttaattccttggagatattttgtgaaagttaatgaagaagatggcatatggaattgccatctagaaatgaaaaccttttgatttttgtttgttttccttggaaaaaaagttgttgaaatggctaatatatatgttgggtttctttataaacttttttcttagtttatagagatgtggtcaccaagctagagaagaatctttgacttggaagaatgatcatagaacatcacaacatgagcttaatgaatgcaaaaaatcaacaacagtaaaagtaattaaggtcacattgtcgagtcatattcaatgtttgttttctaaaatgttagagccaaaattgctttgttcccaataattaaaatcaacaccattaggaagtagccttgtgaagaagatgaccaaagtaaatgaacctacatatttagagctcatttggcagttgcttaattggtcttcttaaaattctagtccaaatctcataaatggttggaactgggtgaagaagatgtgcttttagtctttattcctcgatctctaacattttccaaatctgtctcttaacagcatgtgattctttattaacctcacttttgcttttaataccaatctttgtctcatgtgatgagagatattcttttatgtaaactatgaagtttctctcacttattattacacctttttttttttaacctagtcaaaaagagagtttaattacatttgtagagattagattgtacaaaaacattttatatagtacatttttaactttttaaggaataaaaatagagaacataagggaattctgttataatgcaattattgggtttaagataggttgtcaaagctgacattatgagccaacattaaagaagaaacagtggggttttggttctcaacataaaaagctcaacatagtttttttctttttaaaaaagaaaccctttaatttcctttaaatttatgtggttatatatggtacagcttaaccttatctgcaaggctacttttttctatgccttgcttaggaatgtttaggtactatttaattgattggaataacattgatttagctttaaaaaccttccattccatcaacatatatatatatatatannnntatttatatatatatatataattgcttttctttccaattcaccaaactaaaccccacagtttatcagaaaagcaaagctaaaaacctaacttgcagcctttagaaagagagggagatacatagatataacatggtagtgaaatattgtttgtggttgtaaagtgatgagcactgtcctttttctcattatttatgcctttactggaattggttttttttttttacatttccaaatctcttacttgaaaaa

SEQ ID NO: 43323 - DNA, 2219 bp, Cannabis sativa
aaatttcttgcgaaaaagtaattgaaatttcaataataaacaaaagtataatccatacacagtcttgaatgctcccctccccaagacttcttcatactgtaatcatacaaaggaaaattaaatcaaaaccaaataaattcagatacaaaaaaccaataaacaatgaaaaaaagcaagtatgaaatcaaaacccaataaattcagatacaaaacccaataaacaatgaaaaagcaagtatgaaatcacacaacaccaaatattacccaactaatcaaattagttcagcaccaactaggcttaaaattctaaatagataacaacatttagacaatgataaaaataccaacataacatagaatttacaaagactaaaaatttaacagaaaaatatctaatttgataataaagctacaataaaaattgaaatacaacaattcaatacagaatttcgattccattacccgcaaatatcgtccagttggatctttctccacaacatcatcgaacccagaatccgaagttccacgcattacagctgtacgcgaatccataccaaacccaagaaaaacagaagaagaggaaaaagaagaagaaatcttttggaggggcaaagaaaaaaagaaaaaaaaaccaaactagaaacacaatcgctactagagaacagaattaattgaaggaagaaacttttcagagaatgcttcacatgcagcggagtaagaatcgaatgccgatcggaagcgaaaccggcagcctagaaaacaaaccctagaacatccaaatcccataataccgaaatttctggaatcaacgaagctcgtaacaatcaaatctaacccaggctcagccatattagctttatcagcattttttggaccataaaaaacctaaaattaaaaggttaattgaaaccaaaatcaacacaaaccgaaacgaaaccaagaacaattgggtgaattgaagcgctgaagttgaaagctttgaatcaactgaagggaaattagggttgaattttatgagaattggggatttttttgaggttggtgtcgaaggaataaaagaggagaatctttctctttttatgagcgcgagtataatccaccgcctaaattcagcgcgttgacttatatatatcaataatttaaatatttaaatataaaaatgattttttttatttttatctttttaaaaaaggaaaagattattatatgataacgcgaaaattactctttatcgaacattaattaattagttttattttcttttttaaaaaaatagttttattttcaataaatatgattttttttttaaaaaaaaaaaatgcttaatatttattatttaatactatttttcttttgaaacaatatttaatactatttttaaaattaatataattactaaattacttatttttctcccaaatttgaggataatgatttgatttgatattaaagatagtttttaagatataacacgtcaatttaataataataataatatagtaaaatggataaaaaatggatagatttttttttttcgtttatgtaatctcttattattattttaatggtaaattgggagaattttaaaagaattgtgtataaatttatcagcaataatttaattttaataatagtttgaggttaaattctttattaattttaaataatttattttttaaaaaattaaattagagatagttttccaaaacaaataaattaatgttttttttttcaagataaaaacaaaatgggggttattattcttattcaatgacttgattaattagagatactaaataaatgaaataaaaaaagaaggtaatctagaatttaataattatagttatttagggaataaacaataaaattaagagttaaaatataattagtggtcagcacataattccaaaatccattagaaacgttcaaacttcaaatgtcttccactaataaaagccagccaaacagcaaagcattgtagctcaaacggtgccgtttcattagcttgttttttattgtttgattattataacaaataaaatggtcatgaaatggtgtcttaaatttttcagttcgttataaatggtttttaaattattcacattattataaaaaaaaaatttacaaaaatattagaatttgggttaatttttacaaaaatactgtcacacaaattttttttcaaaaatattgtgtttttataaaccaacagtgaaaca

SEQ ID NO: 43324 - DNA, 1295 bp, Cannabis sativa
ggtccaaaatggtattcacccaaaagaaaaacaattgaggaagaaaattaccatgcagtgtatgacagcaatgtttttgggatcagatgaaagccaagaagacacattttcacagaaaagtttgatcatttcaagctgaggaacatgattatcatcaaaaggaaatgcttccacacggccatgaaagtgagatggattatagttttcctcaatgcagaggttgtagatctatcaaaatatcatcaaaacaagagattttttatgtaccattaaaaacaaagaaacaaagagatgatatttatggttgaaaattgaccttgtaatgttcatgatgtctcatgtcaagaacagacttgacctgccaaagaggattgcgaaacatggctctcatacgttctgcagggaatgacatggctagtaaacgatctgtaatgtaagacatgtcaagatcatacccctcaaccaacattctccttctctgtcttgataccaagtttcgaatataaagacttttgctcacataattgatcacatgatgttgtaagcttagatcttccttcaaaattacctcttgtttggaaaagtttaatcccatttgatccaataattagaaatatatgtacatttttatatgatggtcatctctaaaacaccttttggtttgagcagcctgaccttttctgcacattaattctttcctaacaaaaatcaacaatatcatattcctaatctagaaaaaaaaaataataataattaaaacacaaaataaaaacattttcttgattttgagattgttgaatttttcttttgatcttacctcatcgaatgatcatcgtttacaataaggtgatacaacaaatcccaaaataagaaaattatgaaaacctagagatagttttaaatatgattttcaggtggtcaatgtataagaaaaaaaaaatgtattccaaattaggtaatttgtgagacataaaaggctagaatttagaggcaatgctaatcttatttaggtacagcttttggcgggaaattatgacttgtcatcattctaaaaacaatattttaagcatatgtttattttttcttttgttattaattattgttatttaaaatagtgtgatactaaatattataggtttaatgatgttaatgttcaaattttttacacttacattgtgtgaatgtgagagtttcctaagtttattttttgaaggctcttgttaattttattaatttttgacatattttatttgataaaaatatttatattttctaattaaattcgcgtatctata

SEQ ID NO: 43325 - DNA, 1575 bp, Cannabis sativa
agttcaattcttaaattatcatagaaaaatcttataatttttaactatatatattatgttaattttgtattagtgattcatttcagtgccctttagatcatttgttttgttgtaaaacaaaaagacaatggtgaattggtggtgggaacgagcaacaagagatgcaaaggtaagtactaactaataatcgtaattgttattaatattataatatataaacataagatttatttttcttataaaaatttcaacacttgatttgtgaatagctgattttaactaaaaaaactgttttgtaatagaaaagtggtttccctttcatgtacagaaaagagtcaataattaccagaacgtggctcttgtggtgggcgtaactggcatcgtgggcaatagcctcgccgagattctacctctctccgacacccctggcggaccctggaaggtctacggcgtggctcgtcggccccaacccacttggaacgctgaccacccaattcactacattcagtgtgatgttactgacccgaaccagacgcgagacaagctgtctaaactctctgatatcacccacatcttctacgtcacatggaccaacaaacccaccgagctcgagaattgtgattccaatggccgaatgctaaagaatgtcctcgaagcagttatccctcatgcgccaaatctccaacacgtgtgtttgcagaccgggctgaaacactacatcggctcctttgagtttcttggcaaggttcgaccccacgagactccgttccatgaagacttgccgagactcgtcacgcccaacttttattatactcaggaagatattttaatggcggaagtagagaagaaggaagggttgacttggtctgtccacaggcctggactcatattcggattctctccgtacagtttgatgaatgttattagtggtctttgcgcttatgcagccatgtgtaagcacgaggataagccactcaagtttttgggcactcgggcagcctgggattcttcatgggatgcctctgacgctgatttgatcgcggagcatcagatatgggcggcggtggatcccaacgccaagaaccaggcctttaattgcagcaatggtgacattatcaagtggaagcatatgtggaaggtgttggctgagcaatttgatgttgagtatgaggaatttgaagatgatgatggggatggagattcgaggctaagattggtggaagagatgaaagataagagtgaagtttgggatgaaattgtaaggcagaatggtctggtgcctacgaaattcgaagatgttgggtgttggtggtttgttgttgcttattttggatattcagagactgagaaaattgtgagtatgaacaagagcaaagagcatggttttgtggggtttagaaatttaaagacctcgttcatttattggattgataagttgaaagctaataagatagttccttgattattatatagtatgtaagttaagagcttatagtacttttgttttgtgttttccaaataaactgtttgtttgaatggacttcattcacacatcatatctattttattacatat

SEQ ID NO: 43326 - DNA, 3355 bp, Cannabis sativa
aaaatatgttcttaaaaaggggctccatcaattgtgtgaaaatagctcaaaattttaactatgaattatttattctttaaatattattttaataattttattattttttcaattatttttcgtttaatttttttaaaatttgtttggtttttataataaaatataatgcttaaatggtatagacaaaaaataaaaatttaatgtatgatgtaatgtaaaagtataagataaaataaaataaaaaagctaattataatttttgcccataaaatttttaagaccgttaaaaatctcatatgaattattgagattgttggatttaatgatttttttttcaattttagttaggaaagtataacaaagatgaaagttcaagggggttgatttgatacatgtcaaagttcgagaaaatgatttggtagatattaaaattaagtaaatgagaatcacaaattttgcaaaattgaatgaaactagacaaatgtccttaatttaacaatctcaatagttcaaataaatttttaattgactaaaaatgttcaagggtataatttagtacttatcaaatttcacaaagcaaaaattttaattagtctcaaaaaaaaaagttttagtgaagtattttgaagaattaatagaatagaaaaacttatgtaagtgatctaataaggaatgaaatgaagaacatcttattaagaatgattttatcatataaaattaaaaattaacctaaaatatatacataaattataaaatggagaaaaaaaattaagttggggtcatcaataacttctctttctctttaataatcaatatactttttcaattgtggtcacaagtatttgttagaggtattcaaaacttatacatcacccaatttaaataagctgtgcaaattaaatcaaaagattgactcaaaatgtaattcgaaaatttagactagcctaacgaattattttattatttattattattattattattatttgaaagaactcaaggaaaatttaaatggtcgtagatttaactttaaactttataatagttaattttgattttatttgaatattaaagttgaattttaaaatttataataagattttttttttgttataactaaaaaagaaaaaagaaattataattttatattgggtcgaccattttaacatttataccacccatataaataaaattacataaatactttttaaatacaaattcaagttgcacgacctccacttttcatcttcgaacccttcgttcgatcaaataaggacgacaacaacaaaacaatccaggcagacaaagatccatgcttctcttccttggatttcttcctcgagcaaataaaccttcatcttgtcttgattcttgtttggcaaccttttgccaattcaattctgcaactcttgatctaagggtgctcataacatcttccaaagttagagtatctcaactgtacatgattacagtcctcatttccttgaactgatcaggaagaccatttagcagttcacagcttggtcttcttccttgatagtttcacccatgttagtaagagataaaataattttattcaattcatcgagattttgttctagacaattagttgtattcattttaaaaccattgaacttccctttcaagaagattttggttgcaggagacttagccatgtaaagatgattcagctttgtctagattctaagggctcttctctctccaatgacttgcctcggtacattatcagccaagttcataatgattgctgatcttgcttgcttcattatggtttctgcagcttccttcttggaaccatctgttcctttttctaatttctcagttttctcactcttctcgaattgatcttcaagaactgagtccagtttccggtaaatcaatatcgtcatcatcttctccttccacaaactgaagtcttcagtaccatcgatgaacgattaatagataagttgagagtatttttgattaatggataaaaaaaaagaaatatttctcaaattatcacagttgaagtagtttgtgagtttactttccttttattccaaaatagaatgattttactccataagcaaaattatttttctgttacatattttcctattcgttaaaaagaaaaaattaaaagattatcaataagaaaagatctcttcaaacttgacatcaatgaaaaaatgaaaaacatattgaatatatattttgtagagaaaattcaatccaattacacttacataaatttatattttgcaaattaaatgaacatatgctaattggattaaattaaattaaccctatggaaaatattgttaacccttgcttgtacaatagttcacttttttttttttaattttcttctaaaatttgaaaatagccatattttaatttaaaccttctcatttgtccttggtgcctgggctgtcgaggccttgtagtggtcgatgctcttggtgcgagttgggccgactcggtggctttgggttcattggcccactatggtctttgtgggcttcacttgtttcttctctattgattcctaattcctcctgatcaacaacatttattgattattttttgtatcttttatacactatttttcttgaaagtttgtttgagactaacttttattgttattaatttcttttttcctaaaattgaggaagtaatagtagcattattttacatgagataaattccttttcatttctctttaagcttaaggtggtatttagagttttcttctaaaaaaaaatatgttcattgttatttgttattctacatatagtatctaatatcaccaaaaatattaacttaaatgtgatttttcatataataatttttttaatttatcaaacgtttttgaaaaatttcaaacttgttttcgatactgcaaattatgtaagatttgttaaaagtttacaaaaataatattgtaactacaacgaacactattaggataatattgtaatgtaactataacgaacactatatggttgtaactataacaaacactacaatgataatgttgtaactataatgaacatcgttaaataaaaaattaggaaaaaaaatattgtgggtgtgtatttttggacgtaaaagttgagaaagagcttgtaatatgagattgtagcaagttaattttttaattagtcccacattgtatatgtgtaaaatgataataacatgtatgagctactccttttgtgttttttgttagatcctcttcttttgtgttagatcatctcttttttttctcggttgtatttttaaacgggaaatttgattttctatacttaaaagttttcaaaattttttttttgaactaatacattttata

SEQ ID NO: 43327 - DNA, 1356 bp, Cannabis sativa
ctattaaattaatattgtaaaacaagattcaaaatagtatttactcaatatatatttgtttgtaaatgtaattcacataatacgtattttatttatctatttatttttaaaattaagatcccatctaatcttactatctgagaactagaaaactatattgctatgtaggtatttaggagggattcaaactttaattttgtggatgcaaactaatgtatgaccatttgacctaccattcttggatcacataatttgtactttattattgtcaatttttttaatgcatgtactgtttctattaaaggaacttcatcacactctttattcattacttttttttccttaattttctttcttcactattgcaagttgagatagagatattatttatccaactactttggctttggtgaatcaattcaatgtgaagaccaatatttattagcagattctattaagttactaaggaaaatttatggagctatgcttgtggctcttctacatgaatctgttataattgtatttatagatatattgacaagtacaaactaccatcaaattaaagttcaacatctttggtagtactttggaatacctatccatagatagtgcttaaaatttatcccaataaaatattatgctattctaatggaatcattgtgggaatgatctacaaaaaaacactttacatgaagaaaaaaaaaggactttgttttagataaaaacttatttcaagatcattttcataatatatattttttatgtataataatgttagactagagtatctagctagaataaatacactaattaaaaaattgtgtatatatagttttgaatgtcgtagtattactcataagtttatgttttcaaagtaaattttggttggaaggttacaaatattggatatgattttggtggccataattgcatatatcctctaccttaccaaaattctaacatgccatttattaatattttgattgatatggaatgaagtgacatggagcattgttgttgttgtggctctctaaggagacataactattgagtctcctcaaattaaaacgattcagatatggtgtgtctgtgagtctgtaactactcactgtaccaaaatcactaaactcttctaacttggtttctcatagggtaggtatattttcttgaagaccagtcataattgtatcctcatcaacaccatcaataatgagcctttgaagcattacatttttcccacattattagtcactataaaaacttttacttttagtcacaataaaatttatgattaaaagtaaaaatattgtgactaattatggtgccgtttgtttacacttttttaatcagttttct

SEQ ID NO: 43328 - DNA, 5145 bp, Cannabis sativa
tggtccttgtattgtattacaatagagttgtaatattttgattttcttccattgtaataatatctctaacaggaaggtagggcactccaagaacatgaacatatataattgaataataccaagaaaaaacttgggattcggaacaaaacctattggcttctataagaaaaaactggcattgcttgacaaatttctcctcgagattcaacaatggcttctctcttcggataatgttgtaacgctatactgtttagatatgttacagtaaatttttaattattgtgcacacatttgctaatcagagaatttctcaaaaaacgtgctaaatttaaactttaagtttttataactatatatgtccatacaaagagtccggatcctattttttaaatttatattcatgttcaaaatacatgttataaacatgtcgcacaccgacttgtatttagacgcttatacacctatccataaggctaatagatgattaagaacgttcttaatagaagtacgatcgatctttctaccacatgcactaagtactcgtcccatactagtgttggtagggctaaatcgtaccctaagtactacttagtgttgtaccacatgcactacgtacttaatcgtaccagtattggtaacactggatcataccctttgaacaacacatactgtaccaatacactcaatacagctaccatactagtgttggtagtatatgaatcacatacacaacatgtaatatacatacatagccatatatttatatacatattctatgctagtcttacctcgtttcttgatttaagtgtgtcggtcgatctgaatggaaaatcacgcgttgaacggaggccatatgtcacaattacataaacgggtaagcaacttggtaaaactttctcgggaatctaaactcaaaattagaagttttcttagcggtagatagcatggcaatactcttaatatcgagaaaatacaaaaaactaaggctctagaaactgcctaaaccggttcttaaggtcctgcgtggataaacggttaaccagttctctgtagaaaaccctaaaaactttgaacctcgctcaatttttttccaaactcaaccaaactttccaaaatacctataatgacacctaacaacaatatctaagcaataacagcagcaaatatatcaaaaaataaaaggtaccattgttaagccaaattagagttctcaaagtcaaacttgctcaaccacttctcaaaccagcaaaactagctcatctaaatcaatttcaactcaaatataacccagaaaaagactcctaaaagcttagggttcagacagaaccgaaaatcccgattgcatggtcaaactcaacccaaaattctcaaaaagcttaaaggaaaagcactagggttgtactttgggtttacaccacttgaatccaacaagaattcaccaaaatcacagaaaaaaggaagaagcaagctcttggtttggtctggttcttcttagccgactatgtagagagagagaaaaaaaaaatagtttcgataatttttgttttaatttaaattctaaaacttatcctaataacattaaagatttttaatactctttattatttactaagaatttaaagtaatctaaactattccaccatataaatcattaaaccaaataaagcttcttaatacaaaattctacttttgccatttacttccaacttaagtaaattataggtccaggggtaaaatagtctaaaatcataaccccacatactctcgatattccaaagactacatataactgtcacactagatcaaatgttctaagctaacccatgtgactctaacgaccatccgtcgtatttttcattgttaccgagcaaaaatcatacaaattataaattttacatatagcatatatatataatacatttagagtttaataaaatcttcgaaattaaaaaattataacttgaatgcatatttattaaaaatagggcccacaacaaatataattaagtaaaatcataaaatatcaacaattaatattaatttccctactaattcatattctaatcatccagtcattacaaaagcgcaattgaaagctgacatccttcttgaaatggaagagttgtcgtctcaacaagactctatttggcgtcaaaagtctcgtgagacttggctctgggagggggataagaactccaaattcttccacgcctcaactgtgattcgcaggaaaaagaatttcattgcctcgatctcgaaagccatcatccactggatcacgggacgttatgatattggaaactatttatggagaaattcaaagagatctttttgaccaaccaaagttccaaccacattaatctctttgagtttatcactccttctatatcggtgtcaatggtttgctcatttcagactatttataattatttgattcggtcacgattttaaaattctcgtctgtgattcaaatcaaattaaattgcctaattcttaatatatactatttaattaatgtgattttttattgaatattaatatttaagaataatcttaagtataatattaataattattttaacattgtattaaaatatttacaaattataaaccgcaattttgaaccaaaacaatcccctattaagcggattagtttgagttaagcatttaaatggtctagagttttaaattttaaaaaactgacattactaatttgctttaaaaaaattaaaaattcaaatcaaatcaaagaacactacaagaaaacaccatctaactatttttcttgaatatgttttaaaaaaaaaatgtcattagacatttaaagagagtgagaaatatagtatatgggaccccacctaattataggtggataaaagaaaatgtcattaggcatttaaagagagtgagaaatatagtatatggaaccccaattaattataggaattattttacaaatacataaaaataataaaaaaaattataaaaataaaatttcatagaattttaaatatttttacaattttttgattttatttacaaaaaatatagttttttatattgtactcttgttgttgattttttattatctgtatgttgtttttttattgttgttttgatgttatttaaatgttatttttatgttacttttatatagttttttggttgtttgtataaaaaatcgtaaaaatattaaaaaaaattctttagacgtaaaaatgtaattttttttataaaaaataatatgttatgtaattatctcttaattataagtggataatttccaactaattaacacacactatttaaaaatgagtttgtcactaaaatcctccattttgaagttttttcgtatgtattgtttttcaaggttgcccctggtcggagtaaatttggttggttggtggttattgtaacactcgggcggtggttcgagatcgtagcagtgtgattttagcttcccaaaatacatttaatgctaaagagcaccactggtgcctagcaccctcttatgtgtcagtattgatattggtccaactacatattgggtcccatattgtttaaaataatagcttttagggagtatcgctagtatatcgcaacgcgacatgtcgagaaggtgctaggcaccactggtgcctaatagcaatgctccatttattaactttgcttttctctttacttcttgttaagttaataaaactaaaatacattaatggtgtctagtattttcttacgtgttaatatagctattattagttaagttaagtattaagttccatatagtttaatataataacttttaaggaatatcgctagctaatcgcaaggcgacacatctaaaatgtgctatttagaatatgctaagcaccactggtagtgtacccaacaataatgctcttaataaagacatttctaaagtataaaaaattatttcaattacaatattaaaataattatactaaaaaatattttttattattacattaatttttaataaaataaaatattctttttaataatttttcacttaaatcataattaataataataataatttatagtattcacattttaatttacacacaataaattaaaaggtgtttctacaatatacgcttccaaataaaagagttatacatacaatagataatttgaacattgtttattgtttttggcatgttaattttttttgaatttatcaaaattttataagatgtcttaaataattataatgtacatgatcataaagaaaaattacactaaaaaaatctttcaaataccgaaatagataggatatattttaatttacacacaataaattagattttcttataaatacaaataataatataaatatatataaaaaggatgcatgtcgttattacagtgtcacgatatatatgtagtgcacggtagttaaacgaaaaatttaaggtgcaaaataaaatctcattggaaacatatataatatcaaagagaggttatgtagtctcattggagctgtggtatttaggatatagtttgtactatgagattgtagctttgtatgacatgagattgggatgagtgaaaattggacggacccacataaagacgagagggggcagtcgctcctctggaaaaattagaaaaaaaataaatatatatattttgattaattaaagcatatatttgtaattgtgataaatataaacaaaataataattttagcatattatgtagactatttcatacatgttatagagattaaagatttaaatcctaataaatatctttatttttaatatttaacttaatttttgtcccctcccaaaaaaaaaaaaaatatgtccccttttaactttagttatgggtcaaccaagaaagtttaatttattagttgatgagatatgtgaaaggctcttctttataagccttttaggtattagatttagacctaaatatgctaattgtatagctcatcttgggttaccaaaaatgttcttctttataagcctttgtgtgttttattagaggactaggggagggttagcacgtgcaatgcacgtgcctaactctccttactctattttatttatatttttgttcacttaatttttattttataaataattataattaaaattatataatttaattttt

SEQ ID NO: 43329 - DNA, 1361 bp, Cannabis sativa
tttaaggttggctaattaaacagtcaaccaagacacaataagacgaattgtcactcataattttctattgttttcatccttttttttattataaatttttatcaaaaaaaaccaaatttcaaaacaaattcttaaatggttttgttcatgcatgtcagaatatatattacatataaatttatcaagtatatgaatgcacgagtaaattgaggtgactaatatatcatcatcatatatctttatcactattcactacttaaatataaaaaattattaatatgcaaagtgattttagtgctcagagtaaaaaaaatgtgagtcttgtgaatttcaacgcaacagtagttttgaatatcatgcatgtttttcccatgaacaaaaaaaaaataaaaaacaaaaaaaaaatgggatggaatctagaatatgatgaatatatattaaaatttgaacagaaaatatatattatatatagccatgaatattcaagtgtaccatcgaaagtagtgatgatgataatgatatagctagggatataaaggtcaaagccgtgggaaggggtttcagtcctttttgttgtggaatttgtagacaatgtcaatcagtcaatctatcagattaggctgttcatgtgcgtatcaatgttgtagatacaccaatatgggatccaccaattaaagacacagaattcgaaagagacaggactatataaaagatattcttcactgttaacgtatctcattatatatcttacatcatacattattattaaatacaatattgccctttattatgatcgatcaacacaatcagaattaactcaatgcaagtgtcaatttttcccttacgagaatctcctaacatgatctttttcctttcctttttctttcttccatctgattttgctggtgaggtaatcaattttggtgagctatttggtcaattccaacttccattcggatcaaatgtgctacttgtgtttttcatgtatatgttacttctatagttaccacattattataagggtattaatactactactaataataatttgtgcgactaagcttatcttcaacaaaaaaataaaaaaataataataatttgtgcgtttagatttaacttaaacaaagtacttgcgagtaaaaatatattaaaaatgattagacacaaatagtacttattaaatgaaattaatacatttaacacgattaagtgcatattaataaacaaattgtaaatatattaatgaattaaccaatctattaataaaactacatgttaaaatgataaatttaagggattttttaatattatacttaaaattaattttatttacaaaaatagttttaataaaattatttaca

SEQ ID NO: 43330 - DNA, 5184 bp, Cannabis sativa
  modified_base (5120)..(5124): a, c, t, g, unknown or other
taaataaataaacttccttaaatattaaaaaaaaatatattggagctgacagagaatggtaaagcattgggcgttgcaactactcccctctttgtctttggctccgcatatcactggtttcgtcgctcgttcatttacaccgctccgacgtatctccacccccaaggcaactaccactcccactcccaccctaaccttaccaaaccaaacccctttcttccttcttatttttattttttttttcttaatgtattttttattttgattctgatttactgataaattgattcaactatacccagatggctatggacagctacaagtttgggccatataagatagacgacaaggaagtgttcttcaagtcccacctatcctatgccatggtcaacctccgtcctgttcttcctggtatggcccatgactagctgtctatttcatcttttccattgacttgtcttctgcaactatctatattgctatttcataattaagctcaagctaagttatgggatcaatcaactctctttacatttgtccacttttgagttgattgtagcataacaatttcttaatgtggaatttcccttaatttagcttcttcttcttgtcttttcttttccttttatgtgatgatatcgatgtgttattccaatagtgatgattactttttcttccttttcttttgcaggtcatatcctttttcttatgaagtgtgtgacattttgatatttgtgagctaaacactttgatttttgatttgtttgcataaagaaaaaggacaaattgtgctaactctgtattttttaggattattattttttgggttgttttaaacaattacacagcagctttttaaaagagtgatcagttttcttataatttgtatgtatgtttggtatacaacatcaagttattacaaacttgtaacatgtaaaccaattgaccaaagttgcatgctttacattaaatgccctctaaacctatgttgaacttcattggcattgatactggtgcattcgtagtaaaattagcccacaaattgcttgagtcatttcaactttgtttccttgacaatatgtacacgtgcttgtctgtccgaggcgtgaagtgaaacggtttgttgatctcactgctgatgagactacagatctatggatcacagcacaaagggttggtggccagcttgagagctaccataaagcatcatctctcacattcacaatacaagtgtgttctgttatttttctttcattttctttccttctcattttagtataaattttcattgtttctctttgtgagtttatggagtcttgcattctcaaatgatgaatgtggaatagcaagaacctacattttgtgtttgttcaatgagattcatttatttttttatctgttatgtcttgatggaagctacttcataagaacctcctcataccatccccttctacattcattgcaactcagcacagtgaatgatgaaaatggtgggaatcctttagagaaaactgactgctttgatctctgttttgaaaatcaaggatggaccccaggcaggacaaactgtacctcatgttcacattcatattataccaaggaaagttggagattttgagaataatgatgacatatatgatgcagtaagatggaaaattcgtcctgtccttgattttgggtacttatgtttagatattgtcttattttgatttaatgttgtagattgacaagaatgataaggaactaaaagaaaagctggacctggataaggaaaggaaggacagaagctttgaggagatggctcaagaagcagaagaatatagaaagctatttttgtagacaatgtatgcagtgagatatggtaccagttgtttcctttgacttgtaagtcaaaacttttatgataagtgattctacatatatacattttccttttgtgtactgttaactaaattgaaagtgcaaaaaattgggagtcaggttactaacataatgtgttaattaaaccatcacctacttttttcacttgaacttgaagcttatttccgacgctaagtaatctctctacatgtaagctttttgtaatctcatgcaatctgttcataagttgggaaatatcgaataataatgagtttttgtatcaccatgtcttgaacaaaatggacaccaaatctcagtactttgtccttgcatggtgtgataaattggagtagccgcgagtgaagctgctttaaggctgacacatcagactatttgaacaggaatatgcatctcttttaagtatattcttatatcttatgacttcagcagcaacatgtgctaacgctctatgctcaaactaagtacttgaccgagccacaacaattcacattttggatctccaagataaacacaatagactcgtggagtgcctgtcattagggcgacttggcccattttgcatccgagaagccttgtagagtgagtgccttgattgagctagttttgaagctagctccatgtgtagttgtgtgtttcaattacttcaacacaccctttttttaaaagactaaaaactaactcagcttagtgacaatgtattttatgttaggccgagtaatagttagatattgaagtgcctcacactatgagactatgtttatagcaaggagcagctagtgtggagtaacctttagcaccttgcgtttttttttctttggaaaagaagcattattatataaagtaaacaaaataggcctaatggccattatagacaatattatctaatattgaggaagtctcaaaaataccagttacattttgcgtaaacactcacctaactaaattgtgagcaacaaagttaaaagatctaaacactttttaaaaaattacatctcagaaaagagttcaaaaaacttctacaacaagcaacatagttattaatgttacatctaaatttagactcttaacttttaataactatgttaggatcactttctgtattaacaaactgcaagtctttctctgccgcaataccttgcattttaagggctctaaggtgccactgagattgcttaccaaattgtcacgcctggcgaacccaaatatccctagttaaccataggagtcaaagagatcccttcacatgtttgagttatgggttttcatccgcaaaggggtgcaccgccaagatcaagataagctcataacatcttcaacattttctgttggaactggattaaatcaaaccatgaaccaacgtggaggtgatgcattcctaccactacattgatggtcattaaagtaaaaacttacaaaataatttttaaataatgctaattgggacaagaagatttgtcaaaaaaataaaaaactcaattgaaatcaatacaaacaatgaaacaaaacatacgccaataccattgttttaacacaaattagttggaaagttgagaggggcatgacttcagactttgttactatatatatattatattatattatatttgaaggtagtttcttccaactttgttttttgagaaagtatggtcttcgagtgggaaatattttattgctcagaatccacctagtacctaccttagatttattatagaagacaccaccatcaaaaaagtgaaactaatcaatcaataaattagataataaattcaaatctcatcttcaacttcaattcccatcacaataacttgaatactaataataaataagatatggctatggagaaggagttattctatgcctttgggcctcacaagattagcagcaacgatgtattttacacaacccatctctcctttgccttcgttaatctccgtcctgttcttcctggtataatttacttaattacttaccaaaattatgagcttatattctataatcaaataatccttcaaattctcaagttaaaatcaatttggaaagaaaactctctttcatttctgtgtgatatttatttaagttcttttcttttgcaggtcatatcctttgttttttccctctctaatttgttaatctgtattgtatgtatactcaaattatctaaaacccaaagttgcatgctaaatggttccgactaattaaactggggttaactgctaattaagcttcattaaatatctgaagtaaatagttttcaatttgattaagcttaacatatataatgttaagtacatgtacttgtgtgcccaaaacgtgaagtgaaacgctttgctgatctaactattgatgagactaatgatctatggacaatagctcataaaatctctgctcccctccagacctaccacaaagcatcttccctcacattcacaatacaagtaagattttgttaattgggaaaattatatttcaaaattttttatatgacttgcagtgatcagttttaacatgcttcaaaataacttgttttaaagtttatattattcattcgtgaaataaattgctttaaaatcaattttcaacacctaatattatttagtatgtcacaaaaattagtgtgatatcctaaaatatatatcatcatataaaataatttatattataatttgcgtaattaagaattttacccctgaactttgacattaagtgatgggtaatggttgtttttcaaccatgtgaaaatatggttgtatttttcaaccatgtgaaaaagttacaatagtaatttttgacttgagacatatgcacattttcaactatgcatttaatgcaagattgattttttgtgtcttgttcatacattcaaggaggtctataaatagagctccatccctttcatttgttcatctcattacaaccatcacaagctattccaagagtgaagagtgaggctcttgagaaaatagtgagaatacctcttagtaagagaaatctaagaaagtgagaaaaagagaattcttacaaaattatgagaaatattttgtagagagatgatgagattgccatactagtgagtgtgagagatttgactgtattcctcaagtatttgtcagaacttgagagtataatattgtgtacccattattattgttatagtagaaggtttaccgtggtttttattagccacgagataattcttggcatgtatttagttctttgattattattcgtaaagtactatnnnnnttggaagatatccaaaaattctgaatatgctctgtgattgcagctttgactgatctttca

SEQ ID NO: 43331 - DNA, 2217 bp, Cannabis sativa
atttgaagcacttcttggttttcactgtgttcctcattaaaattattcaacagactttgatacagctgtgactctattgagtacatatatatggacatataaggaaattaaaattcatcaagctgagtaaaatttttaaaattgtattatgaagtattaagtagtgacctgtttgttgactgcattcctccacctgatggttgaggttattgtacatgtctttcagtctactgaccagacttgagagctcccatgttgcaattgttgttgaatctgagtacttgaatatataatcagataattcatccattaattaaagcatttttgttaaaataagaatgattaaagcaagtggaattgaagaacaagagaatgtacttgcacaggtgtcatggctttcaaagctgagacttgaatagaacatgtcaagatacttctgatgatccaataaacagctaagtagatgttatactgagtaatagacttgttctccttatccaactttacttgtgaaagtggcaaggattcatatttgatgacacacttggttaaatctataactgtcttcatcagcaagcttaaggccttaaattggcgagtgaaggcgctcaaatcgcttggcaactgcttaagcattgcaactgataatgccaatgtgtttcttggatatatctgcattaagagccaaaattcaccatagctttttacaaaagttgcaagaactataactgctttagcatcccatctgtaatttccgagcaaatcgaacaagaccatagtcttttcatgtagacttccttcaccagaacacttgcataatatctgtcattgtttcaagaatatttgatcacacaatgtatgtacctaatgagagttgggaagaagaggagagaagagaaggaattacctcatgtgagatcttgttaatgagatgtgaaagagtttctttgaatccaaaagcttcaatgtctgtgattttcccctcatcattgtcaatgaaatctagatcagaaatctgaagaaaagaaagtcctaagattaatagatcaactactctgatcaaagattgtaaactacttagatgcatatttgaaaagaaattgtagaaaaattaataaactagaaggaattagagatggggagattggttaaaattagtagtacttctgatatagtagcataaaacatgatattctccatggcatgaagcagctgatccgagtcaagacggcggtcatctgggtcatggctcaggagtagcttctcaatcagaatatcttccaaagtagaattggaatgaagtgtgaaggagtttgtttcctgcaagttcatggccatggtgatagtaaataagggattaaaggaaatttagtgcatgaataaatgttatgttacaaagggaacaataataatgaaaaaataaacactttgttattgggaagtgatgtgcaggattttcatgtgggagaccacacaaaaggaaagaatgttccttttaaagatagttgagctgcacacgccaattcacattcaaggccttcatatcacttttcctttgtgcttttggttttgtatactaatatagtgagtagtgaaccacattgagtgagcttgattttaatttagtagctactatatatgtttatatttattactgaggttggtcatattagaattcctaaatacttctggaaaccatatgtcaaaagggaaaagagagagctttttggttcatggtagggccggaataaggggaaaagagcttgatttcccatggactaaggggaaacagtacaaaaaaaaatgagcttaaaagcatgaagtaatgctctgggtcaattctctattttagtccaatatctaattctctatttttactatagattttagattttatagttattataatgtaaggtgtatacttttacgatataagactgcttgtatacaattaaaacttggttaattaggatttttgtctcgaatttttacatataccaaatcatgctccctgaacttttaaggtcattaaaagtactctctaaactattgagaatgttagatttaaagacttttgtccaattttagtgaaaaaatagtctaatatggatgaaagttatgaagatatgatctaatacatgttaaagttcgaggggcatgatttggtagatattaaaatctagggagcatagtttagtacataaataatcaatgaaa

SEQ ID NO: 43332 - DNA, 1912 bp, Cannabis sativa
gaaaagcataatcataacataaacataaatcagattataatcagacacccatacacctaattgcaaccctatctcgcgtccaacatgtactaattctggaacgttcatacgacaacacgattaaccataacatcagcctatactcggtactctagtcgtactaatgtgatagcatcaatccgtacttcgccaaacatatatccgtcggtattcagtgtaactctatgtacactaatatcgctcttactgatatgttatctattaggcaatcataaaacatgcacgctaaatatatagctacatatgcaactattatactagtcttactttgattctgaattcagaggtcaacctgagtaaaaattgttacttggcaatttataggcccctaagtcacaatatacgtaaagctgacaagtgatacgctaaatcactttttagggatctaaactcaaaattaaaagtttccctatcgagaaatagtgtgaatgtaaagatcgcttaattttaatatgataaattagcaggtaattagggcttaattatgaaattagatttctaaatatgatttattaatttatgaagatttatttaaattataggtgtgttatttatgctatatatgaaattttatattttgcatgttttatgcctggcaacattggaatgcgaatttttaataggtgcaacaataccgaaaaataagagttcaggaaaaataccccaaaaaatggcaagccgctttccctggtcttgagtgctaagaaacgacctaccttttttaactacaaatttttaaagaacctcatttgacacacaaaactatcctaaatcttttaataagctccagaacatctatttgggacataaccaacataattcaatagaattgtgtatcatctaaccaatgaatccaatgttatcattaaagaccttagtttaagcttaaaagctcaagctttggtctttctcaacaacaagcataaaaaccagcataaatcatcaagaataactcaagtataactcaagaaaataattttaagcaaccccaaaataagcagcaactcaaacttaaaattgcaagtaaaaacctagtatttaaccaatgaaaacaaagggtaaagatcttaccttagcttagctatgaaaactcctagcttcctactaaatttcccttgaatttagtctgaattgaagaaggaatctagggtttcttggtcttggttgtggccgaacaaaaaaagggagaaaaagagacttttctattttttttttttttggctaagtgtgacttaattagctttacttcagcttattaaacataaaaagaaacattaaacttccactaagtcactaaagacaagaaaagtcactgaagacaagaaaagggtaaaagttccttttacccttacttcactaataaataacctacacacttaaggataaaatgatccaaaactataactctgagtaatcccgatatttcaaatatctaattatttgtcctgctatttctaagatactataccatatctaagtgacttttataggctaaacatcgcattccactgttaccggacatataatatgaaaaacataaaattttatatataacataattaatacacttagaattcaaatatatctctgcaattgcaaaaatgataatttaaagcctatttctgacaatatgccctaattatatgcaaattctcaaaataaagctaagaggtcattacatttagctaaacaaaagaaattatcctttccttgtaataataactttgctcctcaaaagtttgatttgatacactgtgatatttgggaaccctatcacattccctcacattcaaatcacatgtattttttactttggttgattattctagatttacttggatatttgctacaa

SEQ ID NO: 43333 - DNA, 2305 bp, Cannabis sativa
tatcaccggtgacaactctcttcctgtggccaataacgacgttagccattaatggtggagaatcttgctctgataccatgtgaaagttcttggccattgctgagaagaaagaaagaaagaaaaagacagagaaaaaaagatgaattgaagaaagactggatttattacaccactgttagagagaacaagtatatatacaagagcaacaactcactaacaaatcaagaagaggagaaggaaaagttagttaaagtaattacaacaataacaactaacacctaaccaacttccataacagaatcgatactcttaacacataaagagctaccacacaataatcttatctattatgccttacaatcttgttcgaccttagaagttcttatatagatttatattttgtattttaatgaaagttgatgtatagatttgaaatgaacacgttacatttggttttggtttatgaataagaaaaaagttgtatcttacgtggagacacagggtgaaaggacgcgtcagaccaaagatttgcaattaaaatgacagcgagagtgtgcactcacacagaacagaaggcccataataattaaatataatttctatgttttacaatttggatcatatcattttcatttacaaaagtttcattcattccattccctttttttctcacttgaaattggattattctaatttctttctttaagttgtttctttcactatttctgaagatgacccaatcattattacatggcccatgattcatgggctttacttaattaattgcccaccccacatccacaccttaactccaaaattatattttctacacaataaacccatccatctgtcaaaataatcatatcttcctctttttcatgtgtaaataagtcaaacatatggtatttgtaattttgtaccacaaagtgagcaatagaacaaaaactattacgttaattttacagactgtaattgtagtaaaaaatccatctaatatttcgaatcaatcaccaaaattgttttcattcttaaagaatctgttagagaaagacaaacgttgaaaaggaaatagctgtacatacaaataattttttattaatttttatttttagtgaagaaatgataggaaattgaattgaaattacattgagggtaataagaagagatagttattctcaaagtcagggcttattcgtccttttccctctttttctcacacacacacaaatatttaaccctctttcctacgcagcggtcacgtgcggtctgaggtatacataccatcgtgcttttcgcttcttccccctgcacgcactcagtccctgcaacactcttctccaacagctaaaaaaaataaataaataaataaaattttgaagaaaaataagaagggtaaaaaatagcaaagatgggtctgggacaagacacaaaagagtttcttttttagattttggaaaccaaaataaataaattaaatggaaataaggcaatttcgatcgaaaaccctcaactttgccaaatgggttattgcagagtgttttgcagttgcagcctttttcacagccgtctttaccattaccattgtcattgagttatttagtatccgttattaccatgcacaatagacgtgcctcgataacttctcataatcccattttttccatttttttttttgctttttcagtcttaagatttatgacatttgacaataataataataactgtctttttagcctaataattgttctgttttaaaaattgcgtcttcttctttaactcgtaataaaaacttctaatgaatccttctgtatgaagagtacatataatacttgtattatttttaacatttatgcacacccctgtttttctgcaggaacccttttctgtgtttaagtttatttatttattatttatttttttttatttttggtttgggtggttctgaggtcgtaattatccttgtcagactctctaattactgcttctgccacaggctttttcgtataccatttcacacctaacatcatttgccgcttctcgtttgtcacttactactattactgctgataccagctcgtgctttgttaccactcccagtactacttctctgtctaggcattactgcgtacccgctactctactgccctttcctcttgctatgtctatttctcttctttttcatttttcacaattgggttttcttctttttcacttttgaaaccccccctttttcttttttaactcatatatacaaacaataaacacaaatggctactccaccaccgcctcggtcttcctccatgcc

SEQ ID NO: 43334 - DNA, 3330 bp, Cannabis sativa
aagaataaaacaatgtggagttcgcttggtacatcgccaatattcagattaatcatatatataattcctattcattaaggtaatttattactatataaacttctctattttctttctataccattattaactgttatttttattacatatatatatatatatataatacatgttattatttgcaaggattaaaataccttattttccaactaaatatcatccttctttgacaataactaaagtgttattatctatgttttgtatttaatttcacattaatttcctcatactttcagggaaaaaaaatgattcaggttgataatataattgcgtttagggcttttgaagattttatgtggtggatctcatgtacttttcttaaagcttggcactcttttccctcttttgaggttttatttaggaattttgactaggcttcgctacatatattataattaatttagtaagtttgtttttgtctaaccaataattatgtaatcctttttggatgtttagtagttttgatcatattaatttgttacccaaattatactctgtattagttctcatataataattgaataatttaggtgcacatacaatggctttaataagattgggtcccgacctagtcgggatgcttcttttgctttatcagaaaaagttgtaagtcctgacaatggtaattttcacccatttttatattttaataattaaatacttttgtttatattttaatgtatatataacaaagactcatattgctaagtcaactgaaattaaagaatataactcagtaataattaatattgaagataaatcctttatattattttattttcttgctgaaatatgttatataatacaaaaaatgacaatgtgtgaaataattaacattgtctgacaaagaaaaagagtactctctgttcagtcattcatcatttcttttcattcaattatataaaaacatcagtgaatattgctgtgaggaattaatgtaaaaccacaaatgttttgatccattgaatcgataaagtgatttattttttgggcttggtggtccggcgctgaagccgtggtcagcgagagggagagagagagggtcgggatgaggcagccatggatggataatatgagtttttgattttttcaggggtatttgtgggatattatgaatgtggtcatatatgaccaatattataagtatgcatttagggaaaaaaattaagattttctaagtatagaaaatcaaatttccaaatcaattttaatagttgtatttgtttgactttgaaacacacctcatttattcattggcatataaattattgaagtaaccttgccccgtctaataaattctcttttcattttcacaagaaatttctatatgtatatgagatttattttttgaagaattttctttgaaagaatcattatttaagaccaataggtatgaaatgtaatcaatactgaattaatcaaagtaattcttccaacgaaaaaaaaagtttctagaactccataactgtactctaagcactattttctcaattaaaatttcaaatctagcttagaaagtatctttgaacatattagtacttaaaaggaagcttaccttttgaatacatttcaaagtttattatataaataatataatttctattactatttttattatattatattattatattccaattttttttaaaaaaaaatacaaactatgaatattcaattatttaatatcataaagtccctcttaaattataataacaagaatatattacttcaaaacaaaattatagtcaacaatcaaggccacaaggcatttttatcaatattcattgtctttgttactaattacttttcctaaagatatgtatgtaaaattttataaatgattggttattcttctaagtttaagctctctcgagtcaaaagatttacaaagtaattctaccacgtggtaccttaaaaaaaacagtaattgttttattaaaaaaacagtaattgtttgagacaattaatgaccatagtattaggatgaattaatattattaaaaaatactattggggtctaaaatctttttcggtcgttattggtataattaagtattcagtctcatataacttaaaaaaaataaattttataaaatatcgctaatcaatcaagaagcaccgcgtattaaaaggtgttgggcaccattaatactcaataagaatgttttgttaattgatgatgattttctcaacgttgaagactgttatttttttattctttgtttggcaaatatcagtcataattaacatctctctctccataatttcattatgaataattaatttctctctccataatctcattatgattatgaggatgatcatttgaagaaatactcaattttcattacttttacaggaaaaaatatactaattattttaataaaaataataaagaatcgctaactaattattagatgttattttatagtggtactagatatcttggtagtcatagcaatgcccaatattattggaagagaaataacaccttatgatgtcaaacgccataagaagtaacattttgctattagtgtaaattaatattagatcccacaaaattaatatcaataatattttatatataatcatactaaaaaattattactattagaatttgaatatttatttataaatactcaaatttttatatctcaccctataaataaattaatatataatattttttttttcatattctaatagtttaattaattataaaattataatattcaatattatatttaaattttattatttttctaacttatttataattgataaatttatattttattattattatttttaataaattataatatcgttttaatatatattatgtcgtatatttcgggcttaccgtgtatcgtattttttagaataatctattcgtatttacataaaatcatttttaatacttttacttaaacgttatcctataatatattgtgataatttatagggataataattttgtggatggtgatgaagaaaaaggtgttattggaccccacccactagtagtgactatgaccatgacttatatatataattttttaaatttaatcttttaattgttacactttaacacttaaattttttattttcgtgtaataatgaaaaaaattattattttttagtatataatatcaatttgattagtgatttttaatcttaataaaaaattacttgttactaaaatatattatttagattagttttagtcatgataaatattgtgactaaagaaatatttaatcacaaaaa

SEQ ID NO: 43335 - DNA, 7359 bp, Cannabis sativa
  modified_base (6892)..(6894): a, c, t, g, unknown or other
  modified_base (7311)..(7329): a, c, t, g, unknown or other
tgcacatttttcagaatcataatagtaacaggtaaacaaattactgtaaaagttaggcttcaaaataaaattccagtaaaatgaaaagttttagagtccatccaatacgaaccaggcttattggaaaagaaaactgaatgattgccgctggcatgattctcagattcatcaaaactaccggaggagaaaccattaccaaagccaagcttatcgaagtgtgtatctctgttgtcagaaaagtcgcgactaaaagcatggttagttacctgcccaaggaaactatgtgatggctgtacatcaaaaacaggatttatagattcctcttgtcttgcgaaagagaatctggattgattgtgtgttggtgccttccaagaactcgataatctgtgagatccagactgtttatcatcatctcccaataatttagccaaattctgaggtgatgctaatgattcgtcccaagtatcaaagtccagtgataatatatttgaaattatgctactctcccctctatctacagcacaattaacatcagtattagcagcatcaccaaggaatcttccaatgtgcttcccattatcctcattcgaatgcaaaaaggaatgttctgatatgttctcagatccaatgtagctatttggtaagttattagggtacccattagatgttaatgaagttgtagatgcagatagaaatgcactatctctaagtttgttatccacaaatagacgatctgtatttgaattagctgcagcataggcctcatgttgaaaaggagagcaagcatgatttgatgtatggaatgaattggtagaatttggtaaataatttgaacgactcacaacttccggatccttaagtcgttgattatcaaaagatattatgtcctcttctaactcagaaggtgtactcggcattgcttgtgtttgtgaaactgctaaccagtcaggttgatctctaacataaacctcattatctgtagttcccgctttttgagagaatgtagaagtttctctaaactgctcactgtaatacggtgacaacccttgattcacagaagatttaattagggagtgatccaaaaatgaactactagatgttttaccagaatcttcatctatgacatttgcatcaatgcacaatgaagaaatttcagagcataaattctggacctggccttccgaggtgagatgttcactttcattaccagaagtagaggactgcccatcctggtcaatggtatttgaattattagcaagcatatcaatgcctctatcattatctcttgataccggtgaagaagagaactgattgctcatgttttcagaagaagaatcatcaggtttttcaagcacattgctctgataatccaaactattatgctgtttcatgggcttcaatgtttctgtttcagcgatattgtcagacggttgtctcttccctccatcaacatgcattacagaagtctgagtaccacctgcaaccgctgatgaaaatggcagtttattacttactgtgtcaagtttctgtttggaaggtccatttgtacatgttaaatttccagctagtggttggcaatttgaaccacgcattcccctgcaatgtttagataaataataagatcttctaatcataaattaaagcatagcaaaccaccaagaaatcacataccatgcagctgcagctggaagcgcaatagatttaccagagcttccgtttggaggagaccctttaccagtgtttacagtattctgtataaatgaaaacaaaaatcaggaaacaacattaacattgtacatcaacagcattaaggtaacatcaaccctcaaacaagagcttccaatctccttcattaacacatctaatttaaatccatgaaaaagccatggttcaaaaactggcacaagaactgcacaggcacaagtcttcagcagttggctagagccaatcacatatagcacgcttcacttatctagatatcaggtcctactatagccacacatctaataaaataccctaaacatgcagtctaaattgctctctttatgcaagattacaatagcaacttgcacaagtgaattaaatacatttcacaccaacagagaatagttaaaaggaaagacaacaccagtgacttacacttggagcatttttcactataggttttgcagtagaagcagaactgttgtcacaataatcatccataggcggtggtaaaacactccctgagcgccgttgcacattgtttgaagcaccagtgatttgttggaccctactcctttaaaatcagcaagttaaccaagtataaagcaaaaagatcatatatacaacttacattagcaaaacgaaagaatttattgactcgcaaaagactcttgtacaactgaacttatatttaatgaatctaaactctcaatacgaacacagatttattaaatcttacataactacatggatggatttttaaaagaaaatgaaaactcgaaatctatatgcagtaaaagattttatccaagattaatgctcgtcaacagttcaataacaattagtttttagatatgacattaggacaggaaccacatattagcccttcaaaaatgatcttttatgcttagcacatttcccaccaactattaaaatcataatccattccacatgataagcattacaatagcaccataagatcaggtttaaagattgctaacatggactataggagttgttaaactcatattgatcctccaggctaattaatagcacattttccaccaactataaaaactgataaacatctcaaagcacttcaagttcatgtttatagattgctaacttgggttgtaactgttgaccaaaagtgaatatccatcctataaatgaaagaaaaaatacactacaggggtcattcagaagtatgagaactgcatatccatcctaaaatgtcacttcagagtataccctgctcccaagcaaatggtattatagaagcactgaggacacaaactatctggcgagcaatatggttccaaatataccttgtgtacgctgaaattatttcatcttttgtgaaactatcctcttgagaaccaacctcgtgcaaatacaaacaatcaggattggtgcatggctgaaaataacaaaaagtcaatcaaacatcatcaacagagaaaataattaagcaatattgtatttaagaaaataaaaagtcataccacatttctcaaccaagcatggcagtactttgtggttccaaagcaagccctaaagcataatattaaacagaaatatatcaatacatacattctgatataatgtcattgttatactctttttctgctgctgatgacaatacagcaaaaatgtacctcaaagatctaccctccaggacataaccatgtacattttgaatacaacgaatggcttcatcttcttttgagtaagtaatatatctgaccacaaaaaatacggttagaaggctattgaacatgataacttacaaccaattcttcatgagcctcaccactaagcaaatgaacagctcaaaatacaaaattggtaaagatattcaaaagtaggtgaaaccatgaaagtcaaggtatgaccttacataaacgtagcactaaaatgagaagcaaaaatgaagctcaacatatacgtacttgaaaaaaattacacatactgtaatgtataacttacacactacacgtattgttttgatattgttgaatgaccccagcagccgtccgagacattgatactttgagaaccttcccatattgaccaaaatattctctacgctgaagaagctgcaagcatcggcataaagatcaaaaatgttaaggaaattgcacggaaagacgagagtaatacactaaacagattagagggaatacttcttcatctgccagattaagtggcaagccaactatgtaaacaaggttcctttgaatcactcgtacactgctgagctgcttccgcccttcagatgatttagcctttgccttctgtgacttcatctttctctccatatggacttcagacaccaatctgctgataaaattatataggacagggaaaaaaataacaaacagacaaacacactcaaatcaaaatcagtacgaagaaatagtttctttcccattgtgacaaatcgtgttcactaaataaatacctttcacattttgaagccatccctactatcttttccttgtcataaggaacacgacatgcagggcaacgcccctcagactcatccttttcagccatgtccattatgtgatgccaacaccaaacacatatctgcaatacagtaaaaaaaattagaactgcactcgggctgagaaacgaggtaaacctaaggaccaatttggggaaaaggagattcttgcagagttaaattcagagttcagctgtggctttagcccagattgttcaatcatacgttggtttttgttttctttggtttcacagtctcaccaaacacctactggccaacaaattgcttgaaaagaaagtgctttgtctcgttaaaaaagcttaagctaaataatctggctctgtgtgtctaacagagattcaactttctcttgcagaaaagcaaattgacatatatctcaagcttcaatatttaatggaaccacgcaagcagttgattatatagaggaagaggatatctggcacatcgaaggagaattaaccagactccatcttcgatttaaaacaggaggtgacaaacagctcaaacaaatttccacaaatccaccaatgaacatatgaatttgaacaaatggaattaaaaattgctcatatagaagagggcaaaccaaattataagatgagaaacacacctcatagccacatttgcaaggcttcaactgttgatccgtcaaatccatctcctcagcacaaagaggacaagtcctttctccttcgtcgctcatgattgcctaaagtcagcagcaatgtagatccacaaaaacgttaaaatataatgaggtgtacaatgtcttcgtctaaccatagaaaaaaaaataaagaaaatttagtagtccaaagcgaccagaatgcgtcgaagtttcaaagatgcaactaaaggtaaacggctaatgctcaatgcccacttttttttcctcattcttcttaaactaacttacagtagagaagatgcgatgccaaaagacaagagtacatgtcattcaaacatgcaattaagtattaaatgtagctaagcactgcacaattactgcatatacaaaaacactaaaataaaaatccaaaatctcaaaaccctacaaaaatcccaatcaaaatgaaatgctaatatttagaaatgaaatgctaatacgaagaaatgaaaccctaaaatccaaaatcattaacaaacactattccatagcaaaaccaaagcaaaatacagaaatcgttaatccaaaaaatccatcatcaacaccaaaatcaaaaaataaccaatcgaatacaaaattgacaaaaataatcacataattaaataaaaaaataaaatcgtcaacatgcaaaaaaaaaaaaactaaaatcgagataaatctagagatacaacaacaaaacaaaattcaaaaattgcaaaacatcaatcaacaaaaaaacatttccgaaaaaatttatttttttcccaaagagaaatatagattggggatctgaaaaaccaaaaaagtaatcgatccaaaaaaaaaacaaaaaacaaattagggtttgagattaaacaaatcatgaatctacttacagttaggtgtgtggatcgagaaaaaaagaaagaggattaagatgaagccgaagtcgaagacgaatctccttcagaggatgagattgtgtgagaagcgcacgataaaaaaagggcacagaagagagagagaaccacaataagaggtgagagaaggagagagatgagagagaagtctcttgtttggatgagctcttttggctgctgctggtttttactcctgcgtcgctgtcaattaaatattatctctttttctctttatgcccttatattttcatttatttaccaatttaccctttctgccttctcttctttcagctctgtctcttcctttgtttgtcgagactgtgagctaagcttaaataaatccataatattgtattaattaataataaattatttttattacactttttattttcattttaattaatttttttttttttttgggattttaaggtggttttgttaggtgagtgacatatatttgattttttctatcaaaaaaaagatttttttttttttacgtgaaagacatatttgattggtcctagaatcatgttagattttgggtaatcctaatggaataatcttgattttcaacatattatgtaattactaattaccattatttatataaataaaattactattttacccttattttatactcttacttataattaatcttatattataattgtaatagaataatcaccatttactttaattttgaatgtattatcactaattaccattatttaataaataaaattattattttgtccatattttatacttacttattgttgatcttagatcatattagattgaacataatcctaatagaatcactatttagtttgattttcaacatattacctatgtaatcactaattactattatttatataatttaaaatatggatatttttatcaatacaccactcattttcactatcattcaaaaaaataaggtagaattctatttgcacccataaaatgataaaaaaatacactttattattaaaaaaaaatataaacttaaataatttttaagtactcaaaaaaaaattaaattttttttccttacattatttaatattaatttcaacacttattttaattttattttcatannnttttctaactcatgtatatatttttttaatttttttaagaaaatttcatataattttttatttttaatttttttttataatatttaaaatataattttttttatttgatatgtatattttttaagaatgtaaattgagaaaaaaaaaagttaaaaaacttaatataattacatatataaattttacataaaataaaaattattaaaataggatgtctttaaaattttttggtataaataaaatttttcaaaaataaatcaaacatcatataatattcttctctttaccattattattactataactattccatttaaccaaatgtcattttatatagttgagatccaaataaaaaaaaaaagagctacgttgtaagaaatgttttttactacaatttttttttggctaattagtaannnnnnnnnnnnnnnnnnnacatgtaccaaatcatgccctttgaatttt

SEQ ID NO: 43336 - DNA, 3030 bp, Cannabis sativa
ttagttaaattttcatttggatcatgctccaacttctaaacagtgaataaattacagggttacatgttgcgctgacgatgtttactggctatatggctggttattttgcattcagagcattattcaaccacagtcctgcaatggtatttccagaaatacctacattaagtttgttttttctgatatttattaattgtttcatggataccctttttcttttatttgtcgaaataaatgttcccttatgcagtatgttttttttgtctccagaatgctgctggcggagttctcggatttataatcggcatgctagttgaaacatttctttttataattagaacatctaaccaagaagttagatcttctcagaagaagaaagatcaatagtctacgcctttaaagggttggtcatttcttctattctattatgttacacctacaactcaacctgcaaaaatctcttgctaatgacattaaaatacttcctttgtcacattatttcattattcagtgtaccttatatagttatactttgtatcaattttgaattttggcaatactcaagaatgagagggaaaaaaccagaaaagtaagtgtagaaaatattgttttactttattagtttaatattcttatttaattcggtatccacatatattgggaaaccaatttgtatatatccatacttagttattttaggctgatttgattgtaattaggtgactttattttatttgtaattactttaaaatattaggccttaaatactaattattcctgtaggttgtacaatgcctatttacatggcataactctcaaatcataaatcgtgaggagttatttttcacatggtatcagagcctaaaagcttaaccttaaaactactgctgctctatctttttgtctagtttttttctacttctttcttccataatggccactgtaaccaacccaaacactcaaaactacctctaatgtctcttccacatcatttgatcaacaaaaatctctccaaattactttacacaagcttaatggtcagaactttctgtagtagtctcaatccatgaagaagtaccttagaggacgaggatgaggacgattggggtatttcactagttttgttcctactccttagattgatgatccctcttatgctaagtggaagtttgaaaactctctcatcatagcctggtttatcaactcaatggaagtgtacattggtagacttatttattcttttctactactagagaagtgtgggaatctgctcaggaggccttctcggtaggggtgtttataaaaatcaaaaaaccgaaattgactatcaaaccaaccagaccataactgaattttcaattccacatcatcaccaaatttagtggtcggttttttttttatatggccgtctgggcccaggttcggggtcaggggttggatctagggccaggctccgtgttcaagtttggggttggggccaggctcaaggttttggtctgggggctgggtttagagttttggtccgaggtttagggatggggccaggatcgagtccggggtccgagtctgtgtttgggtcttggaccctttttaaatatcataatacaaggtaatacaaatcatttgttatgtatttaataatacgattcgtattatattaaatttttttgtcgtagtaattaatacattacaaatttttatccaaaccaaacatagtgttcgttgttatctaatacaatacgatttttatacgacttaccaaacgagccctaaatgtgatttttgggttactcctctacgaagaagggctacgaatgctaccatccttctattcgtcgcgtgtacatctcaatagatgttacattccatgaagatcaatcctattattccaacctttttattcaggagggacagtgagtgatgtctcaagttaggatagccttttaaaggatccctaaaatttcaaagtttctaaatccatctgaatctcagccacctaagactaaggaactcttagtctattgtcggcaaccaaaaaatactcaagtagtacagtccactaatgctccagcatctcataaatctgatccatagaccactcctgatgtaagtaactcttctcatgatcttatttactctaattttcctgataacacttttcatgatgattcttctcataagattgaacctgaatccaagttacctattcctgagagaaagggtgttcggagctgtactaaacaacctatctccagatatgtctgctatagtaaactctctcctcattataaagctttcgaattaaaagttgagcaagtgatagtccccagggatattattgaggcactgtcacagaaagaatggaagcaagtagtctaggaggagaatggggcactcgaagctaacactacatgttgttagcgataaacatgtggtggggtgttagtggatgtttacaactaaacacaaggttgatgaaacaatagatctatataaagtgagattagttgcaaaaggcttcacttaaacttatagtgtggattacaacaagacttttgctcctgttgcaaagttaaacattgttcgagttctactatccattgctgccaatctggattggctcttacaatagctagatatcaagaatgcattctttttgtgacagtcaattgtctcatgatccgtaaggagaaatgctaggtaagctgtgcaatccgcatcgctcagggaaggtcaagtgtgatgattctgagaatgtgtaggcataggactacacagttgaagagggcataaatagattgaagggtattacttatatcaacaaggtgtatcttgtttttggtagcccatcacttgagaactccaaattcaatcgtgcttgacttggagaaatctttggatggatgacctccttgaaaattttcccattaagcgtgcgattgaggacaaagcatgctgaaaatactcgtattgtttgcagggtcggtcgttagtctaagaagcaactagagtaacgtacctgtgtatatg

SEQ ID NO: 43337 - DNA, 2902 bp, Cannabis sativa
ttcataaaactgagcataacataaaccccaacatcataacacttgtttgtttcttagatttcattttctatagttcatcctttttttctgtccaatcaccatctgttctactatgaagaatagcaagaatggggcctactctaacatactcctgagatggcaaaatccaccaatctgttgacaagactttattaaaggtggtgtgactatagaaaagaaatatatattttatgggcttgaatgagagctgagaaaatgacagagatagatagaactaagagacatatagaaacctctgaaccaacattgttttaaccgtgaactacaaaaactacacattccttgcagattccagagttctgtaagaaaacgtgttgtctttttggattgcaatctgtttgagttgctacaaaacaaattattaggcctgttcatggctgcttactggtgttgtaggatatccacattaaaccaagttaagagcagcagccaagacttcgaacatatattgagaaaattaaatagaatgataaagatgagaatacatagcatatgaaggaagttcatgtataaaagaaaagcgttatccaaaagaaaaaaaaaaggcaacaatgggctcaaacttacatcgctagcgtttacaccagcatagatgattttcacaagaacatggtgtggctcaatgggtaatctcaatggtgagcgcacaatgccggtagcacttcggaagttatgagttaaagtgtgaacaactctgcaaaacaaaaaatgaacataagcataatcacttctacatactaatgaagagaccatttgcatttcaaaaactttacaattgacatgaattaacagctaataagaaagtccatctgaagtactgttaatgcttgcatctaaaatctacataaattcaatattataagtgactctttatgcacacattgatgaacatttttttacatctttcttaggaaaaaataaaaaaaaaagtacatatttataaacaaagatgggcaggatctttaaaaaaacacaggacagaagctggcctaagaattccaatgtagaaggggataagccaatttaataaaactacctagcaaaataccaatgcctttactaactaatatcacacgagtactttgtagatcttcaagtgaaatggaaagaagactacaagtaaagccccaaagatatctcatgtctagataaaggaaaacatttcaactttcaaatacaaaagtaatgacaaataaagtcttatgcatatcaataaaatattaaaaatgaaaagtcatgcgaaataatcagtgattccatagacaattttcattctgattcacaatgataactttctctgcatatctggtcaaaattcactatatccagtcatgtgatgagaacatagaaattgtcaaataattttaccttctcattcttactacaaaaacaaacaggaagccaagtatgctagacatagtgtaacttacattttctcaaaactatttggaagttgaaactttagaggagctttcaatgcagttctttttctcgatatggaagaggggactatatattttgccttttccattggtgttggccaatactctatgcctctgcggtttgttatccataggcaggcaccagctttactctcatcagtaataagctcaaatgcacctacaaaaggaaacaataactgggtatgagaagatagatcttaaaaatgctatgagactcacttattccacatttcaaggaattttttcaattaaactattcatgaaatcaattacagcattatgattatacaagcatctctatcaaatgctacaaagttttagacaagggtcataagacatacctttcaccaccatttccataggcacaaagcctcccataatgtcaacaaatttaggatctattttcaatcccatatcggtttcaacaaactgcattacaaaattgtcaataatagtaaactgagaaatcattttcaatagagattatctctctaatctaacttaaattagagtcttacctcaggacacaaaacattgacgcgaatgccttgacgttttaagggaacaagtgatcttgtaaacataacaatgccacctaaatagaaaaacaaaaaaatcaaaggttagcaatgttttaagaaaaaaatctgaataagaaaagaaacaaactagtggcataagcaacaaacttttagaggcagagtaagcagggtcaaaatacatcggatagaggccggcagatgatcccaaattgatgatcacaccaggtttctttgcaccttgcataactttaacctgttcagaaactgtaactgattagtgaaacacatcaaaacataacaccctcttctttgacagtgttagacccaagtttgctactaattattaaaaacacttgaccctcttactaataacattaaacactatagcagagaggtcaattcaatatataatttcaagctgtatctgactaaacccaagtggaaaaaatggaatcataccgcgagacggatgcaatcaatggcagcaacaagattgacatctacaacttttctccatgtagaattaccatcagattgatccttatggaatggaatttgagtaccaataccagcactggtaatacatatatctaaaccaccatatgtctccacatgtttatcaaatgcagcacttaaattccctgctccaacccaaatatcaaaaattcaaaatttaataataaaatcaaaagcataaatcatctacacaattacaaacaaattcctccttgtttttttttctacttactagaatgagttacatcacagttgacggaaatagaagacgggaaatttaaatttgaatgaaatttagaatttagcgtctgaacaagattc

SEQ ID NO: 43338 - DNA, 4021 bp, Cannabis sativa
  modified_base (3827)..(3827): a, c, t, g, unknown or other
ggctgggcgagccgtgcccaatccaaacaacccacttgggattattaaaccataatagtgaaaacaatagctcagcgttgtaaatttttttccccttccctccttttttttcacaattatatattgtttttttacaagtctataattatattgtcgtttgaaatttacttttgcagagaaagaaatattctaatttggtaggccgcgctgcacccctagtcatggagctatcattttaattttaatttaagaagaaaatataatttttttagagtcaatatatgatgtcgctgtccaatttatcatctaattcattcatacgcaacaaattggacccaggatattattaaatcatggttaaatttccaaaccaactgaacatatatatacatataaataagttctagctaggaagaaaattaaagaaaaactagaccttctcctctttcctttaagaagtagtttcagtcagtttgtagtgttagtagtagtcaacggataagatttgtggtgtgtgttatgttcattgttttatattattatataattttcttattttttaaataaaataaataaaaataaaaataaaaatagtggtggttatattaagaagaaggaacacataggagggggatgtgtccttcaagtagttgatgttttactatttatggaattaattcaaagggctataacataggaaacatcttcaaatctctttaatttttggttacagacggctacgcactaccaaacacttataattttgaagcattacgtgtttcttttgggtggcataattgatccttgcttttcatgacctattaaaatatgtttatgtatacttcactgaccatcgtgctcttaattattaaactaattaattctattttctatattaaaaagaagaccagatatgacatttatgaattttttaatgctttgtttattaaaaattcataaaagtacttaaaggttcacgattgctatgttacgttctagcttttgtgattgtgacccaataatgcggagatgggcgtagttaacaaatatggtctattgtagctatttttaggttctaccaccaatattatatcacataaaaataatagaaaaaaggaaataatattaataattaacatagagagaaggaagagtgcagagttggatcacatgaccatgagagtgctctatacatcaatcctgtaactgatctggctgtcatttcctcctgtcttgaaaggagccttaacctgactcactatcagatcagcagagcagccagttttctctgtaaaatttcagcctcaaaataatttctaaaatgtactgtcatccctaaaaaagatacaattaaactcatgttcttctttaaattttaaaataaataaataaatgtttctttttcttaaaaagaaataaaattaataataatgaagaggaaacggaagagtgggccatcagacaaaacgtcgagggttttgtttcttatccatttttcacgtgatcccgttacggagctgtgggctgggtggtatgggcaagttggagagggcgtggtggcccacatttgaaattacatataaataagtagggaccacatcaacctaagttacgctatgactagagagagcagcagtatattcacgtgtcagttttctcccacgtgtcgactgtatctatctcatcttcctctccttttttttctatctctgccttcttttctgggtcaattttcgtatgagtgagacttaaagagctacgtaaaatcacctatccacctaatgggtcccacttctgactaggaaagatgtggacccttgatgcttacgtatgatcgtaaaatcattgcaaacctctctatcaattttcttttaccaagtcataatctcacttcttcacttttctttttcttaatcttttacaatgttgagttttaaagaataaaaaataagcaacatcttatttgatttggtctatttttactcgtacataatgagagattttgttttgaaaaggtaagaagagaggtgaatatatatttacactatccaatattttataataacggatattactgaattaaaatttgtaggacataacattaaaattaaattaaatgaatataacaaatacaataaagcaagtcaataggatttaatagtttgtttcgaaatgttgtaatacacttgaaaaaaatgaaaagacatgagttgaaaataaataaatgatgaaagcaacatataaaggaaggagggcagagaagtaccgatctataatgggactcatttaatcaaaaccgttaatttttaacttctcaatatgttcaagggtcaattggtagttgaagtttgactcattgtccagttgacccgggcagcttttccaatatttcgggttagacacggtgtagccgcacagaccagagtttactctctcccttcccttcctttgataaataagaacctttcattcaattatttttttatttttgaagaatttcattccattattattatttttttttttttttgaaaggattcaattattttgttgtagtatatattttttgttaaaaaaaaaaaatataagtgctacacttttaaatattacacaaggcatgtacaaagttggaattagaacaaccttcctagttcctacttctacttcgaagtttccacacatcaaatcagcttcgggactatgcatagtaactaaacactctcttactcacacactatatgtctatatcaaagagcaaccaagatttcaaattacaaaaaaatgattcaattaggaagtttcctaatacaaaattgtcttcccaatatttattaattttcaaaacgaaaaaaactttcaagttcatcaatgcacaatgaaacattttcaaattagtgatgtaaaatcaatatttgtacttatcgagctggcgcttatattgttttgtgctttttaaaatatatataagtgactttgccatacaaaaatattaattatatcataagtggtttgacacgacttgtagggttaatattttcatgtagtgctttatttgagtagccaatttcgttatactaactcaaattcttgttgtacttttaataattttgtaaaaaaattgtgagataattactataccatatatataatttttaataatttcaattaattttatataattttacatcaatatattataaataattatataaagaattattagaataattataatttgacgatttattaataatgctatgagttttgggtcacactttacaaataaattaaaataagattttagtctattcgtagttacgtattgtacttgggcttatcgcatcgtgcctttcgggtttatcgtgtcatatcatgattaatctcatattttttcatgtcatgtcgtattaattcgtaatatcgtgttttatcgtgttcaattccatatcctttcgtactagcttgtgcttcttagactcatgctgacttgtcgtgttaaaaagttcagtctatatttacaaaattgatgtaactactaaatcttgtaatagcagaataattatttgtatgatacaattattattattatcccaattttttttcctaacgaggtgacgtacaataaattgacatgtggcaaatataatcagcaataagcagatggatgattaataaatagactattcagacagaacttttttgaaaatatatgaataatgctcgaatatactataatccctttcgtgcagctggaaagatgtaacgttcttgcttcaagtctccattagaaccttacacccatataatgatggctcttatacacgagnacgtcactctggctgcttcctgaaatgacgaccctacaaaccaacaagagtgtttccagcgtgctttgtcctcgctcgcacagtttttggaaaaactttctaggaagtcacccatcctgaaataatccccagtcaagcacgcttaactgtggagttcttttgtgatgggttaccaaacaacaagatgcaccttg

SEQ ID NO: 43339 - DNA, 2326 bp, Cannabis sativa
  modified_base (101)..(116): a, c, t, g, unknown or other
aaatcaaataaataaataaatgataacatgaaccaaatgacacaataagtgataaaaatacttctgtttctttattgatatttaaatgatagagattacannnnnnnnnnnnnnnntttagggcataaaacccaaaagaatatgccttctttctccgactttccagcgaagaccagccaacaataattcctgtccccataaaattccttgccaagtcattgatggagagtgatcgggttgagcgtccaatttttttttttttgtgagaagtatcgactcttaaacaacctacttagaagagactctggagtttgaaaaatcctccaagcttgctttgctagtaaggattgattaaaatgaacagaagaacaaaaccccattccgccttcggctttagttttacagagtaggttctaattccgtcaatggatttttgaacctttagcattagagccccattaaaaattagccatcaaggattcaagttgtttacaaaaagttagtggtaaatggaaacaactcgttgcgtaggtaggaatggaatgcaccacaacttttagtagtacttctttgccaccagctgaaaaaattcttctcattccacttgtgcatcaatctccaaatcttctccttaacattactgaaaagctctttttcctccctctctgtataagcaggcaaacccaagtactgttcatgacattcactaattggcattgaaagttatttatagaaaaagacttgagccgctaaggtggtgttgggggaaaaagacatgactgacttttccaggttaatcacttgactagaagcatgatggtatgtatccaaaaccctcttaatagcaaggcatgagttttcatttgctcggcaaaaaaatagactgtcgtcagtaaagaacagatgcgagacagtgggggctcgatgtgtgagtgaaaagctattaagattgcccaagttctcttcatattggagtagtcttgaaaaaccttctgagcaaattaagaaaaggtaaagcgacagaggacacccttaacgaagacctctagttggctatagagagcctgttaactccccattcaattagaatgtgaaactgtatgtagttagaaagttcataataagagttgtccatccatttgcaaaccccattttcctcattacttcttcaataaagcgctattcaacacgatcaaatgctttgctcatgtctaatttcatggctataactcaattaatcttgtgttttattgcattgaccaactcaaatactaccaaaatattgtcttgtataagtcgatttgaaaggaaggcactttgggttttatatatttttgaaatgacattgcacaagctgatggggagaaaatcactcacatgcttcaattttttaatttttgggacaagagtaattatggtcttgttaagatcttttaggtttgcactatcattgagcacactcaaaaccactagagtgaccaaatcatcaacaatgggctagtttcgttgatagaatctcccagacatatcatcaattctaggactcttgtcatggctcatggaccgtagagcaatctcaacttcaatcactgtgaaaggctgtaataacttctcattcatatcagtagtgattgtaattggaatggaatttaaagagtgttgaaaagctgcatcgtcaatggtagtagtattgtagatgtttttaaaataagattgaatgacagcagccatatcagtttttgaagagaccacctcctttatctcagtatgaagagttttaatcttgttggcttttctagttgaagctttagcatgaaaaaactttgtattaagtttcttttaattagaggcaaaggtgtgagcctcgtgttaagaagatctcatttattaattggattaattaaggaagaagaagaagaaaacattttgttttttcttatccttcctttctccccatccttttccctaaacccttcacattgtcccatgtggaccaaacccaactcaccacacatcacaagtttaaaaaaacattttattaaactaaatataaaaaggaaaatggggaataagcaaacttcttatttactcaaatatagctttgccattgtcaaaaattaaaggttatagctttgtcttacttgagttaattactccttttcctttattaaaaaaagatattgataaatgagatggagtataataattttattatgttcttttgtcatatacttcatttagcatttttttttttttctcttctatctttttcatcgctaatatataattttttttttctaacaaaattgaccttcaaacatgaaat

SEQ ID NO: 43340 - DNA, 9608 bp, Cannabis sativa
tttgtttatcatgaagttcttcttaaaattagttttcaagagttaacaatgtagcatacgctcacaatgtctgaatgtacatgacatgcttttataattaatcctagatttttttgtccttatccggaaaatgatgagtttgttatgttaataaatttattaaagttggtttatttaaattgacaattgaagcttaatcctgtgatggaatatttcagctatggacatagaaggtgatgaaaacaaaagcattataaatgtagaggcaattgataatggaagtgaaagtattattagtatattcgaaatttcttcagattcagttgccgagacccaatcacaaccattgcttgagatatccgatgacaatacaagcactagtcaccctgcagatcatactgataaattagattttacaatagatgttagtggaagtagtaataagaaattattagaggagcatgatgatgggagtgataagattgagtacttaacaccacacataatgtcttcatcaacaccatcattgtcattgtcctcttcctcttccacgtcatcatcttcatcagacttgccaattgatctttcacaagtagacacaaatgaagaagaggctgcaggtattgaaatatcaataatagaagatgatgatgatgatgatgatgaagtgagcatttccagtgaaggtggtggttcttccaaatctgagagacaagggatgagccctctaattctggaattgatgacacctcaagctaattcatcttctgatgatgttatgattcacgaatcgaatgttcatggcatgtcatctccaaaaatacagacgatggaaaggtttggtggtggttatgatcctaagaggattccatcttctgtgtttgaaataagtaaaaccacaacgccaatggaatggagtgcggcatccaatgagtccttgtttagcattcacgtagggaattctagtttctcaagagataatttgtttgcttataacgatagtgttgcaaagtcaggggaacttaccaaatcaggtgatgaattagtaatgttcagtccttgtactgtttcggttccaactgtgggacttaatagaaaaagttttgaagtggagaatgagtttgcaggatcagctgctgttcagaatgatggtggcggtgggatgaaagacaaaaccaccaaggacacaataaagccgcctcccccaacgacaactgcagatgatactcctagcacgacaaataaggcaccaacggctcccttatcctccaattcctctagccattctcaccagtctgatgggagtgcagcaagtgtacgctctttcgcttttccagtgtatgtcttctacattccatctttctttatgttcacattggttcccaacacccattagtaacatgtgagaccacatactttattaattgggcctatgataatactttatcaactagatatgcaataaaaaatcttgaactcctttttcaactactgtgttaccttgatattttcaaaatgtgttttagatataggattatgttgtcatgaaagaatggaatttgtccacataaatccatgaatgaatgtgtagacagatacattgtatatataattcatgctaagagaatgaaacatctctatgcatgtgttttagagacaaatagacagatagataggttgataaaaggtagagaggttccctaaaatccaaaactgtagagctataaggaatatacgatttgtgtgttgcagaaagaaaaacaagaagtgtgcatggagatcgtgctacttttccaattgtagttgggcgttctgctactttagatggtcaaggtgccaatgttcatggcaaagctgctactgttcaaattgtagctgggcgttctgctatggttggaactgtagcaaaataagaatgtgttgtcattcttcttccatgtacgcttctttctctgccatgtaattcttttttcttcttctctttctaagatagaaaatcctcattccatgtccaattctttattgtctgagaagaacatcatttctttattacttgagactgtttgtgcagtgcttctttttaaatgtgctgtgaaaatgataaggatgacaacaatgagtttttacatggtaaattttgtgttcatgcagtttgccagggagcatgaaaagcgaatcggcaaggctagagaatgagcagctgcatccagattcattgggtggtggcctaaacacatcaaattcagctctcaaacgttggtgtccttgtttctcttggtgctcatgtaggccagcttggtgttgttcttggcctacttattgctgtagtacttgttgtggatcatagaagaagaagaaggatgaactttggaaaatcatcatcatttatgtccacaaccatagccattgcacacataattgaaaaaaaaaatgaggaagaaaggtttagattatactttttcatcaccacttgttacaatttcatttcacaagtgaaaattgtctccacagtgcaaatagactttattttaacccttatattttctagggagttcatggcagaaagaactaatttttttttttttagtgaaggataatcttgtaactttacttcttatttttagtaaaaaagagaaagaaaaaacttaatgggctgtacatatgcatttctttaggggcccttttaacaacgatacatgtaatataaatattaataaaaaaaatattatttaaaatttttactttaaactattgcaactattaaattgcatctccaaaatttttggctaattaaaagttctaactattcatgatgctcaaatatacgattttgttaagttttcttttttgaaattagaatatgtattggctcaaaaacaatttgtttacatcctaatagcacctaaaaaggatctaaaataatcatctatacatataaatctcaactcttgcttcctttctaatcatttacattattcacaaactaaaaaaccatgtctatcttcatcttatattctctttggccaaaaaaactcaatgctatgtgttacacctgatttgaactctttaacaattttgataggatcttgcttctcattcttccgtagacatttatttctcatcatccatagacatagattttgttaagttttattccatgcagctcttattgccatattactaccacaagtttaaagtataattttatttttttatcaactattaataaataaaataaattaatattaaatttcttattaattattgataagaaaatatattgcacttatgtgacagtgcaatatcaattacgtgagcactttgttaaacatatgagataaaacttaacaaaagttgaatatttcatcatcgttattgctcatgagaatacaagaaaactgactaaggcaagtgctttatatttttagagagagatgctctagccttataaatgtggaaaatgaattagtgaagcgcttcttttatatggaatgaagtcctattaaataataaaatattaaaaaaatatataaaaaaaattacttttggattgattttgtctacttataatgatctaatggtaaaaatgactttggatgacgatcatcaatttttggaactcaaatctcgtctgttggagaagacacttttatgagaagacacttgaaactagcctaggttgacaaaatatcaacttaggcactgggcccaagcacccggtcaacatgggtgttgggtcctagttttgccaattacatgcatccgattttcgaaaatactcaatctctattattaataaaaattgagaatattcccaaaagactttgttaactcaaacttttaggtcttttttatgattaacaaatatttgattattatttgttactaatgatttgttgattttgtagcaaaattaaaagataaaataaatttttccaagataaattggtatttttaccaaacttttcaaagtgacccaaaatagattcaacaagcatatcaactatttcatacttgattagagcaaaagcttcatcaagagatcctaaatggatatttaaaagaaaaatgagagaaagaattccgatttccttgaaagttagagtggttgcatcactttttgatgtttctaataaggtaaacgagtgtgaaaagaaaactgaagaaaagtggtatatcaccatcacccaacctaccaaatactaatcaataatcataatcaaggaaagaggaagggaggagtgtttaaaaaagaaaaaagaagattatctcaaaaatattaaataaataaataaataatagagataaaaaggttaagagctcctccggtggtctaaacaaaacgcgccatgtgttgactgaactgcgttggtccccacttctacagtggaacccacactcttatttacgaccaatcctttaccaaaacaaaagctttgattgaaccagtcagtactccaaaaagagagagagaaacaaataattcaagagaagagattagagagaagaagaagaagaagaagaagaggaggaaaaaggaaaaggattttggagaagatgaaatgccctgtgatagctaaaaccgttgttttcttcttcttttgctgcgttttccttttggttcctgggaaagtttcagcatctctgctttccgagaaagcgattttgctggacctcaaagcttcctttttggacccaactgggattctctcttcctggaactctactccctcggatcatcatcactgttcgtggtttggtgtctcttgtgactccgcttccagagtcgtctcgttaaggatcagcgggggtcgtgtggttgagcgaggtaattttcaaccccttttttcttgttcccagtcttcccgctttaatgggtttgggcttaggagtgggaggaggaggagtggttcgtattcgaagggaaaacttaaaggaaatctttccccgttgattggaaaactgacggagcttagagttttgtcgcttccttataatgatctgagtggagaagttccttttgagatttggggtttggagaagcttcaagtggttgaccttgaggggaatctgataactggaaaaatcccacatggttttagtggtttgagaaggttgagggttttaaatcttgggttaaataggatcgatggagaacttcctctttcgttatcgaaattggaagaccttaaggttctcaatttagctggtaatgctctgaacggaacaattcccgggtttttgggtggttttccaaagttagagagtctcgatttgtctcgtaataggctaacaggcactgttccagctgagtttggaaatagttgtgatcttctcgagcatctggatctgtcaggaaatttcttagagggtattattccaggaagtttggggaaatgccggcatcttcaaaagcttcagttgttttcgaatatgttaagtggtgtcatccctcgtgagcttggtcaacttcgtatgcttgaagttcttgatgtttcaagaaatagccttggtggtccaatcccagctgaactcggagaatgtgttaatttgtcagttctcgtgctttctaatcttttcattccattccgaaacaatgagaactcaaatagaggtagtgagaacaatcattttgaaggctctattccagaaagaattacgactcttcctaagttacgaatactttgggcgccaagggtgagttttgaaggcaagcttcctgtcaattggggccattgtcataacttggaaatggtgaacttggcccaaaatcatcttgaaggagaacttgttggcatcttcgagaaatgcaagaagctgcatcatcttgatttgagctcaaataagctatatggggagctagatgagaagctttcagttccttgcatgactctgtttgatgtaagtgggaatctcatgtcaggatccgtcccaagatatgagggcaagatgtgttcatctctgtccttgaatccagagcttgttcaattttacgaaccatcatgtccatataagttgttctttacttgtaaaactcgtgtggaaacaaattttccttttgcccgtcctagtttcacagtgattcacaatttaagtggtaacaacttctcaggtgcaatccaaagctttccagttgaaccgaagatatttgggaagcaaacagtttatgcatttcttgctggtggaaacaaactcaccggatcatttccaggaaatttatttcgaaattgcaatggattagatgggatgattttggatgtcagtaacaacagattatctggtcacattcctctgaaaattggtgtcatgtgcaaacctcttgtattcctagatgcctctggcaatgaaatcaggggatcaatacccccaacacttatgaatttgacttctcttgtcactcttgatctgagtcgaaacaagttgcacggtcaagttccaccaggtatgagtagtttgaagcatctcaagtatctttccctggctgataacaatctgactgggccaatacctcatagctttggatggtttcactctcttgaagtgttagatctttcttcaaatgctctgtccggggatattccagaaggtctttttcacttgagaaatttaacaattctgcagctcaacaataataaacttcatgggcagattatttcagggacgaccaatgtgaaatcaccctcttctacatctaagttctctaggctcctggcagtagaagcttcaaatgagcctgatgaaaattataattcacaaaatgctgttgcttttgaatccggaagtggcagtaacactggaaatggtggattaaacccaattgaagttgcatccatagcatctgcatctgctattgtgttagttctcatagctctcatcatcctcttcctttatacaaggaaatggatgccagattccagggttcagggtctggaattgagagaaattacagttttcaccaatattggggctcagttaacctttgagagtattgttcgagcaactggaaacttcaatgccagtaactgcattggaaatggaggttttggagcaacttttaaggctgaaatccaacctggaatcatcgtagctgtaaagaggctttcagtgggaaggtttcacggggctcagcagttccatgcagagattaagacacttggaagggtgagacacccgaatcttgtaactttggttggttaccatgccagcgaaactgagatgttcctcatatacaattatttacctggaggtaatctggaaaactttatcaagcagagatccacaagagcaactgattggaatattctccacaagattgctctcaatatagcccacgcacttgcttatttgcacgatcagtgtgttcctcgtgtcctgcaccgagatgtcaagcctagtaatatactgttggacaacaacttcaatgcctacttgtctgactttggcttgtctaggcttttggggacttctgaaactcacgcaacaaccggtgtggctgggaccttcggatacttggcaccagagtatgccatgacttgtcgagtgtctgacaagtctgatgtatatagctatggtgttgtactccttgaactgatttcagataagaaaccactggatccttcattctcttcacatggagatggtttcaatatcgtctcatgggcaagcatgttgttgagacagggtcgagctaaggaggtatttactgctggattatgggatgcaggtccccatgataatctggtggagatgcttcacttagctgttacttgtacaaatgagactctctccatcaggcctacaatgaaacacgttgttcaaaagctgaagagaattcaacctctgtcattagctaggtaacaaattaaaaaattgcagttctatactagaggaatagaagagtacagaagggggctcattttttttgcttctgtgctctcccgtaagccccccttttgctgctagaagtctagaaataccttaacttatgcaatttgtacattctcattctgttgtatcttgttgtatcgtaacactaacacctacacgccctgcttagatctgagaactactggagtttgcatcaatattggatcttgattcatgtaattgcaaataaaattccaagcagaattgttgttcttgatttttgtcatctatgtttctgccactcatctgtggtttggctttcaatgttttacatccagcatcaagtaatttattttaggctcatttgccggacttaattttttaagtagtcatttagttttcaaaggtgccatgcaagtcttaccctttgaagatccccaaatgtttttatatcatctgttaactatcacttaagatgtaatttttaaaaaagaagttaattcatatgatattggtaacatatcaggtagacttgacacttgtacgtttaacaatttattgactaaatattcaactgaataagttggtggtctcactgattatttgaagcatcttttacttctttctctattttttttttattatttttggaaaagtctttcaaacaagtctggtttttggagcaactttcgatgaaagcaggagatatcaatggaattggaagggcacatcagaaaagacgaatgtaaatttttcttccaaattatgaacaactctacgacatactttttgcatctaaagaaaacttccgaggttaaaaaaaagaaaatattatatattttttctctgttgtctatttttgaatccccaggtttcaaaagggatgatgatatagtgctatgacaaaaaggaagcagaggaaggatttataactatatgcttaagtggatgagccacatcaccaccaccggcatgcttgacaaactctgctggagagagaaatttgccatggcatacacacattatcctcacttcttctcctttcccatatctatagaggatcccatctattcgtctgccattcggaccatctccttttgtgaacacacaaggcatatcttccatagcattcattccaatttccctccccttgcttcctccagcactaggatttttagattggttttcggctttggatcctgaagtggtacatttactttcggttgcctttgcccctgacggccctgtgttctcttggttttgttcttgagacaaccgatggctggattggccggcagggcttgcttcaccacaactgctggaacctgtgaaggaaatggggaaacataagaagagaaccacactactttactcaaattttcattgataccgaaagaaatcaactgtgtacgaaaatatatatgagcaagattgaaaattctatagggtacaacataaccaacacatgcttagaatgagttgactacttgaaaacttgagaatgggaaaatgtctgagaaaccaggaatagaaaagtccgcgtttcacttatattaatctaagtaacgtattgggttactagcaactttgctttttcaacaagatacaaacagcacaaactagtctttgtagaagtcccacttatattaatctatagtctttgttagctgaagaggggctttggtaaatatattatgattcaccctagtctaactctaccacacaagtctctggagcctcgc

SEQ ID NO: 43341 - DNA, 1623 bp, Cannabis sativa
tccaagtttgatccttatcctgccttaaagcttctctagcattgtgatgagttgcactgttgaaagatccagagatgtgttgtagaaaagcattagagaattgagataagaatttttttaattaacttgacaacactagataaagcagaattgtccttccaagaattgtttttgagactaactgcaaactatctgattcaatggacacgagaaagagcttgattgcaaaacaccaacgcaggccttctagaagagcttgagtttcaacgaaaagaagtgtagagacaccccatttggatatggagaaacttgttatatgttgattttggctgtttcaaatggaagctcccaggcctgttcttagctgcttcaagtcaagggcatcaacggtaagagtgaattgaccatgttgttgagtgtgagctgctgaaacctcatgggatgaagaggtcttatttgatgtaggaggatccgagggactgaggctgggagaaagagtttgggctgcatggtaatcttacattaaagaacaaaccaaattttccccttcaatgggagtgttaggagtacgattgaaaagagcattgtttctcctgttccaaatctgccaaactaaactaataaacaaagtgaaagtgtccttgttaaagtgatcttagcctcatagatagaactctttaatgtcacaattacaattgtcaatataaaagttttcgaaggaggatgtttccacacagacttagctctgaggcagtgaagaagagcatgagaaaccgattcgacttggttgctgcaaaaagggcagaaagggctagctaaagattttttgtgaaaaaggttcaaactacaagggagaatgtggttaaaagccttctaggtgaaatgtttaatttttgggagaattttggtgctccaaacagttttccaccaatgttttgaacttttcatgttggaagaggatgggatggtcgagatgggcctagagttagctaaatgataaacagagttgacactaaaatttcctgagggatgatgtccccaaatcaaggtattgttagaagaagggtcaatagaaattttcaagatttcttagacctggtagtggtgggggaaaattttgttgaagcttaaggaaattctagcaactgtcattatcaattaaggatgaaatattgtggtcagatggattaaaattatgcaagaaggagagagagtgcaaacttggaacctagttagtgtcaatcaaagagatagacctgctatttcccattttccaaatgaggcctttcttagaaagttcccttccctaaaagagactcttctaggtattcgaaggacaatgaccttttgagacagtgagaaaatcattgtttttaaaatatatggctttaggaagggagtgtagtagggttgaagggttagtccagattctctaagcttgcttggcgattaaagcttggttgtgactcataagggatctaaaaccaagaccaccatgaaatttggaagtgcatagagagggccaatttttccaatgaatttttttcttattactacacaaaccccaccggaacctagatataagtttttgaagtgtaaggcaagtggtatgagggagtttga

SEQ ID NO: 43342 - DNA, 2089 bp, Cannabis sativa
ctccaaaacactaccctcaatacaaagactcaattaccctcttatttaatatatctagcacaccaccctaatcctaggtcctaacattatattacaacaagacatgagcatatagtttcctatttagtaaaactaaatattgaaattgcacacagattccaacctcctgtaacactaagtgatcaagaagctgccacaaatttatgtgctaatagagatggtgacagtatcacattgagactaagcaggcacttatttgaggaacaaaaatatttgagtttgtcacaaaagcatcaacacgtgattgctacaataccaaattatatatctaactcattaaggtacttttgcagattcaatcactgtttgatgcagatgcaggactggaataaacatacctggcttgaaatgtaaccgcagcgttcacatgtcccctgctctggcatttttgtagtagtggaaatcctaaaatcctctcctgatttgataatatcaagtattgctctgggcctgcatcaacaaatatatagaatgctcatctaattccacagtaaatgctccaaaaataaattaaattgttccagacaaactcttaatgttcaacttgcaatagtaaagaaccttattctctccaaatccttgatgaactcccgagcaaaaccacgatatgcatttggagagtaaatgcctgttatttataaacaaacaatccataatctttaatttgacaatattaaaataaatacatcaaaatttggtgacattcaagtaaaattatgtcttttcatatgtagtgcttgaccaagtgcatgcatttttccttgaatccaggaaacacatccacatttctagtttgatctaagaatgtaacaattaagtaacaataatattgtaaaagaacttagttacaccaaaacaaaatgtacaaggaaagaacagaagaaatcgtatttaaatatatctaaaatgttaaaattagaagaattacattcagtggaaaagtagtccagcctcttgaaataggcatacgtttatatgcagttaaggatttgcaataacgtaacctgaaatgagagatgaatagaaaatagtacaggtactagataataattttttttacataatgaattgagtatttaaaaaaggatatataacgatctccttctcatatgtgtacttgaaaggtttgcaccgcggaatcggtccatcttcgccggtggtaattgcagtgcatctactcaatctacaaagaaaagaaggtaattcttacacatccaaacaaacaaatagaagataaataatcatttgaagaattgaataaaataaggacaaggaatgaccgatgcacacctagcaatatcaccacgtaaaatgttcaatagaactgtttcagcaatatcatctgcattatgtccagtagcgaccttgtcgacttttaacagtgcagcaccacgatcaagggccttaaggatgtgtgtgagagagagggggtcagattcagatgactcttctccattagaaggattcaaagaaaaaagaatcataaaaagcaaaaaaagtgcccatgaatcatactcaaataacagttcaaaatatacaaaaacttcacattaagagcttcagcaatataaactgaactcccgttcacttaaacaggaggcaattcaatcaaatcttcacaaaatatttatgagaaaaaatgtaacaaaaaaattaaagaaataatatagatttatgggagttttctttctgcgatggtgggattcaagaagccagtgaatcaagtgtatgagtagcttgatgtctcactaaattaatcaattggaagcaatggaaaacagttcaatacttgcagactacatataaaagaagtttgatgattctcctagtaaattacatatgcacagtaaacctgtgtccactaaattatatatgacaacaatttttctattttgataagatacactaatagggccttaaacactgttagaagggcatctttggttgttcgaatttcgaaaaagcttccaatacccattcatatgcaaacaacaagatgcaagatttttggccataaatgtgacaatgt

SEQ ID NO: 43343 - DNA, 2729 bp, Cannabis sativa
aagaaaagataaacttccatacaattcccctaaagctcatacaatacagccaatgcaactatttagtactaaaacaccatactaaagatttctagtggcatcactagtaccttaacaccataccgaaactcgcttccagctaattctcacacaccatatcgaaatttcaaacacacaactagttaaaaggactcagaactacacaagcattcatacaattcatactttaatattattgtttacaaaaagcttcatcttctaaaaggtcaagacccttcaaagccaaacaaattcttatgaaatcaattgccaaacattacttatgtgaaatggaaaattcatataaaaccttttgtcaaacaacttaaaacaaagaacctatatacgtagcttgaattgaacctcaaaagggtattaccccaaataagcaaaacacttgcttttctattccaattttttatataaaggaaaaggacttttagtcaaaagcaaaataagataatagttctttcacgtttcttctcagcaactaagaaataatatgaaaagggaaattgattaaaaatttcaataaacaaatgccaaattctgatataccccaattaaaaaattaaactaatataatatataaacacttcactatgacttttcccctttgaattccacaaagccaaaccttcttcttcttcttttttccaaacaattgaaattaaaaaactaaaagcttgagctttcttactcattttaatcaaacaaacagagagaaatgaaaaatccaaacaaagcttcaaacttttttcatcaataacaaaactacaactcaacacttacccagaaaatctcttcaaacttttcccaaaacccaatttttaaacaaacaataaaaacaccaaagaacaattcacacaaaaccaataaaaacccatttcatgtttcacaaagcttatgatgaaaaaaacacaaaaaaacctaaaatcccatgaaattataaagattagagaaataaagacaaaaactttaaatcaaaaacataccgctattaatgtgggttgaggtggtggtgatgatggttaaatttttaacacagatcctaatgaaccccaaagacaaaaactttacatgaaaaaatgaaatgggattttattataaacagatcacactctaaaaaccatgcattgctttcattacaaaagttgcatgagaagaagagaaagagagagagaaagccagagaagaaggaaggaaggaaagaaagagagaatggtcagagagagagagagcttaggatgaaatttgattatgaaaaataaaaataaattaattaataaaaaaagaaaaggggtagaatttgtggggcctatgcagttggagatttgttgtatgtttttttgtttttgtaagaatgaaaataataataataatatttcctaataaacatttaacattaaacatggtttacatttttacattgttaagataagattttgaggttttggaaagttttattttttttaattattattattttaggataatacttacaacaagtcaagccttttttgtgttaacggatacaattgaatggaatagaataatgtatttcaacaataaaacaaaaataaagtaaatttgtttatttaaacttaatttaagacattaagaccattttgttattgagattatattttcacctaaaaatgttgtgtagtaccttgatattaaaataaatatcaattaagttttcattatactcttaaaactttcttttacattcttttcttattaactttttaatatttgtaaaaataatatattttattttttaaattaataagatttcatatattttttattttattttatatgtgtttttttagaatatgaagaaaaagaaaaaaataattaaaaaatatatttttatagaaaataaaaataaaatttttaaatttttaataaagaatgatcgaagtgaagtataaatttgttttgtgtactttaattaaatttatcgtacttaacgtttgtttgatctacttaaacttcttagatttaatacttagattttctaccattaatatttgtccgatcaatttaactattaattcaacaattaataaattgaacagaattcattctttaatcggacaaaatctaaactcatatttattttattagttgctatttccaaatataaaataataaacaactttgttcatatattcgtattttatttattgtatttaacgcttgtttgatttatttttactttttaaaattaatatctgtttagattatttgcaattaatgttcagttcaatgaatttaactagcaacaattaataaattgaatagaattcgacctttaatcgcacaaaatctaaacttatatttacgttactcattgttatttcctaatataaaataatagttagctttgtttataaactcatattatatatattgtacacttgtttgatctacttagattttctaaaattaatatctatttagatttcctataaataatatatattcgatcaatttaatgttaattcgacaatagcttattgcatcccttaattgtacaaatctactcatattcgctttattaattaattatcatttcttaatatagaatgattgtcaacgttgttttacataatcatctttttaataaataattaatttgtaggtataagtattaattaggagagaatgctaatgcatta

SEQ ID NO: 43344 - DNA, 4671 bp, Cannabis sativa
atatgatccaaagactaattaaaaaattacaaagatattaataatacactgtgaggaaccatgtataggcaaaaaaaatattagttgttggattcttcactcttctcttctaactaccttcctctttttggcttaacgtttttcaaaaccaaaaaaccataaaataaaattaaaaaaaaaactattcaatatgaaaaaacaaaggacatgtcgacaccagaaatggtgatcgtgatctcatctcatctgaaattctcaataataataataataaatagtataattccttttgactacatgttatatctttccctcatgtcttgaatttggccttctaacaaatcgtccctgtaaaataaaaagaaaataattaccacagagaaatccactaagtacgtaagtacattataaataatgttaagcaacaatatagtctaatgtggccttttttcttttttttaaaaaaaaaaatcggcgttggagctaaaaaaataagcaaaacaattaaaatataatgaattgaaaaattcaactgtgatccttggaatttccaatactacggttattagcaaacaaattattaggataccatgcatttgtatgtgtagagtactagaatatattcaacattaaaggatgggaatattaatttggtggtagtttaattagaaattatttattaaattattgctgataaatatttttatatataagaaggtgcaccaaagcttacaatattagaaacaaatacaaataatgtgcccaaaaagttttaatttgctgattggctaagtattttgctgtacatgagtttccgacctttacaagcaattgaaactctttcggctttttcacaaagctttatcaagcattgaattttttttgaaaacaaacaaaaaggaaagtatatgtttgtgagaagtgttaattacaattttaagttaatttttatgtctgaaaatatgttaaaataatttttagttttttttataataatatttgttataattacaatattttctcgtaaatgtttgaaattttttaaatagtttataatattgaaaatagatttcttggtattctagtctatcacgtgtgtttagaaaacatcaaatctattttaagcacggtaaattattcaaaaaatttacatgattgatcttgtaattataataaacactgctataattttttttcttttttttaaaaaaaaaaaaatattctagtatttattttttatttgaacacataaattaactaaagtgttataataagaaataaaatgattaaatattataataagaagttgacggtagcactcactattcataaatgagtttttcaaatactattacaaaataaacgccaatgattgttgcaactttaaatgaagaatcaagaaataaagcatatatcttaaacaattttcctatatatcaaaccttttagaaagtaacttttaaaaaattaataattaatataattttctctaaatttcactatttatatccttactaaaaaataactaagtagaatacaatttaattttaatctttaagtatgagtgtaaaagttatcttgttttaaaaacaaaaccaaaaaaaaaaaaaaaagaaaaacttgggagaaaagagaaagacacaggtggtgtatttaaaacgtcgataataaatatttcaaacttacctctaatctaaatagtggctttggttttaatttggaacaataaattttcatttaatggacgacgaagtaaaaaaaaaattggtgttaccttaagtttggcaaaaattaaagaaaagttgtaaatttctttaattttgttttttagtgtgacacctttccaaactgaaatttaccaaattaagttagtaagtgaaataatgaatgaatacatgatgacgtctccttcctatgtttcataaaatcttttgaaagtctcaactttgatttaaaaaataaaataaaggtaccttcattctgggccgtcgatctgcgttgacttttctaacttggtatctgatcttcttagagaagaggcgcgtacgccgtttttccttgtatcgcaatacgctagcttctcttactccgcctgcctccgggaacaaatcaatctgcgccaatctggcctgcccatattaatttcaataaaattaaaatcaaaaaaaccacagacctgtgattcactggttggcaccacatcataaaaattataattgaagccaacaaaatatgacaagtgtcgttttctttcacattctactcacactaactaatatgccagcaaattttaaacaaacagaaaacgacacattctgcctcttactattattaaaagaaaggttacattacagtatctctttttaaaattcttacataggctaggggtttaatttaagtatattcaagttcgattttttaattatttattactatactagatgaatattcttcttctaattcttttattttcttcatagaatattactagctccactactgttccccttctaaaacatcggaacacaataaaatcacattgggaaaataattaaataaaacagcattaactaattaaaaaagaaatctgaaaaggcacattaaaaaaaagtcagttccaatgtcgagtttcgaactaataataagtgatttaagtgaactgaaaagagaaaaggtatattttatggaacgtgaaacacacgcgccaaagcatcaactcattttactaaaagtttaaaactaatcaaaagttccaacacaaaacttttattatttgtcaaaaaaaaaagaaaaaaataaattaagctttgcgagactttgatttccgtgcgggagttgagaaacctacggtgacgtcattttcaggtaggtctgatcccggaggagcatcgtcagagaacggtgaacctttattggaccaagcattcaaaacgtcgtcgtaattgagcttaagtgacaatccttcgttgttcttattattagtcttcatcaaatctgcaacaagcgccgatttctccttttgcttttccttcgccggcgccgctgcaaccgccttctttttcttctttttatcaggtgccggcgccggagacggagctttcgtaaacttgggcgaaagctccattacatcgactgtgggaaagctccaccagttcccctcatcaacatttctcagagcactaattcctccacctcctcttctcataatccccaaccctaattcaaatctcccttccaatcccaaccccaaccccatcggatatccgtaacaaaatccccctacgacgctagattcagcggcggcggaggaggactccaccgtcagattccccataatgctatcaattcctccctcgtcaaattcctcatcgagaatcgattccgcatcaaaatcatcatcttgctggtaagcgtatcccgtagaagaattagtagtagtctctcccaaatccatcaattcagaatcgcaattggaattgggcggagaatcgaactcgcccgggctctgacacgacgtggaagaattaccaggcagcttcaattcgactcgagaggtgtgttttcgatggtggagcaagaagcccgagccatcttcgtcgtcgttgtcgatgagttgaaacggtaggagcaaatcggcggagtcatcgaatgaggtgggcgagtaagcgtgggttttgttgaagtgaggagggaattttgagaattgaatgggatttgagaagagatttgggtaagctgtggagagcaatgctgcagcctcattgtaggtctggttgggtcgtttccgaggggttctgggctttcttgtagtgattgcaagaccagaattgcttgattctgatagagttgaagatggtggagatgatgaactcgcattcgaatttcgagttgatgtagatgatgccgatttcacgatttctaattcgaatgcataagttctaccccctcctccggttagacacgaagacatttgtagattagtactgttttgtggtacaaacatgtgggaaataattattaattattacaaaaattcaaacattgagacaatttagaacatgttgagagagattgaatttttattacaaccttgtttttcaagtgactaaagaaagaaatattgcacaaaaccctaaacccttgtaaagtacactaaggaaaactgcgattttaaggggagagaaaacaacagggggtgagaaaaagccaaagagattctttattttatagagataaaactatagagaggaaaaaaacacaggaataaagagacttttttccaaggaattaaattgattatagtttaggtagaaaacagcttcaacttttttttttctctctgttaaaacaaaacaaaatagaaaaacagagagcccagattatatactactccgctcagaccacgatgatgatgatgagagtgagttttggatgaagagtagaataaaatatctcttgttaaggaaagttacccaatacgggaaacgataactcttagttgatatacactgaaaaagagtataaaaatacagagagaaagggagagagagtgagagaagatggtcacgagttggccgaacagataaaaagaaaaagaaccgttaagagttctgtactaatagggttcatttcatgacaggccagtcactcaattttttttttttttttttt

SEQ ID NO: 43345 - DNA, 2935 bp, Cannabis sativa
  modified_base (2547)..(2569): a, c, t, g, unknown or other
ttatgacattattattataatagatttttaacaacttacatcaattttaagcttttttccacaattttgctacaactattttttctcacagtacaactataattattttttcccacaatacctgtgctaaactggcttttaatctacacaattcgttgtgttcttgggaaaacccataaattttgacatcaaaataatgttgtttaagttgggttttaggacgggtccaatatattaatgaccgaaacttttataaattaaagtcagatttattcttgtttattaagctttgaaacaagatgaatctcttcctatatcaattttgatttaatctgagcaagcaaatctgttctttgccctatagcatggtgtttttgatcgggtttccatataggtacgggcgacccgagtgcagacaaaccgggtcatatcgttttccatgagaaaatttaaaaaaaattctaaaaattaagtttttgaatacatttttggaatttatgattttcttaatttatatgctaattgagacaataactttttttttttaatttttccattttaattaaacgtataatgtattatcttatatgttatttggaaattaattaaaacgtgaaaaatctttgactttggtgtacatgattttattggcatgtaataattttaataattgtgcaatttcaagaatgttatgtaattatatttaatatttttacaattaagtttgtgtaattattatcttaattaactaaataaataatttattatcttatttagcttaaatttttaattagttatgatattaagtaaatttatagaataattgcatttaattcattttcatatatgtttacagtaaaaactcgtatattaatggccaaaatttttgtgtaattattgaaaactaagaagatagatgattttttaaaaaaaatttgaagaaaacttgcatgatgggtgagtctctatttatagtgtattgtgttatcaacttgttagctagttacacaaagtttccaactcctttgaaagagggacttgtctctttttatagattagctcttatggctcaagttacaagtggtctccatagagaccatgtagtacatggtacgttggtcagaccatacaagtaagagtagtgggtgcagagtgctattggtcggatggcagaggtcaacagggttgagcaaaaaaattgagaaaccacgagtacacccgtttgaacaccgaaaaaatcaacacgaacaaaatcaaaaactgaaaaaattgcccccgtttaaaaatgcctttgcacggttgactttagtgtcaatggcacaccgatagattaaaccgagaaccaatcgaacatatatattatacaccatacatatacaatataattattttttgtacatatttaatatacaattttattaaactagtcttattttttttctttttcattcaaggtctcacttctccattactttattttattataatttgatatatttatgtattatatacaaatattcataaagtaatacgagtttcttaatcataattcattaccaatttaccatactagtagcacaaataatttgagcaaattacaaaaaatttattttatatgatatttgatacaagactctagtttttttagtttctaaataattatagcaaatttaaagacttgtttaagttaaaaaaaaaaagatggttgatttttttacccatggattaaaatggttggttttttacatttatataatggtcggtcggtttttagattataaccatgaaaactgaaaactgaattctagattttttgtgtaaaaaactgaccgttgctcacccctagaggtcaggatagtggttatagggtattgttggtcaggtgtaccaggtgctacagatgggtggcaatcctactactcgcttaaaccttgcctccatgctctgtcagacgtcgtggtctatgctcgatgaccttagtgtggtaatccttatacccctttcttatccaagtttgctagcttgtggcttgtattcaattgccaatgattaagtgtttgaattcaaagccaaccacacctctagtagtgtaatcgtttgggcattgtcaagacaaagagacaatgaggggtttttgggtgaccaaactctcaaggagcctacaacgagttgccaccggggaagtccctgtagggggtcctcgtaaggtaactctttgcaaaggaggtccctgtagggagtcctcgcagggtagctcctcccaaggagatcatcgtaagagaggcccctacagggggtcctctcaaggaggtcttcatagggtaggtccttgtagggggtcctcgttgggaattagacgtctatgcaacagaggttggagcatcctcggtgcgccaatgtaacgctctgataaaaaggtgcgctatagtgattttccaattattgtgtcacctttgctaattaaagaattttctttgaaaatcgtgtcaaattaaaacttctgatttaattgttgaactttgtaaactttcatatatttatttacannnnnnnnnnnnnnnnnnnnnnnacttttacaaatattatcaaaatacatttataatctggtcgcataccgactacaaaatacaaccccagatgtcccgagaccaaacactccaggtcgcgtcgcctcgtcatgtacaatcaccatctaagcccggagctcactcctgttcagcctttgcctttcctttacctacacatgaaagtagcaactgtgagtcaacagacttaataagaaaatcatataacaaataatataataccgacttgtatctaggtactcatacacctatctacaaggcttaacagatgcttaagaacattcttaacagttggtgctactgaccatgatatcacccactatcagcactatgatcgcactgtgggaccg

SEQ ID NO: 43346 - DNA, 5080 bp, Cannabis sativa
tagtaattatattattattattattattattactggtcgaactcaagagaataagatcagaaaatcagaacccattctttaagtgattgaaccacacaagccattatgcccctccttttttaccttgaagtttgtgtaataataataataatatttgctacacatttgcaggtgtgtaaaatcgatgatatcttagttttcttcaaatgatctctcatgtttcagagcccaagaaaaataaaaaatcatttttaattttaaacctcaaccctgaaaaaaccaagttcttccacgaataaaaatgtattcgctgtctgtgttgctaattccacaatcgtagtttgtaatcaatattagtatgttataaccttttcaactctcgttatatctgcttatgtttttagatcacacatacgcacataaatacatttagggacatatgaaaatataccatatggaaaaaaaaaaacgatgatctcaattcaacattattggtttattactttttctatggaatatacatgtatactatgtttttaggaatattttaagtttcatctataagaaacaataataaaagaataaatattcagatcttatttttgttcagtgtacctaatgaagtttgcgtagccatatacatgcagaaacacctcaaattaatcattaaaaaaaacggctctagaattattaactagctagctgctacacatgatccttattatcatatatatttatatataaggttatagtacttgttggtagttggtacattacatagtactttctttagcaaaatgataattgaagggatggagcttaatgcctagctaagattcaagggatgaagcttaattcctagcttatactctccttctctatgttttttttttcttaattaaagtacctatttaaaaaaaaaacttttgccatttaatcaaataataaaaaaaaaacttttgccttatcatatatatatatatatatatagatatcatgtcatttcataactatatattcatagtattataccccttcactttaaagtaaatttacctctcctgatcgtaactataaatatataaatttataatttatgttcaaggagagaggccggacgatagaaactttcttctttcttttctctttttagtatttaagtgtaatttccttttaaaggaaaagtttttattatgaataagatcaattgtattgttaaatcaaaaccatacactattctatatttacaagacaatatcccaacagtatacaagaaaaataaaacaattttattttcaaactcctacaaatatcctctttatttgatgaaaactttgtttataaaaactgttaccttatcttttcaactaccggccatacatcctctttagatgaaaaaataaaagagaaaaggttactcgtacatataaatatataaatatattccgacttggtgaaaatatatatacatattttgttttaatggaacttgcaaaacaaaatctcttcaaaaaattttgagtctcgagtatgtctcaaagtttattttgagtgtcgagtatctcttcataatgagactattatgtataactaagtgctatataactgtatagtcgtgcactcgtgcaaaatcggattttttcgcaaactctgttcattattaaattcattagatactactcgatcaatgattcagttgtttcatatatatatttatataattgactggaaaatttattagttattaaaaatcttagtattactacataagggatgtgataatctgtatatatgtgcgtgtgtgtgtgacagatgcacatgtgggggcatggatcacagtacagaaagggtcctgaatcactaagaggaacacaaccaacagcaatgctaaggctaccatgcttctgttgctcaccaggttgtagaaacaacatagaccatccaaggtcaaggccactcaaagactttcgaaccctccaaactcattacaaacggaagcatggcatcaagcccttcatgtgccgaaaatgtggcaaggcctttgctgtgagaggtgactggagaacccatgagaagaactgtggcaagctctggtattgcacttgtggctctgatttcaagcacaagagatctcttaaagaccatgttaaggcctttggcaatgcccatgcaccttatggtgttgactcttttgaccaagacgatgatgatattcttgatcaccctccacctagcaatgacactacttaaccacccttttataataattaatttgttagacttaactagaagaattaaatctcatcatgcatgggataatcactattcttctttaatttcttaattgactaattgttaattaattttcttttatatcatgaccttaacatatatttttttgttagtcatatatatccgggatttaattaattttctttgttacaggtcaacgttataaagttctccagaatctcaacatctctcttcaggaacaaacataaataatttacatatagactattattttgcttagcagtagaaaaactgctaaagtaacttgtaggacttacttgacatacaaattgttgagaaattaaatgaggccacgacaagatttataaagattactaaaattaagataaatgctaaaagttacccatggaatgtaagatttctaaaataattaagataaatgctaaaaattacccataatatgtagcatcctttgttatgttattagtttattaagtgtgtaattcaataacaaaatgtaatttattttattttaataaatattataataaatctctaacgaattataattcatcacctcttaatagtactagataacttaataactcataagaatactctataattaattagtaattattatttaatgagctatccatatatagtgtgggggacacttagtatttcttgtccagtttatttttataattggattcgtggtgttcattaaactggccacactgtaaaaaaaaatatagttcgaaatttttaacggtatggttatagtttgtacttctgtcaaaacgcgtggtgcggtgcagtttatgatttaaaatttaataattgtagttttaaccgcactacagtactatatattacaatgttattaatttttaaaatataatttttatttatttttttgatataagaataaatatatttaatatgtgtatatatattgtattattttctagagacaattaaatagaattatttgttaaaattttaataattttttttctttttttgatattttttaaactttattagacttatctttgaattttccttataatatttcataattatgatagtgtaaattgtttaaaccacaccccacaatatcatatttttccagtgtgatttttaaagttttaaaatcttacaatgcctttaccgtttaaaaattacaaaaactgtatattccatttaatttgaaaaaaaaaaattacaatcgacacctcctaacgtgaatatctacgattgctccattaattttttgttggaatttttataccattaattattgtatatgtatatataaaaatagttaaaaagacagctgaataattattgttcatatgtatcaacagtacacataattaatcagctttctaagtatactagcttacaaatgtagagcagggtatcaacatttttttcttctatttttttgtgccatagggtgtcaacatatttgtaggctttagatgtcactttgcaaattactaataaacccctaacataacagatgtttaggatatatttatataaacgaagggcttcattatataaaatgatttagcttcagatatatgcttgagatttatataataagagcaataagagcaatatctcagttctatatataaaataatatatatttaaaaggttatataagctaaagctagtgtatatttaatttgtacatgtactgtcatgaaacaacactgctactactactactacaaaggttgtaaggaagtgatataatggatcttattggcagctttgtaagatgagaaaatttagaaaaagagaaaaagagagctatagcagtcaaaaaagtcatatatctctcttctcatatgtcatttcaaactacaatattatttcagaatactgtactgtgtttggtgggatcagcagtaatgtgtatgtgtgtgcccccaattcagagcttcaaaatttttaggtccccctcctctcacttctttcttcgtcatcactacctgatcctttttctttttctttttatttactcatatatatataaatatttaaataatgatgatgaatacatatagatatctctcagtcatctttgtgtgtatatatatatatatatatatctatacacatatgcttaggacagttattcagagatcttccaatgtatgtacctttagatttaacaaagaagctacattgagtcatcaatataaacagcatacaaatactatttaattcaattatgccattcttttctaattaattcttcgctccccagtgttatgtcaacaggcctaatctaatcacagtgttttctctgccttgcattttctttttcgaacttgagacaagcttgttgttctgaaatgtatttccaatttattattttaatataattaatgaataaagtgtatgactatataatgataaaactaaatgtgctatatataaaatggactgtttactattaataatattcacattgctccctaacaattaattaaaaagacctcaaattggtgtactctttaattccgtcaaacattattaatatttctctctcttacttccgccttgttattatatatatcttttttttttttttgaaagattgatatctattctatataaaatgtacatatacaagtgaattcttagttactaaaagttattgggcgacttttttttttaaataaaaaaagtaacaaattattagatgttgccacgtaaagagtcagcatctatgtagttagtcaaacctaaatataattaatccacctaaagtgttgcaattaataataaatttgttcatatt

SEQ ID NO: 43347 - DNA, 1950 bp, Cannabis sativa
ctctctctctctctctctttaagggtttcatatagttcaaattaaggattaaatagtgttctcttcaagaaaaactcaaaagcattgtataacaatgactagcttcccaagtctaagataatcatggttgaccattgtcctaatcatatgaaaatatgcagaacaaaccaggattacagcaaaataaaatgggaaaaccttaatttggctccaaccctctttttgaatgtgatagattttttctaaaagaataataaaagctgagagttacaatgtaatttcctaaaaactagaataattgtaaatacaaaaaaatgggaaagtattgaaaaaagttttcaccattaaatttttggaaaataatttcaattatctattctctgttatttcctctcgtaaaatttatgagtgactaaccttctttatcccaaatctgcaaaggtttgctcctaaattaaataaacaagaaaaatgaagaacataaataaataaataaacaagaacaacaccattgaaacatgaaaacataataacatacccaagagagtagagaattgagagtaacccagattggaatatgttcttaaacatcttttttatgaaccaaaagtgaagcttaaacctgcaatcaaattcaaattcacaaaacacaccacacgaacactaactattttcgtgttgtgaaactaaaaagtttgctagtgaaggaagcagtagaagtagaaaagaaaaatcgatatcgtttggagacttacgacaacaaaagttagaaagccctcttctagtcttctccaacctctagttctctggttcttcgttttcgcttctttctttctccagatgaaagagagggactgattcatgttattcttaactggattgggctatgctatgttaatgggcttagacgacgaccattaagcccaacttaattctgacgaaaaaaaatgggaaatttacgtgtatactaacttttgctatttttttacaaaattcttgccatacggtattttttactttttactgtgtttttttataagtttcatactgcagtttactgaattaagttttcactagtattttttagttgttctactgctgttttgagttaatctgttttgtgttctactgggtattttataaaaacacacagtatttttaaaattttttctatgtgacagcatttttgtaaaaattaactcaaattttagtattttttgtaaattttccaaaagaaatttggataagttgaaaaatacctcttttctgtatgtctaatggggacattatttataaaagtgggtatatattaaaagatataaaaatagaagtaaaaattaaaacaagtaaagaaaagtgggtatacaatgtaatttcttaaaaaaattagaataattagaagacaccaattttgtaaaaaaattacatttttactttaatttttttttttttacatttttactatttttttttataaaaaaatatgaaaataacaaaaaaattacataaaagtaataaaaaaataacatacagataacaaaaaaatcaacaacaaattagcaagattacaataaaaagagaccgtgttttctataaataaaattaaaaaaattgtaaaaatatttaaaattctataaaatcgtattttttattttttaattttttttattattggtatgtatttgtgaaataatctcttaattattctcttttattcatatttgcgtaactattttcgatgaattattcatatttcattgcatcgttgccaaaaaaaaaaaactctattgaaaagtaactttcaaatttgacaacttttaacaaattttttgcaagaaaatactataattttactcatcttctttttattattatgacttaggagtaggactaggacgagtgtttggatttggacttggaggcaggcaatagatattaaatggacggttg

SEQ ID NO: 43348 - DNA, 4858 bp, Cannabis sativa
agctgaaaaaactgttatttatcagggctaggtggatgtcattggcgtctgtgaagttcttagttggttaaagggtcgtagctggacttatgttttcgtcgaaatcgactccctttgtagggtgcaagctcttcaaagctctatcaatataatttatttgtttggtttggtcattctagattgtaaagttttatttgcatcttaaattaatgttgtttttttttttttttttgttaaacaatcaattaatgtaatagctcacatgtttgctaaagctactaagatatatctttgattctcgtttcaatttagagtctattccaactaatttgctactttatttggtgacataacttaagatttaattaagtttaaatttccattaaaaaaaatacatattatatttgcatatcaacaatcaagacatttaaataagtgatttcattatttcattataccttaatgccttgatttaatttttgctcaaaacttcaaagctttccctttatggagaaaaccttaaaacacagtacacccccaaaccacttgagctagtctcaagttggggtatcaaggcaaagcctagtcatattttacatagcattaattcaagataacttgaaatcagttgaagatttgagtcgtttgtgttcagagattgaactacaaagactaagatcattagacactgcaacaaagctttggatcaatagaagtgaggcatatgcaaaatgcttggtaacctgtcaatggatacctgcaatgcaaaacaaaaatatgatgtattcgttaagactttagaggcatttgagcattcttaagaatatatactatttttattccaaaaaaaaaaagaatatatactattttgaatcttgtattttgcaaaagttatcaatcggaccctttgtttattaaatgacaattcaaattttgtatttttcaaaatggtataaaataatatcgtgagctaatttttcattaaaataaaacttaataataaccttacttgaaaatttatggccagattagttacattttttttgtatatgttcgtgctaataacataaaatttgattaaaattgaactcacggtattattttataccaatttgaaaaatacacgacccaatttatcatttaacaaaacagaaaatctaatcggtaacttttaaaaaatacaaagtcctgatattttctctagcatttaattaaccatgcataaaatgttttaacaaaaccttaattcacacagatcattacctataatccatcacatatttcgatttttccactcttccaagctgcagtattgtctgctttcccctctcctgagtaaaccatacaatgtaagtaagcataattccaagccaaagatgtctcatttcaacatcattttttaacacatcctacttgagctagtctatgcaaaaaatatgcatgttttcgaaagtaacactcgagtcattacctctagagttagcatgaaattctttactgagctttggattttaagaccagctcttcccctatctctgtaatctaactcatactgccttgaaatctgattcaacatatgaaaaatatatgccatgagaaacatttttaaacaattattgtgtgttgagaaaataaagttccccaaattcttactttgttgtactgtggaaccttcgagactaaccgatgaactttatccttcttcccttcccagtccattggcaatcccttaatgtgttgaacctgatacaaaaagaatttaagttagcacaaaaatttacttacagaatcagaaaacaatttagtataacaaagaagtggttggaaaacctgagtattattagtgttctttagctgcattgattggtgtttaggtatgtatgcccttaagcttctgtaacttccagtccaagtggtgattgtaggtaaaaatctgcatgtagaaggaatgaccataagaactagaagtgataacaaagacaaactcaacacgaaaatgcagatgagctcaccctacaacagcgataagcgatttagactgtttgttgggagaattcagacaagtactgccctgcattgattaacataatgcttttaagttaatgataaagataacaaaaatgtctacattcaacttgaaaagtacaaaacttcaaatgcaagaagtttaacctgatcccatatatgatattttgaacccatcaagttagcagtaacagttccaagtaagctaccatcagaagtagatgttaatccctgcacactctgagcaatagtaaactcagttttcccttttcgccgtttacaatgagcaacagccagtttcctatcctgtcttcctcgaccttcctgcgatctcaaatttcaaatataaatataaatatagcacctatttctctagaaatcatagtttaaaggtgttgattctgaaatataaatgtagcttttgaggaaatactgaaacaatacaatcccaccattcaaaagaagcagcataagactggttttctagtaatttgattattaaaaagtggtgaaaatcatcaatggtttagcattactccttaacaacctttactacatattgttcccatgtggaagaaaccaaaataataagccattaagcattaaaaatcacctttcaatttctaattcttaaaaaacaaacaagtggttgagcatcatcaataataaaaccacagcacatgaaaacgtgtaatgttaggcacaagtgccaaatataattattaattactatttgatcaatcttttctagatggtattttcttaatagaaatcctaaaatataggtcctaatgaaaaaacccaatctccaaagtcaaaacatttatatgaatatgatagtacattgactatttgaaattaccccaatattttacagttgaaataagaaaacaaaacagaaaaatcttacattggtatacagagaatacaaagtccccccatgaaatccatctggtgatgcttccttaacaataacacaagtacaccttcctatatccataggcaatggtctgcacattaatgacctgaaacaacaaccaataaaacacccaattcatatctcattcaaagaaaaatcatttttttcttcttacactttttgtatatttattaaaagaaaaaaaagccactaacttattagggagagtagaccaagaagaagcaggagcagcctcagaatcagaataatcccatatcttcaaagaactagagtgttctgactcactaggctcccatgttttaaaagcaccaaaagacttgtcaggctcattcatttgcatacaaaactgaagcgaagatggtttgaaaggcttacagccagtcgaaagtgatttcatattactcaaagtcaaattctttggagccccaaaagagtcagaagaagacccatttacaataccaactacattttccttatcatcgctttcttcttcctgcttcttcttcttcttagtattattattgtcgtttgagattgatggggtttgctgaatattgtcgtttatgggagctaaagggaaagaccgtcctccttcgctactgctacgattatgacgaagctcgtcgagtaaaagagggttgtcgtaaagggagttgtatgatgtttgtctaggaaatgaagattttttacacccagaaatcatggtgggaaaaattgggttgtttggaatgagaaagattggattttgattaatgggttatggtcattttgtaggataattagtctttgggaaagaaaatgatagatttagtaggagaagtatagaagtacatgtacatgagtttttggtggtgtaactaatatatatggtaatgtttgaatttgaaaaatgaagaacaaaaaaaaacatgggaaagtgtgtgtgattaggttaggtggaaaatatgggagtaacggtaaactattggaagctttttttttttttttttgaagttattgggaacttgtttgttttggccttttgtacatttgtgaatgtgtttgtgtgtggcattggtggaggaatttaaaaataagaagaggtattttttaatgtatttctttactaggggaaaaagatatatttttgaaaagcgggaaacatatttgaaatttagtatattattagttttggattattgtacaattttgttttgtttgtttgtctataacagtttgtggttgtactataaaaataaaattggggtcaagtcaagacaaagcagaggacatgtgtttaaactcacttgagacaattgccttattcttttttctttttgaaaaaatatatttatatgtttttttttttgtgtttgctaactctatagactataatcagtagatacaataggaacaattacaaaacaaaatcttatatatatatatatatataaatacatgaaataactggattaaaataatactcaccggatacaatgttcttcttcatctatggttgactatgccacttgctagttgtaaagcttcattggatactctgctacccatatgccaccatgtatgttgtataaagccactttcaaatgatcttaattttcagtcaattcatgtcaaaaaagaaaaaagacagattttttgtggttgtacattgaactcaactcgtcgataacagtgataaagcttattggtgggtggcaattagtgtttatggtcgtaattccgttatgttgagacccatatatatttcatatgtttattaatcatgccaaaaaataaacgcattttttttaaaaaaaaaaaaaatcatgccaaaaaataattaacgaacacgatttataacaaattgacacgacatgatccgtgtaacccgtttatataaacatgataactaat

SEQ ID NO: 43349 - DNA, 1967 bp, Cannabis sativa
tgtttcagatttattgtgaacgacgatttctggtgtgagacttatagggtataactcccagcctaaaagcacaaatttatccagcctgttgtactaaaggcaaaagctttaatgcttatccttgagtaccaactcaagagttgcaagtgactaaaaaatatgacaaattgagtgcatctatcatggcggaaacatatgtgtcttagactacgaaaaaagtgaaaacttcatatgagctcaagcatcgaattcgtggataagtttcaaatgtacaatgtccaaaactgaaaaatagctaatagaaatttagacagcttactaacttacttgtcctggataataaaacggaagctcatactgcagaaaacaataaaaatcaacgttatcaactctgtttcaatgaattcagattaaaaaaataagagagattaagatccaaaactatcctaccatgccttctttgtaatcttttcctcttttcctcctaccagggtagtaatcttggtcatactacataagatcaaaacaagagtttattaaaacattcagcaacttaagataacaaattcattagctttttcaaccacatttctaaattgaagacgatcaagtcgaaccccatcagagctaaaaatttagtagcacaaaattaaaatgtaaagagatagtgacagagttaattaatggcaaaagcgctttaatcaattgtatagagatgaaagcaaaccttgtaagactcctcttccaacctatccttgttagcatcaacccactccttatactgcttcaagaacaccttatacctatccaaacacatatcatcagtctcaactttgaccttcttctctaacccttcgacattcactctcactgcctgcaacttatgagcttctcttataaactccaactccttcttatcaacctcccaacccctcggaggccaatccctcggaggcatcattctcacgaccaatggtcctgcccatgtcgtacttattggctcaggcacctcaaatttagactcaatctgcttcatgtaatagtcctcctcagtcagaccaatttcctccattttcttcttccggtatctgggcctcaacatcttgaaagcttcaatggaatcgggtgattggagtggaacctcctctccctcgttcaagctcttacgagcgaaatcagcttcaggggagaggacttcttcccatggggcccaacctcgctcgacccagttgcgaattcgagcttcttcctctgtttcattgtctctcggggcgaaactctgcatgaatgactcgtcgacggggaactcgtcggaggggaggcagttggccctgaagttggcacggagtggtgtggtcggaggaaggagaggacgccatgggagaggatggtggtggtgaaaatggggtttggtagaagaagggtttagggttttagggaaggagaagaagatatgatgaggagggttttggaggatttgcattgctttgctgtgaatacacagaaaaaatggagctaaacagagtaagagagtgaaaaataaattagtagaagtgagagtgtgagtggataaagtttttatttttatttttatttttattttattctaatgtcgtttttgatgaaaaacgacattgttgtctatatcaaatgatgtcgttaagtgattaatttgttctcttttgatatggtgtttaagaatagaaatgaggagagttttaggcgagggtgtactcctggtcctcatctcgttaactattttaatactcattattaattcagaaactttctctggtgacgtggacatcactgtttgacacgtagcaaaaaggatgatgtcacaaagttgagtagacttgagtcattgcagttgaccggggaggggaccctagtcctgtgcctacgcccaggttgacttcgggagcctcgggatggaagttcggacttcaatagcttgaatttaactc

SEQ ID NO: 43350 - DNA, 2564 bp, Cannabis sativa
taatcatcaactcttggaatatgttttttgaaatattctccatcagggtcttcgacccaacaagctagcatcattaatggctaccataaaataatattttattaatgagttatgctgttatataatttttattttgtctattattagaagtatataatttatacaatttaattaccttctcaacacatccaattgtaatatatcgactattttcatcctcgtaatgaatgtgctccatcgctctctgaactgctttttctcttattttgttgaatggccatgtattaataataggctcggcaagatagtacacacaatcccataagagacgttgtactttgccgtgaggatagtagttgtcctcctgtattcaaccataaatgaaaattaaattgatgtttattttattcctaaactggaaaaattttgattggttatttgtagaaagataacaatataattagaacaccaataattaatgatatatatgtataaatatatatatataaaaaatcaaagtgcactaataaaaaaaaaatattcttaccttagcacatacgtgacgcattttgctccatttgatatctttgtatggaatgatgtgaatttcttcccttagttgcttaatgagaggtgtaatttcactgacaaactttcttccatagaagtacgacataggcatgaaggttaaccgacaataacaaaacattttcgctgttcatgcaaaagtgtagtgttaagaactatgagagaaacagagcaaaaatatattgaaggaactgtgtctcgatttcttatttaattgattgagctgattgtgccagattagcctttctagtgttgtttagggagtcagccccctgttatggctgctatgtttcttttgctttgtatccttgttgttctttgttttgttcaatgaaagttcttccaaatcaaaaaaaaaaaaagattgagctgattgtgcaagggccttatatataggatgtgaaacaaagttggtataggaagagacaactaaccaacttaactaacacacttaactgaaacagtgaagcctaacaactaattaactgatcactgagtataactaatctaactaaatctaatagccccctcaagatggagtataaatattgatgacacccatcttagatacaatgttggtgaaatgagtagggagaagagccttggagaaaatgtcaactagattttattgtgaggaaacatgcatcagttggagagagccttgttggaccttttctcgtatgaagtgacaatcgatttccacatgtttggtgcgtttataataaacgggattttcacttatgtgaatagcggcagtgttgtcacagtacttcttcgcaggtgtgtggggatggagacaccaaaatctttgagaagtataagaatccaagtaagcccagatgttacgtttgtcatggctcggtatttagcttcagcagaggattaagagataacttgttttttttttttttttcacaagatgagagaattaccaaggaagatgcagtaacctgaaattgatggccttgtatctttgcaactaccccaatctgcatcaacaaaaaagaaaagttgaacattggctgatgacaagctggtttcaacataggcagtgattttggagacagtgtttgaagggagaaaaaatacctttgcccggagtctttttaaggtattgcaggactctatgagtggcttgtagatggggaactcgtggacaagataagaatttattgagatgattgactgcatatgtgatatcgggccttgtgatggttagatatatcaatttaccaatgaggctaagataggcagtcaggttagtgagaattgcacctttgtctttactgagttttaagtttgtttccataggtgttgaagctagtttggcacctatgcagtcggattgatatgccctcttcggtacgaccgattttaaggccaaggaaaaagcgaagtttccaaaagtcttttattttgaatttcttgtcagaggaattgttgaattgtgtgatgttagatacattgttgctagcaacaatgatatcatcaacataaacaaggatgttgaaaaagtcaaagtgtgttcgtttaatgaacaaaaaattatcaaacagggattggtggaagccatcttgaatgagagtggtattgagttctgagtaccatagcctggaggcctatttcaaggcacatatactcttgtttaattttcaaatagagttgggaggatccttgtatccaggcggtattttcatgtacacttattcatagagatccccatggaggaaggcattattaatgtccaataggtgaacatgacaattgtaaattgctgccagtgctaagaaaattttgagcatattgaacttggccactagtgcataggtataagagaaatctatgcattgtctttggttgaaacgtttggctacaaggcaagctttgaacctatcaacatccccattttgattgtacttgactttgtacacccatttgcagccaatagctttgtggccagggagagtttagtgatc

SEQ ID NO: 43351 - DNA, 1645 bp, Cannabis sativa
tgttgttggtattcataaattatcttacgttaaagttacttgtttaagttaaaaattgttgactgtatccatatatatctctgcaggaaattttaaccatgaaaagtggtgctgttcaaaattcaccagaagaaaagcctcaacgcgaaccaggtccatggtctccggtatgactctactcagacctttaagctataacaaaagaaataaataaaactaaaatattaggaagataggctgtcaggattatagttttgttataagaacttgatccttagaataatgttttaaagaaataattggtaaggccttctttttcttttcaagtcattatacaccttggtttagttttgattattctttgtaaaaacagggaataatatatcttaaaatggtagctggctgagcctataagagatataatcttaccttatagtcgtatgagtatgtgactaaggagaaaattatagttgatatttaacatctgggaaaaaagccattgattaaaaaatcatttgtgattatcatttacatatttattgatatattttatgtataattatgtattttattcaacaggtcaagcggaaacagaatcaagaaattggaccttacgattgtacaaaatataccaacacgaattcttaactcagactcaggtttttctgattgtttttttttaattgctaaccttgattgttttttttttttggcccttaggccttgagcttcttgaatattttagggtcttatgaatatgatcctaactaattttgggcaaatgcaaattatataattgtccccacataccttttttttagtgtaaacgtagtattgttttcatagactaactgttacccttaacaataataataatttattgactttggtctactttgactgggattcatttcatggcccatagggttaaatactggttttgcaatcaaggtttaatttggcttttctgtcttgatttgatagtggcatttatttttttagcaatcaatttttgattttcttcactatctaaaacttggtaatttgtcaaggcgaatgaggtggcatcttaatttaataatattaaattgtactaaatcatttcataacttttatgaacttaatggaaaataaaatatctgaaatgtggacaaatgtatacacaacacagagtgagtctaaatcttcagtccacatttctttttggtcaagtggaaatttcaaaggcctattccaaatggtccatattttcctttgctttgtggaaatttcttttagtccttttggcctatacccatatttgtttttcaaaatggtttaaacttcattcaaaggtagcaattgtagccacattgcattcattcaaatgtgtcactttataattggtaatcagtttccatattatttattttatttgtataggacttgatattaaaatgtaccaatagcagtataccacgttagtacttgaggtgtctcttagctttttgcctttctcttttttttttttttggattagatgtggagaagatttggtatttcaaccaggactgaacatttcaagcgggttcgacctgaaccagagtaacccgctcgaactcaaaccggtgaacctgcaaaaaaaaaatgttcggacgggttgggt

SEQ ID NO: 43352 - DNA, 3555 bp, Cannabis sativa
agatgtcattggcgagtaagtttccttttgattccactggtctcctctcaataagacagcagtgtatgcacctttgcattaagcatgtgaaaattaattctaatattgacgttgggatttatttattatttcctatgattccattggtctcctttcaataagacagttaagtggcgttgacaccagctcgttgcaaacaaggaaggggcactgaccaccctatccggatctgcatagctccattagtgacaagagacatttggtaagtaaatgcaagcgttgtgctgcattgaataataataattgcataaatcccatgtgacatatcaaacaagttgcaattttgtttctgatttaatttatagttttcttttacggtagttgaaagaattactttcactcatgtaataaatggttcaccaaaaacaaaaaaggcagagacatagagagcgtcaaatgggcaaaatgagtcttttaaatttactgtgaatatacaagtatatcctatcatttacaagtgtatgtgaacatatatttcatctaggctatcaaaattttggatgcccatggtggactatatacatataatgatcttctatgcttagttgttgaggatgttgagaagggaaactctggttttgattaaacgtctgaacagggattctagcatttgttcaaagtcttgaacgcacatctcgagatttttcagctctagcatagcttggccagctttgtttgtctcctgacttaaaagggcagcgtccacctttgcgaattcatttacaacatcttcatcgccagcaactctcttgctttgcacgagtttggaaactagagaccagccactgagcttagactgtctttggtccagaaataaaagacaacaaagactctagcgcggcaagagtgacagcctccacctctctcataacactaaccaaagcagaaatttcactacttttggtggcgttaaaggctaagtcttttgattcaacacctttcaaacttttcaaggccttttggattgcctttttcaccactttccttgaggctgagtatttcttaatctcactctcaagactaacttttctacgcatggttgattgaatatctcgcgcgcattcctttgtgtgcaagacagcatctttggctgtactgcacaagtccaagagtctaagggatccatccactaattcgtcaacccatttctcttggcggccttgagaaaaggcttgtcgcgtgaggggtagctgaagcaacttctcaacacaaatgtgcaaatcctcaagaccactaagttggcgagcaatggaagatgatgatgaagttgcatgagaagcccctaatattagcaaatggttattgcactcttcaataacagggtgtgatttagatggcaagctgtttgagcggacatggaagttggatcttaaggcagccatttttttcctttctcaagagattttgagctaaagttttgaatgtgataagttgttgcaaatttttctatgctttctttgccatctactctatatgtatttatattaaaatcattaggtgaggaagacgtgaagcatcttctaaatcaacacatgatattgagatttggatatatacagtgtagcgatgtttgtgccgtgctccctgcccacccatttctccaactcattctcttaattatatattaacatgtataatatcttagagaatcttttttaatgaatactactttttgatatgttatatgcaaagcatacgagtcacgtatgacacattttttaataatagttcaagacaagtgccattatatttatcttgattattaattatgtttcattgtatgataattttaaagtaaatacagctcttattgttggagcgctgctcatgcattcatttacatagagattttattaagtgtagtattattattagcaagggaagtaaatttacagccaatactataattatcctagagatcggaaacttataattatgcaaaatataagtgaaagatcttcaatatcatctgtaagagatattttccactttaactgaattgggtgatgttattagagttagtcccacattattaatatatgaaaataaattgtcatatataacataaatactctttcattgtcaattggttttgagatagaatttcctgtatcatatgtaaactatatttttgtaataaaaattcttattttttgacaaaatctttcagtaaaaaaatcataaattgtaaagtataccatatgtaaagtatgtcttataaattgatttttaaagatcattcttgttttattttattttatttttcacattaaaatcataaacacgttgaatttagaactagattacggctaattatcataaggcgtttctgctaggaattgtatagtaatagtatgtttagaagaaataataagatgactgaaaaatatataggccaaaagagtatttgattttgtatctaatttatgtacaagtgtatatgaaaagatggttcccagacttttctactgctatatgaattttcatattcctaagtttctacctaagtactattgtgtttaaactgcgctagctagtggttgaggatgttgagcacagaaactctagttttgatcaaacgtctgtaaaggttctcaactccttgttcaagatcttggatgcaagactccactgattggagctcattttgtgcattgatctcttcaaccttgttatctgttttctttgtcttcttactgatgaggttggccaaggcaccatttgcgcttgtgaattcgttacattctttgactccctcacaagctactcttctggagttcatcaccttggaaactaatgaccagctgtttgattttgatgactttgattcagagacgaaagacaccattgattcaaaaacgctgaaggtgatcaactcgacctctctcaatatgctaacaatttcaggagtatcttgttccttcttaactgatgaagtactgaatttggatttgttttccatggccttggagagtgccttcttcatcatctttctacagctcaagaatttcttaacctcacttgagagactgatttcaccgccatgttttcttcgcatagctgattgaagttcttgagttgattccttcatttgcaacaaggcatccttggctgtgttgcaaagatccaagagtctaagagatccatccaaaacaacatcaacctttttctgattctgttctttggagagcgcttgttgattaagaggcaaggaaagcaacttatcaagacaatcatggagatcttgaagtccatttaggttggaggagacatatgaggatgaggaagaagtggcttctgaagaccttagtctgcacagcaaggcatcaaattcagggatgatagggtgttgcctcgagggaaagctattagagcgaacgtggtaagctgccattttttttttctagcaaaatgtatttgtattgaattgaatgttgtgtgattgttttcctactttgccatctaccatccctctatatatactcataaatatat

SEQ ID NO: 43353 - DNA, 5417 bp, Cannabis sativa
tcatttaacaaaatacagggtctaatctgtaacttttgcaaaacacagtgtctaaaatggtatttaccctaaatataataatccaactaacacatttggctggcctttacttcaataccaattaatcacatttacattattacatagtaatactatttagtattattgctattaaatcaaacaaggaaaaaaacttttaattaatgttctaaacaatcattttcttgttagtattttgtgccaattttttcaataaaatacctatcataaataaaaccctaaaaattatgctaaatgttgttcttttcttcccaaaaagtcattcttgcatttatcatataaacaaacattttcttaaataaaaataaatatgaattaattacaaatgtcaaaagtggtccataaataaataaagaaataaataatatgaaaacaaaatcaaaatcaaaattaaattaaattaataaataataataaatgtgagtatgggtcggtttctctcaaactattcaattctccatatactcttcttcttcaaagtttcatattagataaaattccataccaagattgtgttgtagtgtcagattcaagtaatcttttttatgcagtcaactccattaaaatcgtgaaaagagtcgaactttactcgaaattacatgttttttcacttgtaagtatcttattttatcccaaacttgtatgcttttgtattctttattgttgttcatttctgggtatttgtatattcgttatgaaatttgacttattagaccttcgaaagactggttttttagtagatcccagattacccatttgttaggtagagtgaaaaagctttgaatttggatctggggtgttgggatttaagaccctattactgttgaatctttcaaatttaagaatttaatcttttttgtactcattttattggatgagaagacttttttttttcctctatggaaagattgtgactttggtatatgaatcttgagttgatgtttcttaattgtttgttttcttgttgtatcagattatctcaagactctccttttttcaattttgaggaacttatgttatcagagatctggtgtattgccctttgctgggtttctttcaagaaatagtttttgagtgtatggagtgtaattcattggtaggaatccgatctcaacttgaagtaagttgtatcttcattttctttttgatattttagaacataacaaaacttaacataacatagtcttgcaacttattttgggttgacattgtgttttagtttatgaattttttcatttagttccatcaatgattttgggaaaactttagtgtaattctatagtacatcccctaaaaatggttgtttcggtatatccctatctgttttggcatccaggaaaactttgttaagcaactatttgtagggagtgtaccgaaatggcagggtgtactatagattttttttttaaaacttttatttgctataagtaaaaattcatgattatatggatgaggaagtaagttgcttcttcattttcattttaatactttagaacataacatagtcttgcaacccttttttggttgacattgtcttttagtttatgaattttttcatttagttttatcaatgattgggaaactttatggtaattctatagtattttcggtacacctcttatatttttgggtatccaggaaaactttttagtccattttttcaactatttttaggaagtgtactatagattttttcgaaactttatatgcttagtaaacttcattttcattttcatactttacaacataacataaaagtcttgcagccctttttgggtttgacaatttcttttagtttttgaatttttttcatttagttccatcaatgattttgtgaaattttagtcccttttttttttcttatacacgttaagaaattgtttttagggagttatcaaaacgggcttttacggggtgtactatagattttttcgaaacttaacatgcttagtaaaaattcatgattatatggatgaggaagagccatttgaatatgactttaaatgctgttctagatgggttcattggaaaacggatcagcaaatgattttgaagatgagactattttcagtcaagaaaatgtatctcagaagcctcattcatctctagcagcagaacaaatgttgcgtcttggatgttctcaagctcattttgttaagaaaatcttcgggaatgctgtatataggagcgtaaagattgtaattttttcaaataagttgaatttgctaatgctttttgggcctttagcgattctcgtcaataagtttaccgaccatggagtgagttcaacctctccctttaagcattactgcaattcaaatacctgttctttttatatgattatatttttctaattttcttgtggaaatatcagggttgggtttttttcctaagcttgttgggtattacacctttggccgagcgtttagggtatgctacagagtaagtacctctctttcgttttcttttaattatgtcttaagaatttgcactgtcaagttaagtagttcgtttcattgatacactttttcttgtcataggcagttggcattttacaccggagctactggtaacgttcttgtaacaatattatttattaagtctccacttttctgcaccagtttcggttgtttgatcttcaataaatagtagtctttgcaaaagtttacctttttatgtccccgtgcgttttgatgcatcaacttcagacatttaagaaagcaaataaaagtaaatgaccggaaactacgaacagtagtaattgattattttgaggacggatagtatataaggaaaatttatctagttttatgtcttttgggcattctagttagtatataaccttgttgacattatcgaatctggacttgcagttgggggtcttttaaatgctactttcggaaatgcaacagaactaattatatcgatctatgctctgaaaaatggaatgactcgtgttgttcagcagtcattgttaggctcaatcctatcaaacatgttgctggtgctcggttgtgcattcttttgcggtggccttgcttttcatgggaaggagcaattgtttaacaaggttgatacttgatatatctgtttcttcttttgggattgtcagctttgtcccccgaaaaactattatcattctgatttaagttggtatgtgcataataggcaactgctgtggtgaactcgggattgcttttgatggcagtcatgggccttctttttccggctgttttgcactacacacattctgaggttcatttcgggaagtcagagatggcactttcaagatttagcagtgtcatcatgcttctggcatatgctgcatacctttttttccaattaaagagtcaaaggaatcaatatgtacctatcgaggaggttgttaacgattataccgcttctgtatttttggttctttatatctaaagctttgaaatttatgtttctgattatgaaattgaatattttctgtgaactcaggaagggaatcagactggagagagcccagatgatgatgagactcctgagatatctaaatgggaatcaataatttggctttccattatgactgcttggatctcaatcttatctgaatatttagtcaatgctatagaggtattgccttttggctcctgattgcttcgcttaatctggtttaataatttcttgttcggtaatgaattagaagaccatcttctcgctctttgcagcgccaaaagaaaaaggctcgctttgaatattatacaaaatattagattggcatatatggacacttgttttcggtgttttgctattacagaatgttcaaacccttcttgaaggagccgttaacagatctgtgagttgtaaaactgtttgtgtagggggcgtccgtcgctttgaaaattcctattgcatttatcagtgtcattttgctaccgattgtgggcaatgctgccgagcatgctagtgctataatgtttgccatgaaggacaagcttgtgagttcgaacgtttctactcacttttgtcttcaaaggttttttttttcctatcatgaccgactgttaatcacatcaatcaatcttctcttcaggacatatctttggcagttgcaataggctcttcaactcagatagccatgtttggggtatgtacacaactttgatcgaagcattatattttcccgaagttttgtttgtttatttatttttgttgtcaatgcagattccattttctgtaattgttggatggattatggggcgtccgatggacttaaactttcaacttttcgagactgcaacattatttataaccgttttagttgtcgccttcttgctgcaggtttgtttccattttagtcgaaaaatgtaccctgttgaactgatttaccattcaaagtgagtggatccaatcttaatccaattgtgtttttgttttgttgtaggaagggacctctaactaccttaaaggattaatgctaatcctttgttatctaattgttgctgcaagtttttttgtacatgtagatcctacttcagacggttagttttcgaacaacttcagcttggttactttcgatttcttcttcgttttataattctttgttcgggatttgattgtgtagatgattcacaattgaaaacgtagtcgataggcctgtgctgatcgaggtgaaagttattatagatgacaatataaaaagaagaacaaaaaccgaagggcggtattgacacacaattcgggatcatcttttctttctattgtgtatatattttctccattgtttttttcttctgctttgtgccttgttcaggtatgttgcagagctctttgttttttctttgctttgattggatgttaaaatttccacttttgactcagaagaagctgagttatgtatatttttacaggagaatgcaaatcttgtcattttcataataatgcaattttagttaaaaatgtcttctattttttcttcattatgctgcaacaatctcatcaatggccattaacttggaaccttaatttcatttatgtaccataaacaaaatgggcaccatttgtaattaatactcataagaaaatagagaaaaagaaatcaaaaatgagaaaacaacattaattatgaggcattattattacgagtattcttattaagcaccaatggtacatattatatagtactacctaaaactaattctataatcggttagcaatattttataaaaattattatattgaattatatagaaatttccttgaatttgttggtcagatgccattacgttcaagactattggaggcattttggtgttccttcgataggggtggatgagatgaccttcgtggcttttgaactttggtcgtaggtt

SEQ ID NO: 43354 - DNA, 2368 bp, Cannabis sativa
aaatatttcagtacatgggaaagactggtactacttgcaaggaagaagacgcaggtacagaaaacgacaccaatgatgacacaaacgacaactcaaaaaactgcagatttcttccaatcaacaacgacactactacttcatcattattcttgaagcttccaagcctggagagcccaaattctagccaaaacggttatcaccaacccatcaataataataataacaatggcgacattattagtccaaattttgggtttatgaataatcatcatcagatgatgttggactcgaatctaatgatcatatccaactgggcaactcttgatcggctagtggcttgccagttaaatggtcagactgatcaggcttccatggattattgtactgataataatcagaatcatcatcatcatatgcaagtacctccagtgaccactaccaccgtccgatcatcttcatcaagtaataagccccaagctgaatacaacaacgaaattgggctatggagtagtacttttgccaagtcatcatcatcatcattgttgccgtccgaaccaatatgccacgtgtccaatgcttcattataacataacaaacccaactaataattaataatgagaagaattatatattttataattttattttatatatatattatgtgtcatgtagttgttcgaagtcatatagagaaacataattaccaggcagttatatatgtgtaacgatcgcaattaatattaattacatttacatggtgtttagaattaaacaactaatttataataataaaaaaaagcaggtgataattaagaaagaaagctttagatgggatggcattgtcaaccaaatttattattattatttttttctccggttaatcacgatgtctaccattattttttttccatctagaagatctagtaagttaattattatggccagggtactggaaatcataacatctttctcttactaaaataataattttaattatactttattgatattttgtaattattctaatatatttcatataatcagatcagttgatattaggaacaataataatagtaataatcaattatatatctttccgccatgtggcttgtctgttaatttgtttaaggatagtacagagaccatgtatggttagctctctaatcctattggtccacaaaaagaggcactgtataaatatatatacatatttatatatatacgtttagggctgatgtaatgtcattatcgaatataggtctccttaattatatgaatcaatacacagcaatattaattcagaataaaatcccgattatgttaattaatttttgtttattataacttttacatgttatatgtatttatatatatctatgataaccagccgcaggtgacttaccctacttcaaaacaagtcaaaagagaatcaaggagacttttttattttcagtttttatagaaaaagaaaaaaaatgatcttaatagtctactcatcagcgaagggaaaagcatttgcgcactcgctaagttgaccagatggacgagaagtgccagtacgtatagtacttgaatggttcacatataaattaaagcctctcaatattatctttttacgtatatatatattatttattaattgacaaaatattttttctgtcaccttttttttttttgtcttttggaggggtatactagtgagcagtagaaaaatatcttcttttgattcacatgcattgtactatattataagagataattgtagatgacaagtttggtacatatatatatactggacatagtccacaccaatcggtcaaatcactttattgtagtctatataatatgacagaaaattatacgtaagcaacagttataaaagaaaaatgagtatgtatatataatcattacttcgttatcgtgctttatctggattgattttcttcctctaccagctgtatatatatatgtgttgagtttattaccgaattattttcagaaaagtttagttatactttccttgtttaatgatcatcctttagatcgtcagtaagcaataatatcaaaattaatagccgatactaaggatataaataacagtataagtatccaattttaagttttaagttttaagtttgtaagctgtataaacacaatatttataaaactgtaagttttttctaattcgttaatacagattctgttttgaatttattaaaaaaatatttagtcggggtgttcataaaatagccggtccaatccaatctacacgattcaatctaatccaactcgagtgcagatacatgcacttgtgtagattagattgaattgaaaaattttaaagccgcacttgtgcggattggatgtt

SEQ ID NO: 43355 - DNA, 2612 bp, Cannabis sativa
gacatttgcaaaaacacggtttttcatataattttttactagcaacaagtccttaggatagtttgaaacgtagattcttttggtgactcaaatatataatttacgtatgaaaattgtttcttagagatatacattacttccattaaaataaaataatttgataaaaatgaaagtgctaaatatgaacattgtatacacatgtccattaataccgatcgatatctaactttaaagctacttagttaacgaatgagccaaatgagaattagtaaaaataacataaaaaggaaataatttgaacaacatgatttcctaattctcaataattattgcatataaattatgtgtcattttttcaaaccgacattaatttaaataataataataacatttataaattataattaattacaaagaaataattttaaaaaattattatgtaaaataaaaataaaaatacataatagtaaatgttgatatagcatctttcgtgatccggcgtttagttatgatatagtcactcgagattcttacagaaaattagtaatgtctaaattaggtagttttgtatagacgcttagaatttagtgtacaagctattcaaaatttattatctatatattttcttcttttggagtttttataaaagattgtcgtaaatttcttgcattcttaaacaatatgtttttttatttttatttttcattaaatgatttgctaaatcttgttagaacttagagcatcttgtttttttttttctaaatcgagtatttaacaggaatgtttttccttgttaaagtataattttatcttttgtctgattaaacaaattaattaaagttctatatttactttaaaaagaaaaatcaaagtctaagacctatcatatcttttattatttattttagtatttcgtgtattggaggtaaaacaacccaaaacaataattctaagatacatctatattgaaatttgataattctacgaaaccactatagaaaacttttttccaacaattttaacaagaacccaattaagaattggagcttatatatacatatcacacacaatattaaacatttaacacaaaaacaaataatgggttcactcatgatgacctcaccaaagtttggcataaacaatgagtcaaagcctaaaaagcaattaagaactgggtcagtttctaaagaagagccaatgaaagtttttagtgggaggaaatggagtgtttgggacatgggcactgctggtgttattttgggtttgcatttgcttagtctttatgggcccttttattgtaattgggctgcgttttgggttgcattcacactttacatcattacaggcctttttggtattactctctcttttcataggaatctctctcaccatagttttaaactccccaaatggcttgagtatttttttgcttattgtggaactcaagctcttcaggtatgtagtactagaacttcaattacttctcttattattatgaataatttttgaggaaaaatattaagactggatttatttattttatttatatttttgagtagggacatccaattaattgggtgaggacacataggtaccatcatcagtttgttgattctgagagagacccacatagcccaattgaaggtttctggtatagtcacattggttggctatttgattccaacactgcatatcaaaaggtatgtaattttctttgttaaactgttagatacacaaaatcgctaattaattaatttgaacataaaatttgatatgcagagtgggagtccaaacattgttttggatttagaaaatcaaagattctataagttccttcaaaatacttacattcttcacccaattgcacttggagttgtgctatatgcacttggagggtttcctttcgtggtttggggaatggtaggaattaataatctcaaattacttttatggtaatttaattattagattttgaaactatatatgtacatataaaagtgtttaaaagtgagagactaataattaaggtggtgcagggtgtgagggtggtatgtaattaccatgtgacttggctggttaattctgcttgccatgtttggggcaaccaagcatggaacaccggtgatttgtctagaaacaattggtaagctcttcaacttgaccaaataatattttttttagaaattaaacaacttttacttaattttttttttggtaattaatattaattgattgatgatattcaggtgggtagcattgttagcttttggagaaggttggcacaacaatcaccatgctttcgagtactcagcaaggcatgggttagagtggtggcaaattgacaccacttggtatgtggtgaaacttcttcataccattggattggctactaagctcaaactacctaccaaatctcacaagcaaagattaatgcatgctccaacaaaataattatattttatatgtatagaacttaaaatattttcagaattattataatcctctaattaactattatatttaaaagttatttgtggcctagtgatatttaagaataattagaaacagaataataataatactcaatgaaaatacttgtcaattccttatat

SEQ ID NO: 43356 - DNA, 5798 bp, Cannabis sativa
  modified_base (1695)..(1697): a, c, t, g, unknown or other
aatgattggtcttgtttgtacgatttaaagggtacataattatattgtttggacatcctaaaaatcttagctttactcagctcaattataaaagagtagagatatataggacccaatagaggtgagatgagcacacacacattctataccatagcttttagataagacgtatttattataatggaataagggatagggagggaatatatattaataatattatattatgttatgattttgttatgttattgttcatggattgtaattcgtgatgtacggcagccgtaagatgggagagttatttaatctgacgactgagattgatctaggggcaattagggttaaaaaatagaaactgatactcatttaatgtaacctgagactcatttaatgtaccacagaatacattccgtgaaagtagaagaaatgtttagaagtgtagtgatgagaaagcaattaaaactggcccagattggacccatttgaggatgtctgtttgaaaatggcttattattaagagtaagggttcatgtgctattctgataccattgcacatgcaaaagcattgcattcatgttcctctccctattcgcctctctgtaaaagcccacatatttagatacataacatgtataaatatcaaaagatgataaaataaaaagaaaattaaaaaaagagaggctgacaatttaaaataattcacattcgatttaggacactctatttaattggacaataaatattataccagatagatatatgtgtatttcttttcatttaattttgataatttatagtgttcatgtgctgatgtgcgagacaccactaactactatcctttctaaatttgatctcttaatttaattacatggcttaatttctacaaatgaatcgtttcaagtttatgatgagttgagcattaatacagacttccatttttaatgctttatatctttcccttaattttgagtggcgacattttgttaggggttttcattattaaaaaatatttatacatatattataattatttttactaaatttatttaattttgtgagaatttttctattattttgatctataattttcaaatttaaaaaaaattaaatttaactttttaaaatgcaatatttttgtatagtcccacattaatcgttttgttctatattgactatcttttctatttcccattttgctaggtggattagatttaacatatatgttttcatatgtaaaattttatgttatctattttaccgtaatttttttacactatactatttatcattttttttttatattttatctttaatattaatatgtacaaaaatactcatacataacaaataatttaaaattaataacataacaaaataagtttagaccaataattaatgttgcttcacatgtagagtagctcttaaaatttatgtaaaataaatatgctatattaataataataaatttgtatcattagttctctattttttaaaaaataacaagtttaagaaaatttatgggcgtgctctaaagaagtatggaaggtacatttggcctttagcccgtgtagtttagcatacgtacattttttttagggtttttttatttttaaattttaaaataatttttttttttgcacttttacagaattttacataaaaattcctattacaactagcgctgcaacttaaatnnnaacaaaaaatcgtacagaaatccttagaaaccgtaaatttgaaaaaaaaaattaaaaaaaatagtataatatggggtaattcttccattttttttttactgttatgatattataagaaattagaattttattattcaaatcattttttttttaatttttataggcaattacaatttagtacaatacatgcaaagttgaaaccatatctgtaaaaaaaaaaaaaaaaaccatatcattataacattaattggaatattacataagtaccaatttttctaatatgttttttatttttttatatatattataacaaatatataatatatatatgtgtactattttattttgtagaaataatttaatagactgactttatgattattatacatgatattaaaacttaataagatttttttattttgtattgttaaagttttattaataagtttgtttttttaatttttattataatgtttgataattatgatagtgtaaatcgctcaaattgtatcgcaccacaccgcattttcgcggtgaagttttcacagttttaaaatctacaattgcggtttaaaaaattataaacaccacttatgcagtttgatttaaaaaaatagttacaactcgcaccacccgcagtgtgaacacttctaataaaaagtaatcatcaagggtataatcttccaaacctaaatatatatatgtcttacaaatgttcattacagaagaattctttttattgtaagataaatcagtttgaacgtatctttctttttaattttgaatattcatttcataattgtatagatagtaaattttataatttaatattatcatcatattgtgagaaaacactctctgatcacttcttaattagtacgttttaactcgacagtagttaattagtgtggaatattccattggtggaaaagaggttagaaaaacaaagatattgtgtgtgagtgcgtttggagtgttgttgagcctgtaaacgttccttgaatgtaggcttgatttgagctgaaccaaccaagtacacttctcagtactcacctctcttctaactgatgctgcatttgtgctttgtttgatcaagtgttatttttcattaaaaaaaatattgtgtcttcgattgctgcactaataatagtggggaaacactctccaaataattctcaacctaaatattttaatttaatccacattccaaaaaaaaaaaatatgaaaatagattacaagagtaacaatgtgtacacacacaaattataatgaaaaatgttttctaaaatatatatttttgagtattagaaacaaaaaagatatcgatgaatatcacccaaatttaactttttttttaacttttttttttttatttatttaagcttttatatatatataatttaatactcgaactcaaaatttccaatagaaacgtcaactgaatatatcatttcgacatctccatacccaaaataaatttaacagtttggatcatttcttggccatagttatcccggaattttcggattggcagtaagtcccatcattactcgtggggccctgggcccttcccattgcagtaggcctattaggggcagatcaccatttataatgggcctaaatgtagttcggtccatggccctaaaattaaagcagagagccttgatgtgaaagctggtaaaggcccagacaagagtccacaatggtatattatattgtatatcaactttattttatttattttaatttttacttttatttctatattttttttaagatatattcacttttatagatgatatccttattatactttttatattaatataaattatgtgctagatttaagtggagagtataagtatattaagcaatctatttaaaaaaaaatgagtatattttaatgaaatattaatatgaaagtatttttgattaataaatatgaaaaaaaaaagtatttctcaacttatccgaaccggagtgaaggattgagaaatgctggtgtttagtttttccctttgttagaaatacaaacaaggcagatcatcccatactaattgacaagtttgctttattcttggtatgggtctattcaacactgtgcttaatcatggcataattgtcttactagttgtaacttgtaaatttgtaatactgtttctttgtaataaaataagagggaaaaaaaaggagcagatgaataccagagtttacgttgtttagtaattaattaaataatgtaaggccattatagtaagtaagccataacccggaagaaacaaaaaattacactacatatatattttttttaaattaatgcatttaatttttactttctcttttaaaatctattatatttatttttttttaatcattttactaattttacacttatcatttcacgataatttccattcctatctaaccaaaattttactcaaactttccataaatctacacattcatctccaaaaaacacaatttattatgtttgaaatgtgttttgattatgggagagtgtaagagtaatttgagtacaatactcattaaaaaaaatatttgaattcaattttatttgaatgtaaatttaggtaatgtataaaaaaaaacattatttaacttctcccgaataaaaaagtgtgacgaattggatttctcaagaaaaaacatgtctccttatttatttcataacttatatgatagttttcgaattctacattttttaaaaatagtaaagaatatttgaagtaaatgactattttgaacagaaaataattatttagcatcatctatgaaaatacctttatgctgtaagggattttcttttttttttttgataagaagacataaggggatttatttaagcataaagctcaaatttaccccacatatattatatatctatatttcaatcaaaagtatgcatcatattctactataaaaagcacagtttatttactcattcaacttcatcataaatataatgctttaatttcatacctatatatattggatcattcccaactttgcttttgtaaatgctttgctaggatttacaaagcaattaagagattaatatttggctaaccaaataatataatttctaaggtaaaaatcaatcataataataataataacaataatagaatagtagtagctataagtgctataattcttgatatggttaattatcaacccaatgttgaaaagtaagggactttagtaaagttgagccactcaagtccttgtataaaagcaccaacagtgaacttactagcctcaaccgaactattaatgacccgataacccggccacgtcacccttgctgacgtattcgaaccgggcccacgattcatatactctccataatacaacgtactcaacgcaaacgtgccattccactccaaccaaccaacgggctccacagactcatcaatatacgatttcattataacagtccttgaatactccttccacggacggcccagatacgttttgaaattcgatcggacgggcaccaggtctgcagccgcagctagtttacaattaaggattgaaattcccgtgttttggtttgggtcttcacggccttgggcggtgaacatgttgcgttggttctcgtttggcttgcgcgcgtaaaggttgcagttttggaagaccacagcggcgttgccgaagacgaagtctacggtcccgtaaatatcgcattcgcggtagaattggcggagtgagtgggcgtagagtgtgtcttggtaacccacgaagctgcaaaggtagaaggctgagaggtcagagccactccttagggctacggcttggtgtttgcttggtccggctgagttttcgaaggttatgcctttggcaatgaatccacttcccaccacagctgtaaaataagtaatgattttagaagtattctattcttactgtttatttacatgtacttaaaaaaaagaagatatctttctttggattatatggtaatattaaagacaaaatattcaagtgatcagtatcaagacaatatgggagttcatcaattggatataactgccagttgttcagattgggatgtagccaaaaataaaggagaaacattaa

SEQ ID NO: 43357 - DNA, 3497 bp, Cannabis sativa
gttattttcatatttttgataaggttctataattgttttatagttgccttagttgtttattttattttattgaaatacaatatttttgagaacttagtgcagtaaaaatataaaaaaaataaataaaagtatgacatatgtaaaaataacaaaaaaaaaagatgaatatttttgtaagaactcctataaaatttattaggtccatttaaaaagaaaattttatatttttaaaaatactaaaaatatgtgcattttgacatttctttttggcccttggcacaagtgtgccttggcccatgcatgatcatactctgtgttgactaaatttttagtaaatcaacgcagaatcgtaataaatgagaaattattcaaaatcgtaataaatgctaataaagaacaccataaattaaagagattcaacctcagttgtcggtgaaagcctacttcccttgtattttattaatcagagttgcaaagtcaagaataaactcttgaatgcaaggaataaaaatgtcaaagttcttgcactctaagtattgatttttggatccccttcccaggtcatgtattaccccttatataagggaaggatcggtgtttctcacttcaggagacatgaccattgtagaaatatcttaaccgtgttcttgctttttagagggggttaaaatctgattctatattttcgtgggtttataactattattgagttttttgtagaatttgaaatgttgaatgagttggttacgatgagagtacctaatgggatgtgacccaaccgtttaaccctctaagggggatcgtactcatctttcggcggtaccccagagatcttatcctttgcttcttatattgtgtttaataattaacagtatgtagccttgataatggaagacgtattgtattaatcatgtcatatgtagctagagtgggatacctagctcataggagtgtaagaggtaaagggtatacctgaccaatacttagctcataggagtgtaggagataaaggatatatccgaccaatccatcactctcatgtagttaagttaccttcgaagtagaggtagcaatgtgtacccctagactaattcaccttcggaagtgtgtggatattttaactcgttgtgagaataattattcaccttctccgatgttaaccaccttacctatgctaggaaggaggggtaactgtcaaacttcctatcttaccgttatgactatcgattgtgactaacgactgtaatttatagttatgactttacatatttttcattaatttaactttaatattttcatgccacatcatcatctctgtcacatcaccactttgagtaaacatttatgccatatattaataccaaacataaattaacttctaactccaaagtaaaaaataaatagtagacattgttgttgcaaaggccacttcaactgaaaactaacccaaaaaaaaacatgtctcgatttgtagtctttcactagaaaatgtgcatggtttagcattaacaaatgtctcgatttattgttccagggggccacttcaactgacaattgtagcttttcaccattaacaacgaaagaacaacaaattataaattattaataaaatcaaattaaactattattatattaaaaaagaagaaagtaagaaactgtttttcattattaactaacaaaaaaaaacaaaaaaaatcctaaaacacaaaattccctttttacccctaactaatagctaattcccctcatggagttaaatctcgaaatggggaattcagtaaaattaagctcgtgcaatactagcacgcgttggtcttccgtttcgttgcactacttatagaagctgaatttccacgtggtctcttcgtagccgttggattaatattgtagtcaaaccccattccatctccaccgaccatttctgcgaacatcttctggagatcctcaaagctatcgccctatatacaaagatagttttccccaataaataaaaattaatcgtgtaacaccgcacgataaaattacatttttgtcctcagagcagaaaaaataaaaataaatatataaaaattattctctttctaaaaacaacataaaaatgtgtacctcgtctttcacattattcatcattgagatcatctcttgcatgaaatcacaaaagtcctgtatataatgatgaggtataatgacacgtcagcctttataaaaattattgaaaaaaaaaaaactaatcgaacgataaggaactgaagaagtgaaactgtaaaaaatgagaatctacaatttactgttatcagcattgacgacgtcgttttagcgtatacaaaattgcgttaaaacgacgtcgtttttaactatttaattcttaaaatttgtgaaaaaggaaaataaaggagagagtacggacttcatcttcgtccttgaaaggatcgtaaagcccagcgtcgtacattgatctcttggcttggtcggagagaactgcaaaaaccggcgaaagaaaaggcaatggcggcgtcaattaatattaaagacgaaaattcttcataattatggaaaagagaaaagaaaagagtgaggtagtgaattctgttcttaccagaataagcttcttggatttgttgaaaccgtcgtttagcttctccggcaacgctcggtttctgagtccatctatccggatgccacttcttcacgaatcaaaacagaggaaaaaaaaaaaaaaaacttcgttaattataaagaaagaaagaaaactaaaacgacggcgttttgaagataaatttaccaaagcaagtttccggtaagccgtacggatatcagaatgggaagcatctttactaattccaagaacggtatagtagcaagatccaccgttggatacgccatcccgatccatgatcaaacgatcaaaattaattacacgtaatcaaacaaggctctccaaaaaacaaacttcgaatttgatcagaccatatggaaaacccaaaaaaatatcagagagagaaagaaagagagaatgaatggaataaataaggagagagagaaaagttgggtagagagagaaaaaatatctaagggggttttaaggagggtggcgggtgagagaagatatgtgaaaagaaagttccagacatttcatctttttctacgtttgaagaagagagtgtgtgtgtgttgttttttcggtttttttttttcttattgggatttagatttagatattttcttttgcttattattaattcaccattgagttttaaaaaattacgattacttgccattattttttttttattattttagttttatatatgatattcctttggtgtggtggtggttatttgttttgttccatttttttttttgctattaaatttcttaatatagtaattatttatattttagtagattctagaaatatatatatatatatgagatgaggattgagtgttggattaaaatcctcaatatgggctcatatgtatattagtgtattgcta

SEQ ID NO: 43358 - DNA, 4954 bp, Cannabis sativa
atatatatatacatatatatttgattgaacatatcaacccaaataaacgcaaaatttccgatggacaaaccaaatttaaaatcaatttgctctgcaatatatataacaaatttaataatgctactaattaaatagagagacaaatctccatttccaaggatatatataaattttataatattttcaaaactttctcactgttgggactctctacatattataaattataaatatatacatacgaacaacatgtatgaggtttggatgatgtattctttgatattcttatttgtataaaaacaagaaattgattagagtcatataacgtcagttttagtaatttatgtttaaagtgttacagtgtctgttttacacagcatgtctaacgcgtgatttgaaacgaaacgcttaagtgggaaaataataataataaatcacccttatctcatgtccagtggtagtgagggttgactttcaaaggtttgaccaaggagctgattggctgagtttgtgaaaagggtgttcaatgtgcttatgatggacgtgagcccatatagtaattatcccatctcagaataatgccaaattagtgagaggggcaaaaaaatcatgactcactaagactaattccaacttcgaaacgcatatatatatatgtatgtatatgtacgtgtatatatatgtatataagatatatatatatgtgtgtggacaagtgaaggtagaaaaaagttaagaaagaaaagatagaagaagaaaatatgccagaatccggagtagtagcagcaccattgaaggcacactttgttttggtccatggtataagtggagggagttggtgttggtacaaaatccggtgcctaatggaaaattccggctataaagtctcctgtattgacctcaaatccgccggtatagacaagtccgatgccgattccatcttcacttttgacgattacaatgagcccttattcaacttcatgtcaactttgccagaagatgagcaggtacatatatatatatagctcaatcctaatatattatatttataattagtttgttgtgacatctccattttattatatgattatatatattgtaatatgtatatatatatatatatataaatttcaggttatattggtgggacatagtgccggaggaattagtgtaacttgggcaactcataagtttgcaaagaaaattggtttggctgtgtatttagctgcaacgatgctcaaactggggttttgtactgatcaagatatcaaagatgtaaagcttttcttctttcattctttcttcaacttactctgttttttatgttgtttttgcttatcttgttgtttgatttgaattggtaagatcatagggtaatttggaattgtagagagattactaggtgcttatttcagaagaaatttaccagtcagggttgaatattgcttacccacttactcaaatatgtggaagagttattttttttcttttaaaaacaaaatagtttatcatattggaaaaaaaaagcatttcaagattttgttatggttaactatagatttatttatttatttgtttagatttaggctttttgtagctaagaggagagcactaatgaggagcattgttttttttaaaaaaataaataaaaatcacactaaacatagtgtcatccaattagtaaaatctcatggtggagttaaggtatttgggttttattatttttattaataagaagataattttaaaatctccatgaagaatggagatagatggattaggccttttggtcatttgaattgaattgacctctcttctttttttaaaaaaaaactaggcacataattaccaaaataattagttactttttaatttggtccccctttcttaatttattcaatcatcttttcaataattttttggcttccattgtcggcatgtttttgttatccaaatcaacacaaaagctttgtcttgtcaataagaaataactaagaccactttattattcatactcacatttactaggctcaccaagaaaaacagtgttttttcgctatgtgttgtaccttcaatcattgagagatgactactgttgagtcaacagtgtttatttaaagtataaattaacccaatgattcaaatatttctttatttatttcttggacatgaaaattctggctttctttcttttctttttaatatctttgtggtgaaaacagggcgcaccagatttatctgaatttggagatgtgtatgacttgggatttgggcttggaaatgataagcctccaactagtgcaattatcaagaaagagtttcaacgcaaaatttcataccacatgagccctcaagaggtaatttcactacatttataatttaatatagataagattccgtattaactgacacataaataaaaaaatatatatatattagaattgaaaaataattaatggttcatgtaaattatgtagattgcgtgacagccctcaattgtataattattgagcatggctcttttatttatcgtatgtcttttttattctttaaacaaattatcatcaaaaccccacaatgtcatttcattcattctgcaacactcttttactatgatttttaattatttttttctatatatataagtttctttttcatttttcttgtgttttatatttcaggattgcacgttagcttccatgcttcagagaccagggcccatcctagcaatacagtcggccaagttcactgagagtaatgacgtggacaaggtgccacgtgtctacatcaaaacactgcaggatagagtggtgaaaccagagcaacaagaagctatgatcaagagatggagaccgttggatgtgtatgctttggatagtgatcactgcccaaatttctcaaacccatttctactctttggcttgcttctcaaagctgcagcttccgttggatatattagctaattaagatctatttttatataatttatgaaacatgattaatctattataatgctttttttaattataataaataaaatttctattaatcaaattaagtgaattacaaatagaacaccccaccaaaacaattacatctcttttatattttttaagaataattctatcaagattagataattttttctccaatagaatctttagcctaatttttagattctctttaaagttactacctacacaacttgatgttatgcacttttttcagaaatacacaatttgtaattagctaaatatcataaaatgtacatgctaacacaacatagagactatcaaaaatgagtctttctggtctctttaaaccaagccaattccgaaaatcctcaaaagagttaggccaaagactcccaagtacactcttaatatgttgtaacactctccaagagtaaggacaattaaagaatatatgtttataagtctcaatgtctcactcacacaccagacacacacttgtggtaatagggatgtgtttcttcacaagattatcggttggtatgtaatgcttaccacataatgaatctatatttcgggttgaaagcttacaccaagttgctttcaagaactcataccgagatccatttatgagcttgttataaacctgtccaatcttaaaattgccattacaaccggcttgcaatatatcttcctgagagaatacatctctaagtcttaagagcttcctccaataccaactaacattggattcagttcaagagaccacacatcttgacctttcaaatagagattgtacgcccattcaacccaaataacatcctgttttaagtgactgcccaaaggtacttggtgtaacgccctaatctatatggacgtcacgtgtgtgattttataaactagtttagtactaatagataaattaatttttaaaatatgtgaatattaaaaacttcaccaaaataaaacactaaaaacggacatcataacgacactaaaattgtgttctggggatccctgttataaaaattttataacaagactatgtacaacagcaagtcaagcaaatattgcccaaaacaactcatggcaactcgacacacacgctggtaaggtcaatatatatattgctagagaagaccatcacctaatagctcctctagcttttctttgcccttagctgcaccacaaagcaccagtgaatcataaggactcagcaagaaaaataataaaagaaatacatgtaataattaattatccatcttactatcataaaataatcaaacaatgtatgttccaaagagtatgtagtataatcgatcgtatacgtggcgataagaagtaatcatatattgctttacctaattaggcaagcccgtgtcataacctgacaccatacatcatttgacctcatcacctaatcaggtgagctcgtgcaacaaactggtaccaacatatcgcatcgcctaatcagaagagcatgtgccctaatctagcaccaatgttgtaacaccctaatacttaggcgttgcagtgattttctaattaacgtagcacatttgctaatcaaaggatttttcttaaaaatcgtgctaaattataacttttgatttaaattattaaactttataaacttttatatatttatctacataaattgggatcttgtatttaatcttttacaaacattatcaaaatacatttataaacttgtcgcacatggactataaaatacaatccaagatgtcccgcgactgaacactctaggtcgcgtcgcctcgacatgtacaatcaccatccaagctcagagctcactcatgttcagcattcgcctttcctttacctacacatgaaagtagcaactgtgagtcaacaaactcagtaagaaaagcatataacaaatgatgtattatcaacatgtatctaggcgctcatacacctatccacaaagcttatctgataagtaagaatattctttacta

SEQ ID NO: 43359 - DNA, 2260 bp, Cannabis sativa
agtttcaacacctagaactgcttctgcaaactctctgatcattaccggatggctggaaagccttgctgacaaataattaaaaagttcatttcgaacatgaaccacttttgagataattaactcaatacctcctctaagatggaacaagcaagatttgtgtattagccttgatgcattcattcttactgtcacgtgaaaattatcaagctgatcaatcaataagattagagaaaacaaaaagagctgattgtatatatccacagcaacaataatttctgcagttgtttccaaaagggtctcaaatatttgggggtcttcagcagctgccagtgcatgtttgattatatctgtaaatttttgttctttacttttctgtggtgtgttctcatcaggaaataaacaactcaaaacagtatcttcaaggaatgagctaatttgactgcaaaatgcttctcttatagccttctttttgttaagaagcaaaaaactaacacatctaatccatcttgatcctgtttcggtgagatcagcagcggtttcatgtattatgatcctacgaatattttttacacaagaaacttgaacctcttcagatgactcattgtaaagaagttcaaaaaacaaattccttaggaggctgaaatcacaatctgtaccgatttcccagcagtgcatatcaagcatattcacacctttcgaatacaattcgttcttgcatttattttttttgtcacacttcgaacacaaaaatccttgcaatagataacctagagtttgacactgtttttcatttgttgtattcacgaataatttgaatttacttttatccacaccatctccagtgttacaagaaccatgaaggcatgataagtaaccaagagaaaatggaataacatttttaaccttgtcatgtttttctccttctatgaatctgcaacaccaggaaaaaaaaggtaataaatgactctaaatcaaaaaaagataattgtgtgcacaaaaacatcaatataataacataacagcttcttagtgttaatattctttacaacctgagactctaaaacataactgtatacaagctatatgtactgaaaacaaaagcatagatgacttcaagatcaaaagtaaaatgctgaaacaagaaaccaaagtaatgattattattaatattcaatgattaaagataaaatgcatacaacatgtgtgaaaatctgggtttacaactgtaaacatatcagatttgtttccattataagatgaattgagtatttgttacccaattctaatttattagtatttctgattttttttttttattttgatagctaagtttacgagatcacatttatagtattgatcccagggtttgtagatatattttataaatatgtagcatgtatgttcaaggaaaaatatatgaaaaatagagaacaatttcaagcttgttagctcttcaatctctctgtttattcacaacatgtattttcatttctatttttacctcattcatggcattcacaaaataacaatttcaaatatgacttatctaaaccatagaaataagtaactttagcttttgacttactccagccttctaaatgtatgtgatagtatctgaggaccagaccacatagcaataactggtattgacattactgcctcaattctaacttcttcatcttcatcatgtaggcccaaatcaagcacttccagatcagattcacttctgctattagcaagtttgcttgcaatttgaacagagaggcattttgttttcctcatgttattaggctcgctaccaatgacggaatgagtccaaggaagtttaatcagtaagcgtacaaggtcttcattaaaaccctgatttccaaatatcttgctctcccctaaaaccggactttgcagaagcaatatgcctctttactcattccttactcattccatgcctcttctttactcattccttccatcccaagaaaagtagaattctttttaagactccctgaagtaatcagacccttttgaggatcagccaaaagctcaaaccgtttgcataattcagacacaaaattctcaacatcaagcttctctgccatgactggtaacaagtcttcatactctgttgttgttgttgtagttgttgtagtcttcttcttcttctctgtttgattgttatgttccattttctgttgcaggaaaaagaaagaagcttcaaggagaaacacacaagaaatttaaggaaaaggaattggtataggca

SEQ ID NO: 43360 - DNA, 2277 bp, Cannabis sativa
taggtattaaaaagtaaaataggacatttattttattattttaaaaaaaaatgacattaactatcactaaagttaaaaatagggctatttacttacatttttcggtatttttacaccctttagctttcctttttataaaaggagtggaaaaaatagcctctaaaaccctttttgtagtaatggaggtatttgaagtctgtggtctaatacaatatttctatcaagacctgagacttaggccctaacagatatataatatacataattaggtggttaaaggtcacactttaacctttgtaagaaaataacacttataaatgatcctttaatttatattacaaaatacatatttaaaaataatagaataattcctaaacctataaagaaaatattagtaacaaaattcggactacatatcaatataaaagaacaataagaactccacaattatgtagctgcaaaataccaaaataatatctaacatctattatttcctattcctcaagccaccccattaatttccattgtcctagaaaaaggtttcccaccaatctgttgcaccatcttctgacttagacaaaataatagtaacttggtactcttcaagtgttcctattgtgttaaaatttttctttatcatcctcaaccacatttcagctaccatgggatcatgtcaagtctcaaagtttgtcaagtttggcacttggattcagcttgtggatgttatcttgagcaacgtcttctccaacagttctctttgttcttcttcctttatgagagctaaaagataattaattaatgagaaatggatgctaccaatataaatatgcgttatatataaataataaaatatttattatttaaaaaaattaaattatatagtgacacagtctgaggtatttgaacctattgctcttataccatttttacatctcaacctgagacttaggtcatgatagattagtaatgtccataacttggatcgttaaatatcacactttgaccctcactatcggaaaataacccttataaataatctattaatttatattacaaaatacatatttaaaaataatggaataactcctatacctataaagaaaatattagtaacaaatcaagaccacatatcaatataaaaaacataataataactccggaattatctagccacaaaatactaaaataatatttagcatccattattttccattcatgactagtacatagctaattaagtcatttagatcattcagatcaatcgttcaagttttaatataaatttagtttcaaggaaaaatttcatatagatttaaggctaaactaataacaacattctaattccttggcagtacctcctcaaccactaacatcaaagtgagctcttgaaatgggagaagataggggcaagcttataaatcctagtagaaaatcaactaatatcaatagacccttagtttaatgaaatccctacatggttaacttttaaaaataaaaagtatatcataattatcatcacgtataaaaaaaaaaaaaaccaaaaaataatcacaacatcaagcttttaatgcatatcacactgtccactagacccctatctcaatactaattgtagaaaacaacatcctaaattgggtaattgcgaaccacaaaaatattacagtgcaaattcaattcacttcttttacagattctaggtcttaaacttacatatgagtgcacacttgatctacttatgattactcaaatactaagtagtgaaacaacattatgcataacacatgataaaaagggctcttctcaatattgagtataatataaagcagccaaacaagaataataaaagtacatattctcctttcattattttagaagattaggagcataatggttataatttgaaataactaaaaaaatcatataacatgcataaataatggtattaaaatatgtttggtactcagcgctcctgaacagtctcgaaaaatatgcagattaagtttttaattttttcagtattttataaatcataaatattgaaatatgcctaatgttaatcaacacatatacaatcaagtctaataatcaagtggagtccctatctctcccaaatcattaagctttgtccaaaaaggcgattataagtctcgagctcaattgttagatccaatcctagatatcacgttttcctacgaccatcaaatgagcaatatgttagacttttatttgggcttacattatattttattggttttattaaaacttgggttgattgga

SEQ ID NO: 43361 - DNA, 4556 bp, Cannabis sativa
  modified_base (2553)..(2557): a, c, t, g, unknown or other
  modified_base (2736)..(2760): a, c, t, g, unknown or other
aaggagattaaagcagttcttttcagtatccccacatacaagagcccaggcctggatgggtttggtttcggattctataaagctctctggccagaaattggacaagaggttagtaaagtcgtgactaatttttttgatactggaattctgccttcggagtttaatgaaacttcaatatctcttgtgccaaaagttgataatccaactaaggctattgattatagacctatagcatgttgttcaaccatctataaatgcatttcaaagctattgtgcttgagactttcagaagttttgctagatttaattcactagcatctaggagcttttgttaaaaacaagtccatagcccacaacattcttatttttcaagatcttattaaagattatggcaggaaaattgtttcagctaggtgtgctatcaagattgatctcagtaagacttatgacacggtggattgtggttttttagaagatctccttaaagcttactgttttcctagctagtttgttaggtggataatgacttgcttgaaaggtacctcgtattcaatcatgatgaatggaagattacatggaaagtttcaaggggccaagggtttaagacaagaagatccaatatccctttttttttttacttgttctcgttatggagtaattgacaagaaaattgaaagtggaatcttaagaaggaactttcagatttcatccaatgtgcaaaattcttcaactaactagtttatgttctgcatatgacctcatcttgctttgtaaagggacggttcaatctgtgaggcatttaaaattttccttggatgatttcagcaatgttacggggctgcaagctaacaaagttaagtctcaaatcttcctagtaggggtctcgaacataacaagagagactgtattgcgtgatttgcaatttgaggaaggaggatttcccctaaaatatttgggggttcctttaagacctactaaggggaaggtagaagactgtgatgttattctgaggaaaattaaacttaaggttcacacgtgggcttcaagacatttatcttttgctgacagagtccaattgatccactcagttcttctgggattaataaattattggatgagcatattcctactgccctagagtgttatcaaagaagttgaaaaactttgcagagggttcttatggggaacaaaagcaaggttcacttggcttcttaggaaaaagtttgccttcctaagaagtgtggaggtcttgggtttcgagagggtcccctttggaacaaagcagtcttggctaagtatatttgggctataatggagaagcacgacttgttatgggttaaatgggtcaactcgatctaccttaaaggagcagattttttggattacaacaggcagcaagatactggttggtactggaggaaaatttgtcagctgagacaagtttttaataaggctagcattgttattgctagaagaggcgacaaattcagcaaatctatataatagcgggttacaacaataagttctttgctataaaaagaatgtttggtgaagactaagtattcctaaacacagatttatgctctctcaagctttgaattctcatctgttgacgagggacaagttgatcaaactttgtatcccggtggaaacgttgaattgcccagtctgtgatttagaggaagaaactcgtgctcaccttttctttgattgtgttttttctgctcgtgtgatttagagattgactagctagtttggagctgttacttggcctcaggaatttacaaattggaaaatttggatttgcaatgataggaaacatctgccagcagctgtgactaactacatgttggctgcaactgtgtatgagatttggaaaaatagaaacatgtgtgtttttgaagggtgctctaggtcaatcaattatattgttgctgaggtaaaaaaagatgttgttttataggttggctgatgttgttagggaaaagaggagcactaatgatcatagctatttacttaaaatgtttagcttattaaaaagttgattgcaagagcagtttgttgctcgactactgctggttttggctgttgttttgttggttgtgattaatgaaaatctccttttcttgataaaaaaaatacaatatttaaaaatttatttttcacatgtataaaataaaaaaagacacttattcaacaaatagtttatatcttatttttggtgtgttaattttttttttctcgaatttcttaaaattttacacaatatcttaaatatttataatacatagaatgaaaaaacttagactaaaatcttattaaacaataaaaaataactttatttaaaaaaatatgaaaactaaattaaagtaattattaaaattgacataaattaatgtgaattttcttttagacaactatcaaaaatgattttttaaaattaatttaaggctaattagtaatttttcctctcgaactttgacatgtactaaatcgtgctccctgaacttttttggtcgttaaaaattccctccgaactattgagattgttannnnnaaggacttttgtctaattttagtaaaaaaattctaacatgtatgaaagttcaaggggcatgatttaggggctatttgtttacacttaatgatagtacatatcaaagtttgaggggcgtgattcaaagtctggggagcatgatttaatacataaataatcactaaaatagtaaaattgannnnnnnnnnnnnnnnnnnnnnnnntttaacaatctcaatagttcgggcaaaatttttaacggccaaaaaagttcaggggcacaattttatatatgtcagagttcgggggtaaaaattattaattaggcttaatttaatttaattttttttaatgagaggtgtaattataatttctttgggagcaactaaaatttttctaaaattatttgaggtattttttttttttttcaaaaggtaaatcaatgattctaaaaaagaaataaaaaaataaaggatataattataattttacgaaatacctcttcaacagttcaactaccacccacggccaacgggtatttgtgttttcatctaaaatgtaaaccttctatttccaacaataaacataatattcaataaaaacttatttcacgtgtcgaccaataacaatcgagtattaatgcctaacgatccgcgttttcgtcaaactttaaatctggaccgtccattcaacgcgagaaaacacaaacaagccacgtctcaaccgtcagataatcaacagagaaaacacacggataatgaatcctatccgtccatcttcaaatcgttacaaccgtcgcaggctataaatacaccataatcacaagtcgattcagaactttattcatcttgagagaagaagagtcgcttacctaggttgaagagaagaagcaatctaaggtcagttttccctttcgtctttctcttgaaagtttctgtttttcgatggtgaaattagggttttgagatttatatcccctgtcatcttccatgttcactttcgctttcgattttagcttagggtttccccccttttatctgagattttaccctctttcctctgagattttattgtatgatgaatgactcctaaaattatctcaattttacgtctttgacgctaatctcgatctagggatttgcgattttgggggttttatattgttttagattttctcatttgtgtaattggtactttcaacatttagggattatgcatattattggtatatttatcgttcttccatgatcaatttatctcgctagggtttgatgtagatttacttacctttcttgcttggtaagatgtttatttttttaaaactgtaggactttatgttacattgttgtagggttcttgcaaagtgggactattattcggtttgtagattagggtttacgcatattcttggcatcttcattgttctttgtttaatattgttcttttctttatttcttgtctcagatatggcccgtacaaagcaaaccgctcgtaagtctactggaggaaaggctccccgtaagcagcttgctactaaggtttgtactgataatttctcaaattttttaataattatcttaacgctctttttagtttgttttctgattctaatttggttttgatttaataggctgctcgtaagtctgccccaactactggaggggtcaagaagcctcacagataccgtcccggtaccgttgccctcaggtatgcaatctactttgttttcaattgttcaaatcagtttttttttagttttaatttctttattttctgttttaattgtaactaaattgtttattgttcgatgaacagggaaattcgcaagtaccagaagagtacagagcttctgattaggaagttgccattccaaaggcttgtgcgtgaaattgctcaggactttaaggtaatattacttttggtgttcgatgtaattttaatagccttgccgctgatttggtgtaattttggtatccttgcttatgtttttctaattattgtacaattttgttttgcagac

SEQ ID NO: 43362 - DNA, 4859 bp, Cannabis sativa
catcatctactttattatcactacactacgtattttcaaattcctttttgtttgattgttgcgatttcgaagcttcattttttgaaactagggtttttcattttcaattgtttgattgtttgattgattgattgttcgtaggcgacaatgatctgtattgataattcggaatggatgcggaacggtgattattctccttctaggattcaagctcaggctgacgctgtgaaccttatttgtggagcaaaaacccaggtcggaaatcttttttattatttatctgtttggttagtaagaaactattaagaaaatttgaaatctttgttcgttttcgattgttcaatgggaataacaaaatgaagtctttacagaacagttagctttgcttttgctttatgtttagattagatatttctgaacaaatgtatgtatttgggtttttttttgtgcagtctaacccagagaacacagtgggagttctcacaatggctgggaaagggcttcgtgttttggtgactccaactagtgatcttggcaagatcctagcatgcatgcatggttagtttcatgattaaatcaatggcttcaatggattacttacagacagtgatacgaataggatgtttctatattttctttatgtacatatatactgcattgattggtacaagttatataaggaaatggttatgtttaacctctcttataattatgatacaaagtgaagaaaatttctgcctatgtgaacttttgccttcagttttgaattaaggaaatgatgtatgttcataaagttatgcctgcatagatttttcaccagcaaataataatctagtgtaaaattgctatgttaccaagtaatgacaattctaacatctagaaacctgttgcatttggctgctaaatcactcatgatttctgcttgttgagtttgagtccgtttatattaatattggtactaccattgctgtatatgtaccttatatatgccatgaattgtcattttagtctcgttcattcctttgtaatgcttttcgagttgcataatctcttattagtatgagataacacatgtgttgtacttaaatctttgcaccatcacttttatttatacatagatttagtttgtatgataagctaaaatgctcagcaattgttctggaaatgattttcctttcctgtctgtcatttttacatagctgtgtactatatttaatatgccaattttgtccttcataactttaggtttagaaataggcggtgagatgaatctggctgctggtatccaggtggctcagttggctctcaagcataggcagaacaagaagcagcaacaaagaattattgtctttgctggaaggtactacggtgcatgagttttggatctcttccctgtattttccaatctcataaattctcagaatcattttttttgtttgcagtcccataaaacatgaaaaaaagactttagagatgattggaagaaagttgaaaaagaacagtgtagcacttgatattgttaattttggtgaagaagatgatggaaagaatgagaaggtagaggcacttcttggttcggtgaacaacaatgacactagccacattgttcatgttccacctggtccaaatgttttatctgatgtgcttattaggtaattgttttcattgctttttggtttacttaagttttttaatagaatacaagcatataattttattttcttttttgtttttaatatcacagtacacctatcttcaccggtgatggggaaggtgcaagttttgcagcagcaactgctgccgctgcagctggaggtggtggttttgattttggtgtagatcccaacttagatccagagctggcgcttgctcttagagtttcaatggaagaagagagagccaggcaggaagcagctgctaaaagggctgcagaggaggcaactaaggatgggaaagagggggaacaaccatccagctcacaggatgcaactatgacagagcgcgccaccgttgcaacttctggagctgacactaaggcagcaactgatttgacggttggtcacatattgcttgttttccatagttatttgacaatatactgtctgttttggggaattacttagttttataatggttttgattttggatgataattcaccttttaatttgcaacaggacgatgagaacgctctactgcagcaggcccttgcaatgtcaatggatgaccctgcatctggtgatgtgcgagacacagatatgtcagaggcagctgcagaggacccagaattggccctaggtaggtccttttgtttcctgccattcttttcaatgcatagatgcacatttagctagtctctcatctctatctattctttttaatggattaagtttcggtttcttttcttagtgcttgattgagctacctaccaattcaattgctctcattttgctctgaacaattgattgaatcgatctaaagatctgcttagcatgtttttatattctcgccaatattgagatgatggttatttattgctgagtttcacatacctgttgtgcagcacttcaattgtcagtgcaagaaggtgcaaaagattcatctaaccaggcagatatgagcaagttgctggctgatcagtcatttgtgtcttccattcttgcctctgtaattattcttcccaacctacttatttgtatatttttttgctcttttttcttttccgtaatatttataatttgaatacttttgcagcttccgggagttgatccaaacgatccttcagttaaagatttgctggcttccatgcaaagccagtcagaggtgagtttgtttataatcattattaaccaatattaaataggctattttggaattttaccccgaactaaattgtgccctccaaacttttttgcatattaaaagttccccctgaattattcaaaatgtttaaataagggacttctataagttttgttaatgtggtataattaaaaggaaaataaaattaattataaattatataattaatattaaaaatttgttctaatagttcggaccttacccaaaaaaaaaaattgaatagttcgggggaaattttaagagcaaaaaagtttaggggcacaatttggtagttgtaatagttcgggggctaaaattttaaaatagcctatgaaatatgtcctgctattgtacacaatgaatcgtgggattaactatttatacttgtcttcttaaaagggtgaccagaagaaatctgaagacaaagaatcgaaagaagaagacaaatgattgttgagagcagagctgtttttccatgcgaggtttgacatcatcgaaaaacccacttgcctcttctatctcactttgttttcttgttgtttggttatgtgaattgtgattattacaacttaatcttgacttgttgatattgatgtttctacaaatgcagatcaaaaagggttcttcttctctccatttgcaccacaaaaaattatttgtaatttcggtgctcccttgttataaactattatgggttgtgtctctttcttgagttgggggtgacttgacattagcagagagtattattctcagaaagtacattattgaaaatacatctctgctttgtttcgacattataattgatatctttttacttgactatttagtttatatgcatttcttcttttatggttaaagtctaatgcttgaagaaggaatgagaaattgtgattctgttttctttctttataaattattgaacatgcatgctatattaggctcatattggaaaaatctcacaaaatgttatatcttgtattagtatgttttcatcatattttcattaactcacattaatttaagatctatagttaaacatatatatataatttaaatgaaatatcaaacttcatctgtcaatacaaaaggctttgaagattagctgaaacagaaaaattagaaatgcatcaatcagattgatatttgatactgagagtgtctaataacgtagtgtgctactcagcttattgattatcttatgaaatttaaacgaatattaggcaaagaaggtaatgaaatttggcaatcatgaatgagcaaaccaaatgtataacacactagttgattgcttataccttttttatgggaaagttgatgaaacttaaaataacaaaagtaataatgttatgtaaaagtggaagatttttttttttccatttataaaactttaatgtctatcttaaaccaataaaattttaatattagaaaagaaaacctcaaacttagaggtatttcatcccaccaataaaacccctacaaaataaataatttttttttattattaatatcaaatatttaataaaatatgaaaatttgattgaaatattatcacacaatcctctaatgtaaaaattattatttatatatgttcatctccattagtgaagatcttatctaatttatttttattagactatattgatcttacaaaaacaaaactaatattagttttacaaaaatcaaaactaatcatatttaccttacaaaattaaaactactatactcgtcttataaaactaaattaggattggactattacccacctttaattacaatgatttttcaacacttgtaagattttatttctaaattattattatttttttacaaaattcttttcaaattataaaaataattataattttctttttaaaaaatttgattgcagcatttactttattattacaaataatttcctaatatgaattaaagacttcaagtaaaaaacaaaaaataattgagttaaaaaaaatgaatagaaaattgtagttattttcttaatatgagtgaaatttaaaaa

SEQ ID NO: 43363 - DNA, 2023 bp, Cannabis sativa
aacacctaaaatggacggaaaaggtaaattgcaaacataatacgagtattgggagttttaccgcccaaatttgggttttggggttaagtgaaaccaaaataaaaactttgggagttttaccgtcatttacccttataattataaccaatacttctataaaaaaattaaaaaaaaaaatatttttcttttatttaagcgtttatatattacattgcataatctagggctcgaacccaaacctcttatacacacgcaccctcttatagccacttgaattagccttataataaatatttattttttaaaagtgaaaaacctaaattattgcttaacaaaatagaaatgtaagtatgtaaaaaaaaacaataaaattaactatacaagagagtttcaagactttatatagtcatctcatcattgtagtccaccaccgacaattgatttactatttatttatttcttgaaagttataaactaccgacacaagccaagtgacaggtgaaaaaaaaatatttatacttatttattttattttattttttgtttctttgcataagaaataataaagggaaaactgggtaactttattatgtcatcatttcgttttattttttttgataacaatttatatcatcatttctgacccatactgtgagagtatcacagagagacttttgcgctgcgttattatttgtcttaataattgcaagtgtgagtagctttattactacattttggtgtatggttctaataagtactaccacagcacattaaagaggagaggtacacgtggggagagagtagaggctagagactaaattatgtaaattattatatcaaaattaatagcaaatcattcattttcgatcataagtcatacccattaaatacttttttatttttttttctgaaaaacctatgacttcattaagataggcaataagtacaagttacaaaagtgtggaacacatccattccaaaccatctcttgatgatcctaatgctctccttgcaattttgtgagctaatacatttgagtttatgtgaacatgagagagagccaaaccatttcgagttacattaggaaataaggataaagaggtaatgatttttttttttaccaaaactatctttcacttatgtttaactttcttaactaagatttgacaatctgactcaaccagcactatagaaagctccacaaaagagcattaaatcaaggttttatctaagactttagcctctgcaacaattggagacagtccacttgaaatgggtgaataacaaccagccactacatatcccttacagtttttcaccactattccaaaatttattctcatatcttttcatcaatagagacattcacattcaatttatactttccggatggagttaacttgtcatcctagttaaaaactcatataatgaattcagattaattatgtgaacacagttaataatgttattcaaaccatccaattagttctcttgtgctttagcagagtcctacaaaaagaagtcacccattttccacatctgcaatattagatttctaattattaaacaaaatagaaattttgattactccaaataacccaagtaataccaaagaacaatggaagatcttgtttcttaattttttcaaatcctcttaataaaaaatctttaatatcacattatttattcatattgtaaattgataaaatttagtatccctccatataaattaagctctagaatattgtaagctgattcactttactagaacacaaagaacaaaagggactaaaaaaaacatttttcctataaaaattcaaaagaatatggttaaaaactttcaaaataaattgctttattttagaaggtattttaagtttccacactgatttatttgactttttatttgggataatattaacttttattagttttattaaaatttgagtcgattgaatagttctttgccgtgttagctcatatttttagtgatcattagtagttaatggacttagcatctgta

SEQ ID NO: 43364 - DNA, 2662 bp, Cannabis sativa
tttttttttatattaaattttggctttgttaatctgtctttatcattaatttctgagccagaagcatattttgctattgacaatttcttatttctaggcaatgggagctgagccacatacacaaccccctagatcgaagatatataatatatatgcatatagggataagcaattgcataatctataggagtatagggtttcataaacatcatatttgtgttattgtagtttagtacacaagcaaaacttatgattagttaattactaatattacaatataaataagaaatgatcagatctaactatcactgttacttattatattactgaaatatttttttcaaaatatgcaagtgtagctgtgtgctatgcttttctgaaagaagaagaccaagaagagaaattgaaaaatcatttttgattatataccattaattattatagttactgaaataaataattaactgaaaaaagaatagttatcactaaaagtataagatatataataaacgtagcttgaatataatgatgaaaaaattgagtaatcgttggaaaatcaaactaattaatccaattatgcgaattagtttcatgaagtgcatttaattatagccagctagagaaaaatatacagaaataatacatatataaaatcattcactgtcatgaaccaacttttgcttctctattattatatcaatttggtaataggactgagtgtgaagaccaaaaaaaaaatatatctatataaatataagaattaaaagacgagacttatcatctagattatattacatgaccacaagtatatatatatatatatatatatatatacacacatcaggatgattttaatcagttcaatgagtataatttcaatgaaggagctagttttgaattcacaacctaatagttagctaaattcagaaattaagaacacaagaataaaagcagacaaggttcaaattgaaacttacccagtaataacagtttgatgatgaattaatacagatcaatttagtcctccaaaacccttaagagaaataaagcaaaatacagaaagagattgataccagagaaactaaaagaaaagaagagagaggaagtatactataccttgctttttttatttaaaataaaaataaaatattgttgttttacatatttttttatttatttctcaattagtaagagctcttggttggaatattatgtggaaattgagcactctccctgccatgagtgaataaataataattttttaaaacataaatcttacacttcaattattaatgccatatgtacatttcatgtgttgtaattaatatattaataattaagctataactgcaacaagactatggtcggacaatttttgcacttgaaaatatacgacttgtgttaatagtattattagtaaaaaaaaatatcaataagactagtctctttggactgttaaaaatcatgtgacttctcgagcctttcttttttccgattgttcctgatcatcaatttagacaggttgtctttgtcatataaatatatatatatatatattatataatatatataaataaaatacctgtatgcccacttatccgtattataatctttattggatgaccactgcttcatatatgtagggtttgggattgggtttgttgtagatttttattttatacagcaatattccatcaaataaattcctaaattactttttagtaaataaaaacaaaatatcaagaggttgtctgatctacaataatgcagtggaatgaatatatataaatatatattaattgagtttagtattgaaaatggaagtataggaattcaaatatcaatacatgataaggagagaatttcaaattatctatatatccagattttggtgttatcagtctgattatgtaaacttaagaggacaactattgctgtaaaaaaaaaaaaaagttaatatatccctttcaaaaataaaagactctcattataatgttcaaaatctaattatgtgaggtggagtcatccataatatataactactaaatatctgcacatatatttgatttaagtgttattaatttgaaagaccaatagattaattttttttttttaagaataaacaatagattattgttcttttagagaaagtggtcttcttccgcctccgagatcaggtccgacttcattgttgagaaagcacatttcgcggttgtcgtcttttgcaacagttagaggaaatagtcttataacagctctcgagacgacaattcctaactttaatcctattggtagatctacaaagaaaatcatcagagttcagcatagttaagttctggttttggtaagtttttaaaagttattgagaagcctcagtaccagtggacaatagggaggagggcgtggctgcttctaaaaggcactctcaagaggatagttcaagatagaaggactcgctcagtttctcctagtttcttacgtagagacatttcgagtaagctaccttttgaaagggaatatgagattattaaataatactcttcctacccctaaagatgctagggttttgactactatgataccaagtgttgggcccacctatgatcaaatggtgaaaagctcacatattaaactttgcgaatcaaagcaatctcataatcac

SEQ ID NO: 43365 - DNA, 3630 bp, Cannabis sativa
atacttagttttatgttaggtgctatataatttaattataaataatataacaaataattatatataatttaatttattattatgatctaattgaatttttttaatataaagtgattaagagaataaaaaataatataactattttgtgaagttatttttatggatattcaatacatgtaaataattaatttttggatgaactatattctaccattttttataaaaatgtatcttttaatgcatataatatgttgtttgctaactaataaaatgtttactctattgtagtaatgtcttaaatgttctgtttaaaaaaaacacacagtattttataatttgtgcatatacatatatatcatatttatatttatactaggtaaaagttacgtaccgaaccacgtaaatgttagttttatttaaggtttttgttttataaaagtaaactgtgtgttaggtaaaacatagttgtgtctatatatacattgttattaataataaaaatacgttaatcttaatatatacactcatataatagttatccttaatatgaagaaataatttatgataagtcataacaatatatgactttaacatttattatttgtttctagaaaattcaaaggaacaatatatacgttttgtaaaattttaaaaaatagcaacaaaaaaaaaaaaatgtcatcttaaaataaagaaaaagaattattaagtaaagtcttttaatatagaattttaaaagaaaaaaatggtgccctgtttgggtctgttgcagttatagaatttgaactacttttttttgctttttaattattttttcaaaattctcccttcccccgctttatctgcattcagttttcttcatcatcccttctctcgatgataacctaactgctggtcttttgctcgattttctctgcacttttattcaccaacctgttatggatccccttctgcagtctctggattcaactttaaatttaactaatgaagaaagttcggttgttgctctgcctgttgatgttacccctgctccttcaaacaattctggccacattcttattgcacaaatactcactaataattatgtccaccctcctatcttcatcgaccaaatgggtggtcattggaagggtaggtttcctgcaattgtttctgaatatggagatggtatgttcaaagttacatttggttgcgcaggcgacgaattgcgggttctgcataaagagccttggcatttccaaaatcacctaattgtcttctgctccccaagtgctctacaaaatgtcacagtgaataatttatcaagcactcatttttgggtccaaatctaccgcctccctttccttagtaagtctaaattgtttgccactgccttgggaaatatcattggggagtttattgacgtccatgaggaatctcttgatgagggttggggtcctttcttgaggattagagtaagattacttgtgaacaaaccactccttcgaggacacatgatcagtctgcctaggatcaaagatgatttttggattgactttcgttatgaaagactgcctgagttttgttttgaatgtggaagacttggacacccctttgaaaaatgtgtggctttcatggaaagggtggacaatggcaatgatgaagacttcgaatatggcccgtggttgaagggagccaagttaccaaccaatggctatgacaagtatcgttcagatttttctaaagggaatgcatggccactattgactcgtttggctcgtaaatctctggtttccactgtacccaatcttggtgtgagatctctgccccaaccaaagactctttaccatggtgaatcatcttcagttccttcttcaacgcctatgaattttaccaacccttctaaccttctcccaagtctgctagtaacacaaatctctgccccaaccattatacacccaccctcccacaccactggtgcttccaatttgtctctccctagtcatgtccccccttctactcttcctctcacttctgatgctaccaacaacacactcttcttcccttcacaaagcataaatctccaacatatatatacctctgacatcagcttggcctcttctcctcacattccaattgctatttaccccccaaatacactgtcttcaaatgctaataccaaaccttccgtaccttcatcctctgtcttctcgtcctctctctttaccaccccaccacctcttctttccacttcttacccttaacccaaaactaataaggaaaatcttcaccccaacagagttttcaagaagcattcggatggtccgtcaatgagacaattacttaagagatgccgcaaccaacaaagttctgcctttttcccttcctcgtcaacaggggactgctctcactagaatgtttcctccacttccatggattcagatggtgactctgacgattctgcgaagattgctttgtaatcccacaagggattataaaaatcttaagttggaacgtgcggggattagggaacccgagagcgttaagacatcttagattgcttgtttctcagcaatctccccatgttctctttcttatggagactcgactcaacaccaactctttaattcgcattcgacaacttttaaattttaacaatggcttggatgcacctcgaattggtttaagcagtggtctcatgcttttatggaaagacaacattgaagttaacctcaacacttttggctcctgtttctttgattgttttgtgactgatactggtgggcaaaatttccatttcacagctttttatggttcaccggttgttcaacatcgacccgattcatggactttactttgtagacttgcggatatagctccttcacaaccttggttaattattggcgacttcaacgagatcttatccaaccaaaataaattagggggcagtttgcgaagtgaatcacaaatgactgcatttcgaagggcccttgatcactgtcatctcacagatccccctttccatggcgactgttatacctgggctaaaaacagaacatcagtaaactctttaaaagagcgtttagattggtgttttgtcaatgatgtttggacttcatccttcagccaacctacagtgtctcacctggactattttaactctgatcatcgtgccatcacagctgacctttttacaggcttaacttcacaacaccataagcggcatagcaggtttcgttttgaaaaactatggctttcggaccctgaaagtaaagtcatcatctccaattgttggctatctgatcagcctttggatctcatccaatgagtgcttaaaaatctggattcatgtgctacctcactgcaaagttggcacattaagaaatatggtcgtctgaaacataatatagcagctgcccaaaagaaggttgacaacttgaataattccttttctctgaataatgatactgctgctgtcttgaaacataatgaatccattcttgatgatttgctcgaacaagaggagatttactggcaacaacgatctcgaattgattggatgcaattgggagataaaaacacaaaattctttcactccaaggcctcggctaggaaatcaaacaacagaatttcatctctcaaaactgaaga

SEQ ID NO: 43366 - DNA, 2313 bp, Cannabis sativa
aaattattttttatatttagaataattttaattacatataaataattaatattatgtgaccaatgaaaacatactatgtgtacactatgtacacgccagcattacaagttaaaatttagcagcaacacactaaaagaatagtgaaaactaaaataaaatgtgagtttgaaaggttttattatcgaaatattgatttgtagggttaagtgtcacaaactccaatatcccaattaattattatatattgaaaattgttaatggtgcctaagtattaagtatattattgttattggtataatttaatattaaattttatttattttatttcaataataatttagaaaattattaattatttagagggtacaagcttatgacgatgaacactatgatgcttaatattttaacataagtaataaaaatatgtttttttaacaaataaaatataagttaatttacatattgacatcaatatggttgtactaaggtgtaggcttattaaaataatatgtttatatataggtgaatctcattattgaaattagttaacatattaggtgttttttcctttttctttcctgaatggaaatataactttattaagaagacaaatcgcctaataaaatagatataaactcagcaagaataatacttccactgaaaatttaatttgggaaagaacatgaagccatagcaaaactatcagtcactctgttagaagaacaataaataaataaagagactccactcaaagaattaatcaattgtttgcagtcattaaccactagttcaaaaagagagttcattaacaactgactacaaattgcctcagctgccactaagcaatccatttcaagtaccaccgcctgcaaatctttatccctaatctaactgagagcctcattgatgtccataatttcagtcaactcaggttccatagcccccactatctgcttcaataaaaccgcccaggtgatcccaagctaccatgccaattctaaactgatggtttgcagtggaaaatgtagcctcaatatttatctttatttgattctcttgaggctttactaaaccttgtcaccatcttgtgccacaccactaggtagtggtgtatatttatccttcatttaagtattcttctattgttcaagatacaggtatgatggggtaaccgcatcattcacacttggaattctcttattctaaacaaattaattttgcgcccaccaattagcctagaagatcacgaccaacattccttgcttctccttacccactcgagttttaacctgctaaaattacccccaacaacaactaccaaaccgataccgagactaactctatctagacattagtgtgacagtcagagttccgtgatccgcaagggaaaagaccagaagctatacaatctcacattacttgggaaaggtcaagtgttacgattctgagattttgtaggtatgagactacacagttaaagtgggcttaaatggattgatatatactacctatagtaacaaggtgcatcttgttttctagtggcccatcactttagaactccaaaattaagcgtgcttgacttagagtaatattgggatgggtgacctcttgggaagctttctaaggaagcatgcgagtgagtataaagcacagtggaaacactcatgttggtttatagggccagccgtcattctaggaagcagctaaagtgacgtactcgtgtataagagctataagtctgtgggacggaagcccaatggaagattgaagcgagtacgttacaaatggtatcaaagccttgatttagctgaaagtgtggtcgacaaggacgtcgaacccccaagggagtgattatgacagttagagtgttgtgatccgcaaggggaatgatcaagagctatacaatcccacattgcttagggaaggtcaagtgtaatgattattatgagactgtgtaggtatgagactacatagttgaaaagagcttaaatggattgatggatactacctatattaacaatgtttgtcttgttattttctagtggctcatcgtttaagaactctaaagttaagcgtatttgacttgaagtaatattgggatgggtgacctcttgggaattttttgaaggaagcatgtgagtgaggacaaaacatactggaaacatttgtgttggtttgtagggccagccatcattccaagaagcaaccaaattgacgtatctgtatataaaagtcataagttcgtgtggtggggggggggggggagagcagtagaggcttgaagtaggggcggtacatttgaaaacaaaacgg

SEQ ID NO: 43367 - DNA, 3954 bp, Cannabis sativa
  modified_base (3914)..(3922): a, c, t, g, unknown or other
ctaggttgaatactcgcacttatctttacacataaattcttcttgttattaacaatacaatataattacaatatatatttatatgcattttatacattaagaataaaaatacaaaataactttttattttactgttataatctcatctatctatattcgtatgtatatccaaatctataatgctcatcagctaccactagcaaacattaaacatagtcatgcacagtcacacacatatcacatataaaaatatataagataaaatttctcaaatctcagtaatatatatgtatagtatacatacaagacaaataaatagaatgctaattttaaatttccttctaatttcagagtcactgtcacaatcacaaaaaatgcctataagagagaaatttcagtttaaacaaaagagagaaactgaaaaaagtgaaaatactataggatataaaactgtttctgtacatatgtaaaattattgtataactaatatataatatcactaaaatctttttaattaataagtaattttttaaatttgatatcaattagccatttagttgtgatttaagttgagtagtgttagtgacttttctaaagaaataaccaatcagccaacttttaaaatatttaatgtaattaaatacagtacattattgatggtgtaaaaattgaaaagtcctgtcattaaatttttgtaaactaaattaatatgttgagaagaagaaatactatgtgtcatgtattaatatatgtattaaaccaaattgatatgttgagatgagaaaagtccaagttatatacttattatacgtatttaattattatacatattcatatagataatcagggatatatcaaggtagatagtacttttcctgactccgccctacctctaatccttgctaaatcagggaactccagctccattaagggtggattcttacgagtccccgtccccatggtgtttatgtaaaatcctacttgaaaggcttgtataggcaaatattttttattcatcttttatttttgatttaatatatatacatatagagattctgagtgttgtacaatgataattatttgaaatgctttcactgtacacttgatttagtaacacaataaaaccaacacaagtctccttggcaccaaggagagagaaagtgggaaaatataaaaagagaagagaagagggtagatggtgccaaggaaaaagaaaaagaaggtaatagaagagaggagggtagatggtgctaaggaaaaagaaagagagaagggaagaaaagagaggaggctagatgggaccaaggaaagagaaagagaagagaataaaagagagtcgagtagctagatggcaccaatgaaaaataaagagagaagaggagaagagaggggttggtggattgcgccaatgggagatagggatagggtggttgtctcttgggacccaccttagttgacatgctattttacttcgtattttaataactatgagattatatttcatgaaatcttaggattaacaattaatttatttgagtttgaaaaatcaagtaaaaaaattgaaattagttttgtttcatttatttaaatataatgatgttaaagatgctcatcaatttaattttaaatttagaacttaaaatgaaaattagttattatcttttccttaaaaagatgataaaatattatatatgaggtaattaattaaattaaaaaaatttaaaacaaaaaccatatgccctggtggaatcttgctaaatgcatgacatagtcagattgactgtgccattcgtgcatactgttgtacgaacatcgaatgctggatatcttacacgcagacttgttgaagtagttcaacactcagttttggccttttaattttatttaattaattgacatatgatcaactaagtgatataattagattagatggtaaagatacatttacttatcttatccaaaatcaatatcaatgatgtcctatgtaataaatacctctgatgtatttacattaccaatgtcttgaaaaacacataccgttataaagagtataagtaaataatatcgtagatttacatgtcagtgtaaatcttactaaatttacttcatcatacaatcacaattatattttattgtgaccacgtaactataattattattttatacatatattctagttttaataaatatttatactaaatttataatcatatcaataaataagtagcaatacatttcgctaaataattctaatatttattcatcttattgataaataaaagtataacataaaccctatcataattttttttattatttatctgtcacacttacgaaaaattgggtagtttcactctacatatctttaaataataagaaaaatactaaaagatatcttaaagtgctaagcaccataaaagataaatttttatggtgtaatttaatgcatgtaaattttctaaacatgaaacatcaaaatcttagtgatatttcaatctcaaaagtcaattatagctgcttacctacaacaacttttaactagtagcttttagcttaaaacttaggttaggttagtttataaatttctacaagacctatatttccttgcaattcacacttctatataataagaaaaatatgctcaagcatttctatctcattcgacataagacataagaaaaaaaatcatctctcataaattactcttttttcattttcactttttgaagaacaatgttcctctacatcatacagatcttcttttttatttatgccattgtttgtcacttgtacaacaagattctaaatttcccaccaactctttttccaactcttccaattattggccacatttacctacttaaaaatcctagttgccttcacagaactctcactaagctatccaagttatatggtccaatatttcacctcaattttggcaactatccagttctcgtcatctcatccccatctataattgaagaatgcctaaaacaaaaggatgtcatcttcgcaaatcggcctctcgggaccacaagtggtaaaattatagcttacaactacactacccttgcaacatcaccctataatgggcactggcgaaaccttcgtcgaatctcacatgaaattctaacaactaatcgtcttaatgcattttcctatgtacgtgttgacgaggtttcgttgcttgttttccaactcttacgccttggagaacagcaagacaagacccatgcattgaacatgagattattattcaaggaggtaaacctaaacactttgatgagaataattgctggaaatattagactttttatttgagcttacattaatatattaaatgttttattaaaatatgggttgatgaatagttttttgtcgttttggtccatattgtttatgatttctagttaatgggcttagcagacgtttttgattaacttaagcttttaatggggaggctaagtccaactagcgttttatttctagctcccctgcctagctcaataattacatattgcctcattacaattctatgttttagagacctaaagaagatgatttattaggtttgtattacactaccaatctcggttgtttattagtcatttctatatagcgatcaagtatgttttctacatcattgaattattcacagtgttctatattttctacaatcttgaattctaatgtgatataaattttctaacatgtggtacagattgctaattgtatatgatttatgacttatattttgtttaataattgattaatatagattaattataaaattcatattaatttcgttattattttatgttaaattttttatgtattgatcttgaaacattacaattattattcctcttgtattaagagttagtcccactttgctaatgtgtggaaataaattnnnnnnnnnaagatgaatgggctactcctcccattgccaat

SEQ ID NO: 43368 - DNA, 2976 bp, Cannabis sativa
gaaatgtttgatcttagcctttgtagtagattcctaaaatctagttaatttgatgataacagagtgtcattattatcaaattatcaatgatcataaattttgcttaatgttaagcttatcagatcttaggtatcacactagtattttaaatttatttgtaagtcaataatgttgcctaacctttttaaaaagaaaaggttgtctaatgtagttttctatacctatactgaattgttgctactccttggaacccaacatatccctccatcagccaataatctaaatcagttatgcatttggaaaactgttcagaaacctttcttagtgtcccatagattgtaatttctctaccttaatctcaaactctcttcttccatcttctgctagaaatataagaaatagcattaactttctgaatttcatgccaagcatttgagatccttgtcaaacaaattcaaacaaatacaatacgcccgcttcaattcttctttattttcacctttcaaagcctaaagatcacaattaatttagttaaagcaatgttgtcaacatctattaaaaggtgaaaaacaagtcctaatttacttacatatggctgactcgatggagtaaatcgctaaagaatacacaaataaaaaaaatccacacacatacatttatataagctcaataggaatgcatgcaaggcacaacatgaaaagcctctttctcaaaatctaaaatttaaatagagaaaaaaggcatatcacggtactgtcaaagtctctactttcatgttttggactgagccaccaaaaagtaaaatatttactcaaggacaagcataatttatctgtcatataataatttttcagaagagatagttatgatagtcactaattgaatagaataactatcttgtattcttatgttgtagattactttattaattagaaactaatgttaaactgaaaacattttctcatataaatcctccaccacattatttgtaaaacaaatacagacagagagaaagagagagaactacctccctatctagcagaataagggtatttatctctggaacagccatctgaagtcacaacaaaggatcagagattcaaaccaaaaataaaacaaaaccggagagatatccaagaaaattgagatattgcattacatcaggcgaactaacgggttcctcttcttgcatgcgctgtagaatctcggaaacacgtactgaggatttgcctttggccctcacattaggtatgacaccaaaagaagactgcagtagtgcaatagagtaaccaaaacataaatttcagctaaattagaagattataaattactgtgtacatgattatacaaaatgggttcaaccacaattgcacatgtgtggagttatcttgtaattagtttgcatatatatatatatatatatatatatatatataaaaatataagataaggctacatctttagagaaaaaaaacttaactaaataaattatgtcatagagagagaaaggtgcaactaactcaagcatatataattttatactacctcaagcttgtgaatgccttttgcaatatgccaaagggagcttgtatcaccatcaacatggcattcctaccacaaacacaatgtataaataacacgtgtcacttgaatccccattgagatatataaaagaaaaaagaaattgtcatactttataagcaagatccagttcaaatgataaaacatcctcatccagaggaagcgtgtacaatggatactctcctatagtcagcaaatggtgaactttctcctcctcaaggatctgtattaccaaaacaatatttttacaaaatctagccaccaaaatcttaagaccattaagcacaaattgcaagctataaaagtattttaacaagataaaatctgcgaccttctcacagccaactgaacgacgaggcacaaaatacacataatattccctctgaagacctttagctatgtcattatgaacatgtgaactaatgaatttcatcaaattaagctgtgatcgaacaaggtaaaccactttagtggagtcagtttgaataggatcagctgaaagataacgcaattcaaccccatgttcctgcaaattagcattgcaataattaaaattttgaaatacataatatttatcctcacagccccataaacacaaattttacatgagagaaagaaaccacttaatcaatcaaaaaattccccccattaataaacattgagtaatgattacatgaaaaacaaaaaacaaaaacagacatttattcccaccatccattttctgtggatacaagcatagaaaattaccttgagaagtgaagtttggataatcaatgagatagaaccaccaagcttctgatcgataaccaaacacttctttccacgaatctataacattacgaaaaaagtccaattcagtactatatagtcgcatatacaaaaatacatatacatttatgaaaacaggaccgtaataataaaaaagaaaagcatgatcaatttacgaaccctgaaaaaattgaaataaaactcacattcttgagaatgttaacaagctccttctgtgattgctccctgaaatatacataattacactcaaaattaacattaagatgtcgaataagattttagtcacatagaattaaattaagtagaaaattaagtcatttttatacctgagggctgtgagattaagcggagcattgtctaaatttggaatctgcgccattgaagcaaaggttgggatttttgttcttcggaacagagttccagagcgatggtgttcgtgcaggtaagagaaagacgatcgctcagagacttcggtgagattgggtatgggcctgcgctctttcacttgggttgggcttagttgtactgggagtggggcccattaaaggtatttaccacaaacacaaaattaaaaataggctaattagcaatttttccccccgaact

SEQ ID NO: 43369 - DNA, 1996 bp, Cannabis sativa
aagaacacttactactagagacgatcttgcactgagaaggcaccgagatcggaccggagaccggtgaatcggcgaggaaaacagcaacgaggccaaccaagaatgataatacgaaaaatgaaactatagggaaaaggagagccagagaccaacggagtataagaaagggcaagctgcgcttccttgttctcctctcagactccatgaaatgacgaaacccaaagccgccttttgagtcttatcgcaaattaagagaaatacgaggagcttctctgcaaactccggccaccggaaccatttatccggtgatcggttagattttcaaagaggagaggagaaatgagaagaaatgggattcatttttctttctttcaattggtttctttttcttttatattttttttcttcacaatgaacctttcatttctttagagcaaaaaaaaatgaacctttcatttcttttttttattattataatttatgaagtgataaaaataatttgaattattaaagtgtatataattgtagagaaatttgtgtgttatattcacgttaattgaaaagtatgaatcttaaaaaattataataaaaaatattttttttttaagattaaatagtgacttcattgaaatattaacattttgagtacaaaagagcttctaaatcagcctaaatattatgctaaaaaatactacaactagaaagatatctagagtgtcatgccacaacacgagcaactctattagctgatcgtttgagaaaacagatattgacattacaaagtgaggatagtaaaaattggcaatcttgtataataaggccgaatgtggagcacatcttatgattgctgcgaatgctttgaacagtgagcatgctatccgtctcaatctcaacattttgccattgtttattttttacctagttgagagcttctttgataccaatggcttcaacaatttctgcagagtagacattaccctgatagcaagatttggcttcaattaatttaacacaccaaaaataagatttaagcagtctgttgcacgcgttactattttattttgtatgcatgtaaaacagacttttcaaacactggttttggtattgtaaattattatgaattttttaaaaaatttcaggatgtcttgttagagagtctcacattgctaatgtgcgaaaaaatagaatgtattagaccatcttcgatggaagatattaaaattgtactatatttggcacaaaaaattagtttgatggtaaatttacatcaaattttagcattatcctccaatgcacaattacaaaattttgatgtaaaatttaatatttaattaatgtttttattaaaaaaaataaaactaataactttattatcaattttaatatgtaagacaataaaataacaatataaatacttcataatttaatgctatagttaattatactaataaaataatacaaatggcataaatgtaaataaaaagtagtgcatttattgtgatgtaaattttacatcatagcaaatattgtgcctaatttggcacaaaatttgctatatgccaaatttacaccattttttggcacacaattggagcacactttttgttaaatgagctatattttagttttacaccacttatttgcatctccattggagatgctctaagatccatgagttattcctctcattattaattactctactttttggatcagtttttagatttggtggctcttttttggctctacttttttgaccggcttttttttattttattttatttattttggattggaaagttgttacaggtttttttttttatttttgctctgatacaatattagaattgtaagatgcatggggtcacatctcaaaacttagttctccctcttctcttccctaaccctcctctctcgaaacccttcttccgcaaccacttccacactcccgttcccacaaccacaacccctgttcttcaagactttcttctctctc

SEQ ID NO: 43370 - DNA, 3388 bp, Cannabis sativa
ttagggtgcattttatcacaaaggaggctaacatacctcgtgcttaggtatctgcatcctgatagagtcgtatgtggataccttatcagcgtcgataacatgggacatgcgagtccttatcgagtcatcgagtacgttaggtcttttggaccaactcgttaggtaaagaaataatctttactaagtcacaggggaagtctatgtaagcatcacatatatttcggtatatgcgtgacttgtataatttattcttggtcatgctttactttatattacgcgaggcgtaataaagcgactagactgtcacggtcgcatcattttgcgagtttgattaaggcaaggtttattctcgaggagtctcttcttctcaggggatgtgagtccacgtctcattcttatgggagcctggtctcgagtttctaggcaaaaaatttgcactataacacatgcccctagtttggcgattgacagctatatcattagggaaactataagatagatagatgagtggttatcacgaggtggtgactcttggttgtcttgttgagtgttttgaaaagacggttgtaattattattttattttttcgagatgccatgtcatcaaaacccttcggggtacgtgcatgtgtgttctttggagaccgttagattagcggaccttaggcattcctttgccacatgtctccatcccaataaatgaggaatattagtatttaaacccccgaataggaaatgatccttactcatttccctcccattttcatctttctcctctttctactcagaatttcaaaccctcaaaattcttctaaattttttgaattctttcctacgaagaataattctaaaggttccatcacttgcaagatctcccaggaagaactgcattttaaggttattgattttctttttctatcatcgcttcctttcccttgagtatttgtatgcattctgtgtatttaggagtagaaaatgtttgaaattatgataggacttataaattattttttgtactttaggcaaaatgttgtatttttttctagcaaatacgttcttgaaacttgaacactcgcgagtttcaggaagaacttcttgaatattcgcgagttttaggaagaactcaatgaatatttgtgagtttttggaagaacttatttagtattcgagtattcatattaatatcttcctgtatactcacggctttacttaacccagagccatcctttttgaccttgtattttagagccctatctgttaggccatgtttagccttaggttatatttattttaatgtgaaaactatctgggtctcgaaatggtgggagtgtcacattaacataatgttcatgcaatcattgcatgccccttgggataatgtcacacgcccaaccattcttgagatatgcgattagttttcattttttcttgcatttttattcgttttcaggacttaccgaattctcgaagtggtgggtgtctctctgtgacttattgttcatgtagccacatgacccttaggatactaggaaaccccctagccacttcgtgagatatacggctagttctttgaaattttactttgaatattataacttgggtgataaatttgcactcccaccacactgaaaagatcttctatcttttagatgagcgacttgtcagaccgccagaggtatgactctggagagggggcttcgcagacgagtcaaaaaagagcgacagctttataccaaactcattgtttgaggatgagatccccatagccagggcttgagggggttcgctgtccacatatgagatagactggatggttcaagaattagcagaacaagttacctttgaggtgcgagaaaatgactccacggtgtttgcccaaggctactttgtgcatccacggatttccccaaacgtggaggtcgaaaaaatgggtgaggacttcgaagtcccagatcgcgaggtgcaagatgagacagatggcgagggtagtgagacagattcagtggacaatgcttagttagaagagcctttttcctgcaaggacttagtctcatgggtcaaaaagtctgacttgaccacatttccaaagttgaatttcattcaaactgctacctcgaagcccctaccaatgtaggaacctcttcttccttttaccaacctagcgatcattccaagtcaaaatgttgtggtttcaatccccattcttcgctgcggtgtgatgcttccttttcacccttttgtaaaggccatcttaacccattacgacatttcacccttctaacttaccccagatagttattgcataatccttgggttttatgtgatgtgtatggaatacacgcaaggggaactcacaattgaggattttagctttttccatgacataaagagtgctggccatgataatggcttctactgcattagtaaatgggctaactctaaaataaatggggtagaaggcacgatttctaatataggagattggaaatcaaaatggttttatgcatttaagatgctagggatcagaattgacttcaatcactgacctcgtatgtcgcatacttttatacttagcttttgtttttattattctacagacactaatatcttcttttttgttcgcaggtagactggctcgatctgtattagatcaaaattgtttggaaatcgctgaagttttaagcggccttcaagttcaagatcgcgactgacaattactgtgcacttctacgaagctacgagaacacaaattaattccagcagatgccaaacttcaatgggaaccattatacaagagccttctgagaagcaaaaggagagaatagacaagcatctttccaagcagacttcgagacaaacatcatgtaatatgatttagcaactactgataatattgtcttaatgtttaaaatttttaattttgtacttcttttcccagatatgaatttccttaagcaagctccttcttttaaccacaaactgaaggtcaacattgcgactccttcaactgcgacacctcaaaagaggaagagtgaggtctccacttgtaatgactgcatttgtaatatggattagtaaagaaaattagcactaattattggtattattataattatttgtggatttaatttatttgtaggtcccattgttagaaatgggcattagagttataatttctcaattttggagattttattaaactctaagtgtattatttgaattatatgtgaattatgcaatttttataatttttgctcgttgtcaacggaaaatgtgatggatgactactttgatcacatgggtaagtctagaaccttatttcttagtggaatgtatgatggatgaaatagagtaccggggttgagcggggttatggattttgaccattt

SEQ ID NO: 43371 - DNA, 3537 bp, Cannabis sativa
  modified_base (2204)..(2223): a, c, t, g, unknown or other
  modified_base (2924)..(2934): a, c, t, g, unknown or other
ttttaacaaattaaagttgactttattaaaaaaaaaaaaaaaactctcttattaaaataaaaaatgaagttaataatttttcatggttcttctttagcatcaagagtaataatttcatggatctcctttataaatcaaaattatttcataaatcaaaattcaaaaaaaaaaattaaacttaatttaagatcatttttaagtatgaatactttcaaagaagatcccaaaatacattattttagaatcaattcagtatatataagaaaaaagaatgaaagagatcattctagagaagtaattagtaattaacagcaaaaattaagaaagtgtattaacttctatttattattattattttaaaaatggttgaaaatgtgggatgattgttacaattgctagatgtggatggttttttttttaaaaaaaaaaataataaataaaaaaaagttattaatcttgtaagagataccctattataaccaaattaattaccaccattaaattaaaaatcaaaagctacaaaaacattctcacttttgaaagtaaaagtaatgcgctcacctaaggagtaccctatataagtatatgtgctaagaaaaaatattccaaaagtgtgatacaactttaattgaggtatcccatttttataatggtatttattgttattatagcaagtctttcctaaatttttttataaaattctagataaattttggtgtcaaaatcggagtcgttacaactatttttctaacaactatttggacaataattttaacaccataaaattatttggagtcttaaaaaattataacgtttgtgatgactatatataataaacattatcataggaacatattaatataataaacaataaaatacaagctttaaatagtatataaagtatctcttaaaaagaaataaataaataaataaacattataggttagttaatatgtataatacctgtattgcaaattggtcttttatggtgataatagttttagaggagtggcgtacatagagataattgttataatgggaaatggtaagagtgagtgaggtggcatcatcagcaagcctaaaaggtcttttgagtgatttagaagatggaatccatacatttggaggcatcatgaagaagccatggttgcatacactcttctccatactaaaatctttactacaacttcctaatccaactgtcatcaacaatattagtccctcttcaccaccgccatttacaatctcatctttcatctttttctctctcttttcaaataattcttccattctcttctccatctctctctctctctctctctttcacatatatggcctttataattaatcaatatataatcattttttactaaaaacaaacaaaggaaataggcattagtatgttcaggcataaattatgcttattttatactcattatttctttaattagtttattattttacagatatacaatatttaataaaaaaaaaaaaaaaaaaaagcataccttgttacctaatcagtcaacattatataatattcattaatttgttttttcagaaaaattaagtaataaaaataggatccctcttttttatttttgacgaaattaaagatccctttatatctttcaatagtaacaaattaattagcgaaataattctttccaattatatctttcattatattcttcacaataccttaatagcaatagtaataattatcagataaaatggtattaatgaatattataattaccaaattccctttatttttcacagcaaaaaaataaaaaataatattaagtaagtttctaacgtgaagtactaataatatattaaattatcttccaaaattaaatagcaaaattttaatcaatacactttatttctattttggttgtttacaaatcaaattagtcaagcgagtaatttacaatcattcttaatttctaatttatattaattggtcatcattatagtacagtaatattttagtgatatataatatttaataataaaagtcaataagtctatataagaaaaaataataataccaacatggaagaaatttaataaccatatatacacataaaaaagaaactatatttatatacatacttatctattttatataaaatatggcgtaataaaatttttagtttcctacattaactttaacagaatattctttattaattttnnnnnnnnnnnnnnnnnnnntaaaaataaaaattatgtagataaaaattatataaatatttatataaaacaatttagtttaaatttaaaatgcttaaaatattgtagatattctatataaaaaaattttaataaatattttatattagtcttctagtcatatttagtgtgtttatattatttatttctttttctttcttttcgatcaatatataagtggagtgaaacctaataatttttataattttatggatcgatgcatttcacataatttttgaagatacatgatcttgaaatataatttatataaattattttttaatatcaaaaccaaaaatattttaagtcaaactatatttgtaaggtaagtcaaacttgatatatcatgattatatgaagtactaattattgatacgaggcatatatactaatgttgctacaatagttaaaaaaaggctatttagaatttttgcccctgaactttgacatgtacctaatcatgcctctgaacttttaaggtcgtaaaaataccccctgaactattaaaattgttggatttgaggacttttttccaattttaataaaaaaatctaacatggatgaaagttcagaggctataatttaaaacatgtcaaagttcgaggggcatgatttgataaatatcaaagtctaggaagtatggtttagtacttaaacaatcactgaaatagtaaaattgaatnnnnnnnnnnnaaagtccttaaatccaacaatttcaatagttcagggggcatttttaacgaacttaaaagttcaagggacatgacttggtacatgtcaaagtttagggggcaaaaatcctaattagcctaacaaaattctctaaaatcaaaatctcaaatctcatttcaatttttttttttaaaaaaaatacattatttaattaaaaaaaaaaattaaacatatacattgcacttaacatcacctaattaaacttaattaaaagaaatataattacacgtaatatcaacctagttatattatgtatacaggaattatcacaatttaattgatacatatcaaataaaacgacataaataaagaaattaggaaagttatactaattgcaatttatatattgagaagatatatatattgattgacaaaaaaaaaatacataaagacagtatagtaactggaattctaatttaatagtataaaatgataataatgaggattaaaatgaatgaatatcatatttatcaaagggaaatttgatattatatgcttaaaattaatttattcactaaaaatatactcacactatttttctatccaattttacccttaaacaaa

SEQ ID NO: 43372 - DNA, 1742 bp, Cannabis sativa
atatatatatatatatttatagcagacagcagcaaaggataagaggtagctagatatagagtactgcctaataataaactcaaaatcttggaggacatgcatccaagtgaagtgatattattgatgatgacgattattgacgactagtactgtagtttatgtccatttatagtactcctcctcactatgctataaatacatactaaatttgggcatatgtacatatttgatatttgattcccccaaagctcattattattattattattttatactgttaatttattttctttgcggctcatgagaatgtttatcttgagaacattggatggtatgtgtatacaaatacattaatgcgtacgtattttaaatgattgactgtatttggctcagaatagaaaatttggagctgcgcaaagaggatatggtcgatactagctgtaaactaggtgctattctataaaacgacaacaaagtcagggatttttctaagtcactatatatgtgcccaatttattagtaaattatatctgttattatattcaaccattggcctgttaatttaccatttcgatgttcttcagtcagtttgtttccatgccaggaaggattgaccaagaagattgtagcaattttattgtcgtttctagcttttcaaatcatcttactgtcgtttgtattatcattatcgttagtggattaagaaaggaaaaaaaaacttcacttcacttttttttttttgaaaataaaaaaacttcacttaaaagaaaaaaatggaaaggaaaaaatcgctttaaaaattctttataaacgtcgacagcagggttcgaacctgcgcgggcgaagcccaacagatttcaagtctgtctccttaaccactcggacatatcgaccatgccgaaatattttgcttatttatataatgattcataacatcataaatacttaaaattttaaaattataagcaacataaattctataattgttttaatagtataaatatctattatttataactttaattttggttcaattttattagtccaaattttattagtgtcttaaacaggacatacataaaactatattctaaattattaggtttagatagaagtatgtagtattaatttcttttaaatctttttttaataaattcaaaacagagtttatactgactaaactagataaaaattacagttttactaatttaggatacttatgccactaaaaaaaattattcagtttatgctaactacaaactcaaaactttaagtatttatggcgtaattttctttttatttaatatggtgctttatattattataaaatactttagcataattgattaaactctatatctatatttaattgttaatttatataatagaatttgacacaaaatatatataacatggctaaattttgactacaacaaatatgtcacattttttattcgctcatttaccaatataatttacaaggttaaacattttattatttaataatttaaaaggaaattttcggtataaatatctattttgtacaatttattgctattaaatacccaaaatttaaaaatagtggcaaaagtgctcaaatcctcaatttctattatttctgttagtacctattttaacagttctgttaagtcctccaataatgccacatgttgatttccaattggtatattattattaaaaattattaaaataattttaaaatgaaaaataaataaaaaaaa

SEQ ID NO: 43373 - DNA, 3344 bp, Cannabis sativa
gatagtattgcactatcaaattatagtaactactatggatcaatcacgtacacatatacttaattatcatatattgttattgtgtactatattatatacaaataaattttgggtttattgttaatttatctaacaatactctcattagtatatcatctataaaaaattgaataaccgtaatagttataacaataaataataatatacattttatcatatgtttatatattgtattagaacgtatgcatacagaatattatatcttagatacaataaattcaaaggagtaaatccaatatatataatgttgtacatcaaaagataagatcacgtataagatacttattttgcacttctaaaacctttcttctaatagtaataaaggtgcacttactaaacttcaaataatatataatagaaaagattcgatcgacagctagctagccctaaaacttagaatatacaacttagaatccactttatttttggctataaaaagtttgtgacatcatgtatatattattacttccatgcatctattatcaaaccctctctcgaagctaatatataaaaataatatggggcataataagcagggaagagtgagtgcaatagcaacaggttttgtgttgatggtatttctaattggacaatcaggtgtaatgttggcaagtgctaccaaatacgttgttggtgatcgcaccggcggctgggcttttggggttagttgtaactggccgcctcatccagggaagcccatatttaaggctaacgacacacttggtcagtatatatttataaaatataggcactaaaatatgtactactgcaaattacaaaatatagaagcattaaattaatttttgtttggtattattgtgcatatgtgtagtgttcaaatacagcgcaggccatcacaacgtggcgcgtgttagtaaggatggttatcggaattgcacggcgggagaaggtgctcaagtttattcaagtggaaatgataagatacagcttgtaaagggcaaaaactacttcatttgtacttatcctaaccactgcacttttggagtcagacttactgtaactgcaatttaattgtatatgtatacgcatacatatataatagatattcgtgacatgatatcacttaataaatcccacctatatatctcttttccgaaataataaaagaaaaaacacataaacttctgttatttatttattattttacgtggaaattataagctgttggcttgtattttagttaaataaatccaatgaaaatatcttatttcattgaaaagcatttaattacatgcgagtaagattaatttagtcaaactaactcatgagattgatataacaaagtttaccaacagtgccatatatctcctatatatatatgataccatcaaaagcttcctatatacaaaacggagtataaaggaatttttacattcttactttaaattattcgaatttttatttttcaaaatttataagaatgatatagtgtaattataaacatataaaattattgtgtagagaaaaattagaaaaaagaaaatactaatcactactataaaatggtcttttagttttgctttatcattagctttagcttcggttttgacaaaatttacaacgtctaattttattttattttaattttgaaatctaataaatataattttaattttttccaataacatgttattggaaaaaattataacattaaaatataataatttttaatgtataacatactcacaatgtcattaaaaactatataattacattttaaaaatgttattaaagtgaatatgacataagaaattataactttaaaaaataaattttgttaagaaattctaataacattaaaatatattattattaaaatttaatgatgatatgatatttcctttcattggtgagcaaagatggcatgcatctaatatatagaaaagatatagcattccaaagcatactttcattacttggttaattgcttggaatcggctgaggagtcgggacagattacttaaacaaggaatgcatgtaagtggagtcaatatgtgtgatttgtggtttagagaatgaaatacatgaacatcttttcttccaatgcaacttcagcaagcagtgtcttcaggaaatacttcattaggctggtatgggatcatatcaatgtaagttcagaggattagtcaactggattcggagatgcaaaggtagcaagttaaggaaagagatttatactttgatttttaattcttgtgtttactcagtgtggaaaataaggaataggtgtctttggtatcatgaagtgctcattgtgttaaattctgtcaaaacagttaaaaaggtggttgtaaatagaatatatagtcttgatattagaaagatggcggatatagatagaagtcggtttaagaatatttgtaaaggagattaatttgttgtaatttgttattagcgagcaatataaatgactgatttacccaaaaaacttatatgattacattttgaaaatcttattaatgaatacaacataaaggaccataacacactaaattaatgttaagtatttataatatatgacatcaaaataatattataatatgttatttaataacatgtgaaaaacgtaattaaatgtcaatacttttaattacatgagttgttttaacacttattaaagtgttataaaatacatttaattatacattttaagtgttattgtaaatgttttttcttgtagttgtattcacctagagtccgtgaatactcaaaataaaataacgaataacagaatgaaaatagtttatatgcaaagggcaacatagaattaaagtggttcagtcacatcttagtctgcttattttgtatgagattaatttgttattttttttttattttaggttggatcactcctttatctagaaagcaagtgatcttttggattacaaaaactggtcagacaggactaatacaacatcaattacatataattaagatagaaaatgtttatagaataaatgagagaacagtttcgagtgttcttatttaatatttgaacgtatatactactttggaaatttcatattgaccattcactttcttcagtaacatatgaatttccaacctatctggtgtaactcgtacataaggtattcggaccacttaaaacctcttgggattatttataagatagaagacttgtggctagactgatcgcatatcgggcattcatgttttgactgttggaagttattttactaggatttagatttactataacatgtatattgattagaattacaccctaaatatgaatttcctaa

SEQ ID NO: 43374 - DNA, 1689 bp, Cannabis sativa
tattttactctcaaaatgatcctatttataaagaaaaattcctccaaaaataatatttttcgtgttaaacttaggagagaaaatgactaaaataagtgctgaagtggaataaatgttgcgagctgttaatgatttgagtaatgggcttcttcttcattcttgggagatgacatggtcgttgggatcattcccaaagtttggaattatatttgagggataatttcataaatacacaaaaataataaaaaaaaaattacaaaaatacggttttatggaattttaaacatttttacgaattttttaattttatttacaaaaaatacgatttttttatgttgtattcatgttaatttattgttgatttttttgttatctgtatatttttttttttttgttatttttatgtagttttattattattttggtgttatttttataaaaaaccgtaaaaatcattaatgtaatttttttttacaaaaaatagtaccttatgtaattacccctatttttaagggaaatttatatggtatactaacttttatcatttttttataaaaatactgtcacgcggtattttttacttttttactgtttttttataagtttcatactgtagtatactgtattaagttttcactggtattctacggttattttttagttgttctactgttgttttgaattgttgctttgtattttactagtgttttataaaaatacagtatttttgaaaagatttccgtatgagtatttttgtagaagttaactcaaattgcagtatttttgtaaatgagttggacatgaaatttattagatttggactatttgagaaggaactgaagtttgaacgtaggcttcaatacttagaatgataataatagatggtaaggagtgaacaaattgaacctgggcatttctttctttttacaaaaataccaacctttgatatgggctttcaaactctaaacatgccaatatttcatcaactaaaacctgaaaaatgatacaaaattaaaataaattaaatattttcaattaaaataattttataattaaaaccataaaaatatttaatttaattagttttatatataaacaatctaaggtttaaaatatataaatttgagtcttaatcacaacccttaactagcttattgctagtctctaacaattcaagaaaaaagcaataatgtcaacgtaatattcttatgtcaaaaattctaagaattacaaaagtattcaaacaaaatgctattaccaagccaaaaagaaatataaaaattaccttcaataaatttagagttgtgagtgtgtacaccaaacttgaaccttatttttgcaaaccataacatataaatactttataaaaatataccaagtgaaagtcttaactctattagcctcacatgtctttgaaaatatttatacatggctaaggatttcactcatataattaaaaattaagaagtgagcactcaaatagataagtgaattatacgacaaacaattaaataatcattgaaacaaatataggaaatacattatttggacaaaccaccataaagaataccaaaaactagctttacgagattttaatgaaagaatagataatctattacatttattcttggagacatattaacgaaaaaaaaataaaaataaacaacacattgtttttttttttttttt

SEQ ID NO: 43375 - DNA, 4261 bp, Cannabis sativa
tttctttattgtctggaaggagatagcttctctatccatcaccagctttgtgcattagagatggcatcttttggctgttaatctgtaatatttttaagagaaagaacatgtttttttgcttatatctggaacttaatttattaaaattattctctttcaggatattgtcattggaactcctggtcgtttgaaggatctgattgagatggggttctgctgtcttaaggacgtaacttttggggtaagtggaaacttatattaagacattcatataagttgcccttgagtttatgcattctgaaatgtttctctgggtgttcatgtattttatgctttcattgatattataaacaatctatggcatgtttggtgtgctgcaatgggttttgtaatggaatgaaagtatccattactatgtttactttatcatttttgttgtaaatataatcttctcccattgtaatccttaatacattggatattgtaatactctttacatctataaagcttataaaaatcaatttaatatgaaataattctaatacccttatacatttactttaccaaattaaaatagtgatatttttgtcaatgcaccatttattttattacattttcacacaaaacccaacaaaataatttttattccaatgtttcttccaacataaaccaaacatcataatcaatttcccctaccattcttattccattccattaccattaccatttctattattattacagttccattacaccaaaccaaaagccacctaattgttttgatggtcttttattttatcaatggcagtttgttttcctagtagtatggtgccattaatactattactgggagatccactatgttatacttttcattttgtgagtatgttttaagttatatggtgtctgcttttttagcgaaagatttatttgtatataatattttgatggggattaatgaatatagctgtagcagtatttagttttaaggaaagttaaaatgatcggttactttctgtaggtccttgatgaagcagatagaatgctcgatatgggatttgaaccagaagttcgctacatattgagccagacatgttcaggtgtgtggcatataatgtctttattttcaagttatctagttggtcagatgactattgaacatgtttatctcccacttaagttttcacgaatcacttgtaatttctgcctttgttgaacaacgtgtaaatgaattgaagtttctgatgactatgtaaatattactggttgtataatctcatggtggttttaatttttcattgccacttcttttcaaggaaaagttttctgggtattgtctacagattaaatcaatcatttgtctgacatatatggcatttttcgtccattggagtattttgttgagggatgtaggagattatatattacattgaataatatattttctaatttcaatattttttagcttttacgttttacatagaaattcttctctaattccaaatacttttagcttttacaattctgcatatgtcactttattaaaccttattttcatttgtttatatagatctctctcttaattttttttttcactgtcatggtgtagttcgccaaatggtgatgttcagtgctacatggccgttcgaagttcatcaattagctcaggaattcatggatccaaatccggttaaggtgtggaatgttgacctttatatctttaatgacaattaaataattaccctatcaagtactaataaacattgtctcaggttgttataggttcagaggatttatctgcgaaccatgatgttatgcagatagttgaggtataaattctcaacacttatgttgtaattgatgaagcattttccaagtgtctactagaattaatgtgccacctttacatatcaataggttctggaggagcgatcacgtgatgcacgtctgattgctttgctggagaaataccacaaatcccaacaaaggttttttttcctatatatatatgttttttttttcctctgctctagtttacatcacttttgtatctatgctcttgtcattgcaaatgaatgaaaggaactagctcttgtcttcaattttttgtttttagtgtgcttacctggtcctcatactggcattctaggttgtaaatctaatgataccccatcctcttcattaaatctacctttttgtttcccatcacagcgaacaataattagtttgttcatgaagaagacctcaagtactattttatacggataaccttctgatctcatagttttgcattttttctttctttctgaatttatcagcaacagagtgttggtatttgtcttgtacaaactagaagcaacccgggttgaacatatgctgcaaaaagggtaagctctttatatttactacataagtttgatgcatttggccaagtcaataattccgaaattggtacaatatgttggtaaatgatcttgttagtctctaatggtatgtaagattttgttaataggggttggaaggctgtttctatacatggaaacaaagcacagactgaacgtaccaaggcactatcattatttaagaatggagcctgtccattgatggtatgttgcattcttgtttgatatcattcaatacaatgataaggcaatgtcaataagatatctgcaggaatttttttcccctcatgtttgaataaacagaatgtttgtcttccattataaaaaatttgatatctgaagttttttctctcatcttctgttatatatatttcttttgaaccatatccctatgtacattccttttccattttttttcttttctgatacatcggggaattaaaccccctcttccttccccaaaactcaagtgtgaggtagcctctgagtggcccctttcacattttattgtaataaatcattagtaccttccatcagtttaagatcctattgtttctgatatattgttggggtcaatcaatttgaaaactatcttatgtgtttttggtgaacattagaattttcagaggtttgtgaattaaatgcataaaaaagatagaaacatcgatgcattatttggtggcttccttctgagttttatattttttgacatccactaaatttgtgctcaacactataatgtaactgtattgttctgtctcaaagcccactcgtgtacatgcaggtagcaacagatgtggcagctcgaggattagatattccagatgttgaagtagttattaactatagctttcctctgacaacagaagattacgtccatcggatagggcggactggacgggccggtaagaaaggtgttgctcacacttttttcacccagcaaaacaaggtactttgaccatcttacaaactcgttcaatttagacaattctcatgtcatattgcacattagcttagaacttccattatttcaggaatacttgaataattattccttctgtgatacttacaaaattcttttataaaaaaaaatctgcaatcatttcagggactagctggggaactggtaaatgttctcaaagaagctgggcaaattgtaccagtttccctattgaagttcggcactcacgtaaagaaaaaggtgcatattctctcttcttcaaagataattttctttcaatcagccgaactttgacttttttagttgtgttattatagatgaaaaagaaggaaagcaaagaaaaaaaaaaggcctagtgttttcatagcatattaataataatcattatttggaaaaatacaggagtcaaagctttatggagctcacttcaaggaaattcctgttggtgctcccaaggccaaaaagattacatttaataactctgacgatgaagactgaatatttgattcaattaaactctttggctcagtaagaaaatagccaaaagaatatagatatcctagttgcaattagccttcttaaattcacgttttctcccccttcatataaaatttgcaatattatgtttctggaactcatgaacttagctttatcaaagctttggtacgaattttggctggcaagtgtattgtaatgtttcctgtttttataattttttttatataatataaaaaaaaatcattttttctatcttaattggaaccattgcatttggtgatgtgcttgtatagtgagcattatgatatgacagctcccttaatgtcaattacatttgattttttttattagagactagggaatagatccgctctttgcgcggttttgaataattttttta

SEQ ID NO: 43376 - DNA, 1607 bp, Cannabis sativa
tgttgctacagcctacacatatttaaccattgtagttttgttccattccattatgtttttgaaaccaattccaccatcatttttgcatcacacatcatgtcccatgccactgctccagcccctattgttgatgtttggcctttccacagaaaagctctacaaactgctgcaatttcccttagtatctttttaggaagcaccatgatctgactccaatatgaatgcattgtgagcaacacagtattgatcaacattgctcttcctgcaaaagaaaggtttctcgaactcaaacttttgatcctggctgccattttatcaacaagaatgctacattcctttgctgatatcttttttgcacaaatgggtatacccaagtatctgaatggtacatgacttctataaaaccccgaggcatcaatcactctttgaatttctttagagtccattccactacagtatatagctgacttgcttggaattggatttagacctgaagatctggaaaacaatttcaatccctgcagcatgaaataaatgcttttatagtctcctcctttgcaaagtaatagtacatcatctgcaaaggaaaagatgatttagcttcagtccagagcatctttcatgatagccaaaatcctctttcttccctacttttttgcataatcctagataaatattctaggcctaaaataaaaagaacgggagacatcgggtcaccctaccttagacctcttcttacatcaaagaaatcatggagagatccgttgaatagcaatgagaactaaggtgtactaatgcaagtcattatcagttgtatgaatttacttgagaattggaaggcatgtaccatttcttgtaggaagtcccattcaatgttatcataaactttctatagatctaacttgatcatacagttagcttttatcgatttccttccataatgtctccctagatcctagcaaaccatgatgttgtgagcaattgacgtcccttttacaaaccctccttgattctgagcaataatttttggaaaaatatgcttgagtcttgaacatattaatttggttgctgcctagtatagcacattgcaagcaattggcctatatttattcactgcattaggacatttaactttaggtactaaagctaagagtttatgtgattataaggtaaataatttatttttttgcgttttattttcatcactaccataaaatgagcctttagaggtaattttttcagtcctatagaagcagttttggagaaatttgcaactgttgccattttagggattgctaaagtgttagagaatctattataatggaagaaaattaaaatgtattataactctatcgtaaaataatacaataaactaaaataaaaaattgattaaatatatgttacaatacacatatatatagtactatatatattgcatatatatatgaaaggtagaagaaaaaaatacaacacatgcaatataataaatatacataacaaaagatgaatatatttatgggtgcactcttaatgggtaaaattagaaaattttgagtttttatacttaatttttctatctaattaaaaaaattctctcatttttatat

SEQ ID NO: 43377 - DNA, 2835 bp, Cannabis sativa
aattttttttttaattatatataacaatgtatgagaaaatgataataattttttttttcacattttttgtaattaattaaaataatgtatacaaaattgtaaaatgccctaaatttaatatgacgaaatatgatatttaaaataaaaaatttaacaggttatttatattaccataaaaaatattaaaattttcttcatatatttttttttttaaaaataaaacaaatgaaactacagtgatcgccggaattgtcactagtgctagaaagtcaccagagtttgctatcggtgctgaaaaagtcaccggaattgcactctgatttatttttgctaaccttttgatgtgaaacggacaagtatcgagttctaacccgtgaacctatacatttttagagccatcacatagttttacacacaccaactactctacaaaatgtcacacctgaggaactaatttacactcctttttggtccaagtgtatcatctccctttcctaagcaagactagaactttggccaggaaactaggtgatatgataggcaagtttattgaagttcatgaggactctttaaatgagggttggggtcgtttcctaagaattcaagttcgtcttaatatcaccaaacctttgatgaggggtcaaatgattaaactaagacaaatagaggacaacttttgggtggaatttcactatgaacgtttgcctgaatggtgtatggaatgtggtactcttgaacatcactaccaaaagtgtctaatttttctggaaaaacttgacaatggtacagatcccgacttggaatatgagcctgaacttaagggtgctgcactaccaacatctggatataatcgttaccgaactaatttcactaaaggaaatgcacgaccattggttacaagacttgctcgacttaaggttgtcttcctcttttttttttactatgtaacaccttcaatgttttacacaaaaactcattctcattttctaaaaatgattgagatagaagattgaaggttgaaataccatcatcgcactcaattattgctttctcacttttgtttgcctctacaactttttttattttcatcattaacacgatccatgcttctagatccctcgtttgcttccttgtcttgttttccttctttcatttgatgaatttctacattagaatcctacaaataaaaatgggatacgacttttcaccaacgaaagatcctcattgatgaggaatattgacgaaaatagggctttttaccaagaaatttgtcctcattgatgcacatttttcttgtagtgtcatttttatttgatagataaattataaaatatagcgtaataaaatatgatcattttgtaaatattatacatacttgtaaaacataagaaaattttgataaaagaatattcaaattgaattagattcaaaaaatttacctataaaatctctacaatattattatgacaatctagtctgataaaaataatattaccagattttaattcatttgtgcactcgtgaaaattcctttttactttcatttaaaatgacaagatcttcaccgctttccttatcattttttttttctctcaataagttctcttctctccaccaatattctccgccaatcacatgacaagtttctcaatacttttgaaacttgtcttcaactcgagaagatctataaaatattgcataaacacatcaatttattttcttaggacagttatttcatcttttatttcataattttcgtttgctatttcaacattttttttttcttaatttcagtatttttttcttctctaatttcaggattcaattctttaagtgaagcactctctttcattaaatcctgcaaacgtataaaaggttaaacaattttttttttttttttttataaatttgtaaaccatatgaaaataataataattaacaccttcaacaaaactgtgtgttcatcattattcatttttggactagatgaatgatgatttacttcaatctcttttcgcaaatctatcattctatcattcattcttggactaaaagaatcatgatttaatccaatttgatccgtagttgtacttcaattatcatccataagagccaaaggaacacaactaatttttgttcaaagatagaaaaataatatcgtatgagaaaaaaaaagcatgaaattaaaaataaaataattaataattacaaaaataacatagaaaatataagatacacactttattttttccaaaaacttctttccaaattatttttaggcgggagctacgttgcatattggtcatcttccagtttaaaattttaaaaatgttacttctaaccttaattccaaaaaataaatctaaacttggacgaatttcaaagccccaaacttgaaaaactaatggagatccacatatctcataccttattttttgatgattcaaaatagtagaaagactgttaactgtgtcattgaaagaacgacgaccccaaggatagttttcaaacattttttcatcatcaaccaacactactacaaaaaggagtattttcgtcagtttttaagtgacatataaagattttgcgtcggtctacaaaaccgacgtgtaagccgtagacgcaaatagttttttatttgcaacgtttctaaagtgacgcaaaaaacaattttcgtcattttaaaaccgacacaaaatatacaatgttctttataacattttgtgtcagtttggaagtgacgcaaaaaaagtttgtgtcatttcaaaaccgtcacaaaaaacttatatcgtcggttcttacatgttgcataacttgttgaaatacttttttttt

SEQ ID NO: 43378 - DNA, 2723 bp, Cannabis sativa
ataaaactaatgcatgaaaaaaaaaaaaagaaaaatacagatttttttgccattaatggcagaaaaatttgtatttttttctcttctttttacattcccgatgatttaaaatcgtcgcctatatcctgttataggcgacaattcgaagtccacattagcaacggtttttaacagtcgcctattttgcccgttttgcgacggtcgtataggcgacgattatagaaaatgactgtttaaaaacgtcggaaaaaactatttttgtagtagtattgactcagttttgggagaaaaattagaagcttgaacatatgttggccggaagagtgggtccccatcttcctcctagagcaaattatttaacaattatttctaacacattcttttatttttactcttgccaaaacaatactataattattattttacttttatttgttgttgttgctttttttttttcatgttgggaagatatttaatagctttttctcgggcttctattatccttatttctttttgaacatacttttttgtgggtagtacttatgaatacatatacttaaccatatttcattactttttattatgtatttatacttctagtatccctctaagtgactttaaaataaattttgggtcacttagtctgaatgcaaaaggataacatatattacattaggtccttagtttgcaaaaagtgtcattagcttgaaaatttaaagatgaagtcaaataccaaactccaaactattaatagtacttgcggaggtgatcaacattccatgctcttagaattagagatccatccatgtgctttagcttgtaggtcccaaagcttattttatcttcaattttgtatggtccttcttaatttgggccgagtacccccaatcctggttcttgagaagcaggaaatgctctccttaagaacagttctccatatgcaagcttctggtctttgacttttgagttgaaatattttgccactttcctctagtatgctaccatgagtatttgagacttctcccggagttcttctacgagatctagtgattcctgtaataggacttggtttgtagctggatcataagtagttcttctatggaatgggattgtacttttcacagggaccatagcttcacatacatacaccaatgagaacggggaatgtccagtggttattcgggtgttggccctgtatgcccatagtactcgtgaaatctcctctggctaattatttttgcaggccaagagttttttcttgagggtgacttttaatattttattcacggtgcccgaggccttgctactgtggagaaacttttaataactctgtatttctcacaaaattctgtgaatgcatcacagtcaaattatttactattgtccgagactatcttatggggtagtctgtactgacagacaatgtttttgattactaaatccaagactgtcttggctgttatggattttatcagctctacttttgtccacttcgtgaaattgtccactgcaattatggtatacttgactctacatttttcctttgggagagaccctatgaggtcaatgccccatattgtgaagggttaagggcttgtcatcaatgtgattttatttggaggggcccttgggatgttcgcgaacctttgacacgggtcacactttaggatgtagtccatgcaatctttcttcatggtctaggtcggggttggggtcggggtctggagttgggatcggggtctggggctggggtcaggctttgagtctgtgtccgaggtatagggtccagggtctgatgtccgggtcgaggtcgaggttcggggtcgaagtctgggtcgaggtcgaggttcggggtcacatgggttctattgtccgtgtctagggttagagtatgtgagcaaaaatataaaatataatatgttcgacaaaataaattatttttgaaaattaaaaactacattttaatattttctgttttctaattttttaaaactctatttttaaaaactgttttttaaaatttttaccaaacaacctttattagtttttaaaagttgtttttctttttttaaaaataaaaaataatttttaaattatgaatccaaacagtctctaaatctttggccaatagactaatattgttttagtgttgtttaatattaaagtataattttgggcaacttgtggctcactaacttgcattggtgatgctataataaccaaataaataataataacaaattcgtgagatatataattaaaaacacacatttttataacatgtatttgcaaattgttcatcataaattactataaagatggttgttgtacgatcgagatgaggatagtgctatataataatataatgttaaagttagtacttgtgtgtacgttattaattataaactgatttacagtctgaaactgctttattaattaggaagttaccatgcagtttcgttcgcctacaaggaaacagctagggaactttcatatagttaaatcctaatatacaaagctagttcctatatatattttttataactaacaaccatttatagaagagagtagtactattctatatcgatcatcttacataattaattaatggaaaataagtctatgcatttgtggatgttggactttgcaaaagctctaataataaccacttcatgaaatgtcacggagagcaagtgaccaagtgggaatcgatccactatata

SEQ ID NO: 43379 - DNA, 3827 bp, Cannabis sativa
agtaagtatacacacaacgtggcgtccctataaattagggcgttacatcagcagtctatttattgaaggaatcattattgagtacgggtggagaaaaagtcagttgagatccagccacttgaaaaagatttgatgcaattgttgtagtagtaacattatccctggtcatagtacttggaaaattaaactaatgtgcattgtgattatgtcgttcctagtttgaagatcctccaacaagaagagtagatggttgaggctgtaattgttactgcaatttaggcaatgttacagttaatgatttacgtgctagtcttgtaagtaaaggctaagcattgcctttggagaagtctgttttgtaacgatcgtaggatgatgttggaagttttgaacccttcaatgtagggccataagccaattctggttcaacaccattgtccaatttttccaaaaaaaaaacagagcatttctaatctggtggccaataatttcacattccatacaatagtcgaggagacgctcatattggaattctacccaaaattcatccttgactttgggcagagtaaacattcttcctcgtagaagaggcttcgtaatgtcaattcgatccctgaaccgtaggaaaagaccccatccttcattcaaagaatcttcatgaatagccacaaattcaccaaggatagaagccaaagatcttgctaaagttttacatttactcaaaaaaaggcaatcggtatgcttgtacccaaaatggtgagtaaatcatagtttcaggagtaacattttgcagcaaagttgattggaggagcacaagatggtgattctgaaaaatgccatggctccttgtctaaagccctaaattggtcaccttcacaaccaaaataaaggatgaacaacccaataagatgttcgttggtattcaccttgaaacgaccatcccaatgctcgaccatttgtctttgaaatgtacttagccacactttcttattagtaagaatacgagccactagaatgaattcatgagactcttcaaactcagaatcatcatcagtaatggcaagaattgtactttcattttcagttagggagatagcagatttcattttatgaacaaaatgattcattgatacactcaaggaagaaaagatacagaaaattaaagataaactgctttagaacaaagtaaattaaaccagaaatggaagaaactgaataccaaatgcacaaaacagaatggtaattgacatcaactgccacaaatgcatgaacatgggcaaacactcttttgttatattttattacttgacaatattattattttagttatttcaaacgtttagttacattatgcttgtaacaataatatttttatggagtattaaactcaaataaatggtaatacttaatttttaagtttttttttcttcatattagttaatattaaaaataagtagttgttgtattataaattagatatccaattaaaaaactgatccaatccaatgagtaattagattgaattttgaaatctaatttaattggatcgaatgatgatttttcaaatctgtttattaattgaattatattagataaggagaaaaatgttaaattagataaatgtccaaccctaataaaaataatcaacctgacttctaaaaattcatattgatcctcacagtcacatactcacatgtacatgtagtgtaagtgttcttaagataggtctttgagatcgaacatcaattgtaacgatttgataaaccagagtcatgcttgaccatatggtcgatgcattatatatatgccattctgcacccttttcttttgtttttttattcaattttttcaaaaaagaaaatagagccaattggatagcaaataagaacttgcccatatctttactgacaattcacatgaaatggaagataagccttttaaaacttcaaagtatgggcttacctactttctatccataagttcattcattgcaatttgcaagtgataatagaaaaaccaaagaaccagattgaagctatctttggaaagaattatggcttccatttctatatctgcttccttacaaagatcatgcagctcaaaccatgtcactaagaaacaacagcctcatcatcatcatcaacaatccacagctgcaaagtctttgggaacaacgaacattaagcctaaagttgtgacaacactcaatgtggaaggcccaaaaactttgggggtctctgaaaaagttcagcataatagtaaaccagagaatgctcatgaaaatgaaactaaagctggtttggattcgaatttcgatgctcataaattcagcgatgtgcggtggaagaatggaacatgggatctaaacaagtttgttcttaatggaaagatggactgggatggcctcattgtagcaggtgataaatgaactcaaaatcttgtcatggtttacatgttatttgttaaatttgcttttgttacttgtttttgagaattcttgatttggtgttattattattattattacagaagcaaaacggaggaagtttcttgaactattcccagaagcatctacaaatgaagagccagttctatttatgacctcaatcataccttggtgggcatggctcaagagatcctatctccctgaagcagagcttctcaatggtattattattattactattaagatttgaattgaaactactttaaaagacttgtcatttctgtctctcattacataaatcaaaacttttacaggtcgagctgccatgattgggttcttcatgtcatatattgtcgatggtttaacagggcttgatatggttggacaaacgggcaatttcatatgcaaagtggggctctttaccacactcattggtgtaattatatttagaagaaccaaagattttgattactttaagaaactagctgaggaagctactttgtatgataaacagtggcaatcttcttggcaagatcaaaacgaaaagaagctctaaactttctaaatttctaattaatcccatctgggaatttggtgattttgtctttgcttaagcttagccatgtatgatgtatttatatttatatttatatcaatacataacctttgttttcttggtcttgttattatcttatgtaattaaccatactctaaaagtaaattaaaataataagtttagtagtacaataatgctgttgacattcaactaaatgagttgtctaataccttttctaataaaaaaaatgaacaatgagagattacaataaacataataattaagaagagatttttagcatcatcatcataaaagggataataaaacaaaacattttaaccgtccaaaactgaacgacgatagttttattagaaaggtgtgctcaaaatgttttctagtgaatatttagaaaaataaaaaagaagcatataacgtgagtattgaaacctaagctaagatacctagaaaacaacaccctttgtttggacccatctccccactcacgaatgaaatcatttcattttcatcaacccataatattagataattccaatttatagaagggaaaaaagaaaaatattagagtattaaaattcattttagattttatcaagaattaagaccaaaataaattattaaaagtaacatattttaatagcttcatctcccgctaattgcaattgcggggattccactcttgcatttgcagatgccaaacctctctttcttcaacaatggcgtcgtccactctcctagatgatccttcctctccgatgtcacctatggtagctgatagttccgacgctgaacgccgactccgggaagccg

SEQ ID NO: 43380 - DNA, 2793 bp, Cannabis sativa
aaggtatattctgttaaaccaagaaatgccgttaaatagagacttttaatatataaagatatatgtaaacattaataaaaattaatgcattgttacagatccaacaaatataattgttcaaaaaaacatgtgtaaatgtaatagactcactcagagtcatattaattataaatgatgatattattatttgattttgatgaaattgaaattcatgagcttgcccataatgagatgaagcattttacttgtacaagttcaattatttaataaaaaacagagtttgaaatgaatcactgcttcatctcatttttgatagctgcagccaattgatcataggcttctccccaagaagaaccaatctcctcgttccatttttctccaagtccttccttgattgttctcaacagggcctctttcaccacctaattataatgataatattaattaattaagttattaatttattatttacttattttttaatggatcattatttcaaatattaataataacaacaataattatatatatatatatatatatatacctcgaaatgtggagggatgactccattcttgagatgaacagaccccaaatgctttaaacttgaatcagggactactacctctcccttctccctaagctgaatggctgcttcacatgtctaatatgtaacataattttaaatataattcattaatttcataaaaatgaagtgaatgcatgctcaaagaataaacaatttcatgtctactcaagtacttttttcaactcaactcggcccatttgtaccaaattattatttttagagattttacacatactgaaattgttttacttttttattgtgggtgaatttttttttagaaatattgtattttttttttcaagaatatgttagtgttaaatttttactgttgtttcatggttactttttagatgttacacttttattttaattattttattttgttattttacagttgttttataaaaaaaaattgtaaaaaatggcaataaaaatctcttatttttacattaattaagtaaaattattcgggaattgatattaagggggttcaaaatttgtttattaactgaaaaacagcaaatacaaattaaataaagggattgatttagttttgattgaaaatagttcttataccaacttatttcattctatcacactcttgccacacacaaatttttgaggccacacgttccccatattatgtaatcatcctctatctatacacattacatataatatccaaataagtaaaagataatgtccatgtataatattaattatacacataaataattaaaggaataaaaaaaattgttagttaccattttaaaaaccttaacagcatgagccttgagcttaggattattttgtggtacttcatccgaatcttttagaaatgaaaacatgttcttggcagccggtgcaatctcaagtatcctataaattattataaacaagatatatgtacaaagattatgaattaatatgtttataaacatatatatatatataatatacttattatttaacttaggtaattaatgttcttacaaagtgaaaaatcgaagactgtggtgaggaatgtcgagcttcataacctcccatgactccttcactaagctctcttgcttctcgctgaaacccataatttggattttagtttgaaatgaaaaatatcccaaaagagagaaagagagagtgtgttgtttcttaatctttggattcttatcaacttatttagatgaaataatagacaatacaagctacaaaaaggctataaatatatatatacatgtaagacgtgttacccatctggaccgtacattcaatcaatgtgcatggctatataacaaaatctctaagatatcatgtatgtataattgaaattgaatataatttgcttcaaaaagcgcatgtacagtcgtgttggccacatttcataattatattattcatgtgatattgttccagatgtgacaaataatttcattcaaccaaagagtttattgtgtatataaatagttatttataatgtttcaaaaaaaaaaatagttatttatacacccatttcaaaaacaaaaaagttttatacacgcactccatgacatcacataattaatattcaatgtctactttagtatttgcaaactctgccagacacagcttgcttctgacaaaaataaaagttattacaaattgattttaataacatgtatactttttaataattttgttataactaggagaaatggagaatcattgggttcttgaggaacaaaaattaatgggtaggtatgatagaacaatttctttaatatataggaacaataacttgataatgaaaagtaaatgtgggtcttttaacactattatgttgctattgatccaatttaatatagtttcttatttattttatttaaataataatgtaaaaaattcctaattatctcttcataggacaccaccaatactggatacacaataaataacaatgatgtaataaaaatgtgcaagctaaacatagatgagtcatccatgttgtaaaaagttacagcagaaagttttcaatgttttgttaattcaaattttacacattaactcggcaatatttattttctttccaatcttttatatggaatcatgtactttatgagtgctttcggttctatgtatatttgaagaatgataagtaagctattccaaaataggacaaatctctcaaatgtattttttgacacagtactactttcccaataaactaa

SEQ ID NO: 43381 - DNA, 1608 bp, Cannabis sativa
gggctagcccacttgagtggtaggtaaactgatatatgactggtagtaaggcggatataattggtgcagaacaagctgccatgtttattttactttacaaaccacctttcctactagtgcaaaaagaataatctctaatacatttccttttaaggctaagagattagtccacgcctactgtactatgtggatgtgttgtatgcaccttccctaacccaggaaatattcgagcctggctgcaacacctacgttctcttggcggtcccaatgcatttggcacccctttcgccaaggcttcaatgcaactgttctatgcttattcgcgtcttcccatcccggttatgcccccagagaatttgatgcaactcaagcccaggggacattggcattaaacagtctctatattccatgtcttaaccatgttccactagtaaacaaatattatttgcataagaatgggaacctcactatgccactacccaacaatgtcaataaaccttcaatatgtcttccaaagaattgtgggagatgggtttatagcttaatgaagtaaatgactcaagttcttacaaggctaatccagactgatatgaccaacttgaaatatatttatagttaataaaaaatgaataatgattgccgtatataacagagaagtaagaaggagaaaagaaagaaaaatatcacgagagagagagagagatgatacaagttacagcataatggtggagacatctgagcagttggtctgaatcacagcaagtgcaataagagtctaattataaagtagttagaaaaaactatataactctcactttcaactaaaaatactactaaactacagctttacagaggataaacacaaatactcgcctgggctttttgcacccctggagcacaatgttgtagctcccaaccccaatttgtactggatattacagataaaaaaggtaggcacctatagagtcttcgtcacggctggaaagacttcagaaatttccgtttcaaactcttctcatcagtaatttttaaatgtcaaaatccccatggaatttgtcaatgagttgctttcgccagagttctgatagataccccgtgtaataatttaacgaaaccaaggaagcttagctttccatctgtatgcctgatccaatcatgaagaacggcatgtactggaacggctgggccaagaccgagttcctgtgagcatttatacaaaagtgattcatcttagtgttcttcaatgtttgttgaaacttcatcatatatacttgagatttaagttgtgaaagaacaacgtgtaaaggaatgaaaagaaatgatagcaaaccatgaaaattaaagggcttagtaataaaagtagattcaaaagcatgttgactgaaatatcaaatgagtatgaatgtcagataaacaactagcacacacataccgaagcaagctcatcgatcacaatagccctgtttccttctttttcaaatagttcataagcacatcgagcatgttgctcccaccggtcaagaacctcaagctgatgaacatttactgtagccgcacaaaactcctcaaagtccatccttctgtattgcagcgcattgaactgtcaaa

SEQ ID NO: 43382 - DNA, 4093 bp, Cannabis sativa
ctctctctctctctctctattaaacatttacccctcttcctaacaaatatactcttagattcttggttgtttctagcattatcattctttgtctgtttttttagcccgaatatatacaaacgatattctcacatctccaaatatttaatataatgtttcggctaagcaactccatagtggggctccttaatctatgcaccctacttgctggtgttgcggctattagcgtcgcgatctacctacgtgtccacaatgggactgattgcaagaaggcaatagagaacatgctgcttattctggggacattctttctcatggtgtcacttttggggttggttggggcatggtgggggatcaacgcaattttgtacatatacctattggtgatatttttgatgattttgggtctcattggtttcacggtgtttgctctcctcatcacaaacaaaggtcttggacaagccatctctggtcgcggctacaaggagtatcgccttggggatttctctcattggttgcagaattatgtggtcaatgacaataattgggctgatattcgaagttgtttaattgaggctcatgtttgtcatcctggcaatgtttatcaaactcaggctaaattttacgaagagaatctctctcctattcaggttataatatataataaaattaacaattaatatacattatattattaatcaaattttgaatgtttggttttatttattaagtttcgtgcatattgtaaaatgatattactatttttaaattattaccacctatataatgtatgcattttttttatattatttctttcccattttccaatgtgtattattttctttctaattaaattaaataatgcagtcgggttgttgtaagccgccatcctattgcggattccagcttgtaaacttcacgttttgggaggttcctaaggcagggccggcggtaccggacattgattgcaagacatggagcaaccaacaaaatttgctgtgctacaactgcaagtcatgcaaggctggagttttgtccaacatcaggaaggaatggaggcattttgctatcattaatagttgtattcttgttgtgatcactattatttactgcattggttgttgcgccaccaggaacaataggtccttttccaagtttagatataaagaacatccttaattatattttttctagttttattaacaaaaaaaaatgtaaaataaaatgtttttttatacaaataaatattttatgtaactaataggttgtattagctgtattcatcaaaaaacgattatataatagagggaataggtatttgtgatactatttcatgtaattagaagaaataggtatttgagtggatattgaatgaattagttattctgtcgagtatgagtagttgtaattgaccatatatgagggagtctttgacctttttgttggtggcagtaaattgataataaaacggtacatggaaatcatggctcaataaatcccttaacttgaagatttcttctcattgatgaatcaaacaaattgagaaacttttgtatgtctcttttgatttcatgttctttttttagcagggtttttgatcaaattgttggttcttatttgcttttcataacaatgatgatgataagtttgttgttttgatttcttatttctctttggcagttgtatttaccaattgtgtttaagttggtttatttaaaactgaatgtttctttctttaccagaaataaaattgatcaagttcttcatactcaaattgtttcccaccttttctttgcggacgatagtctggttctcagccgggctaacaaaaaatcaattcaagccattaaacgctctttggattactactgtcgtgcttcaggtcaacgattaaatgcggataaatcagtcctatccttttctcccaacactacctcggctatacagtacaatattcaacaaattcttcaaatgcctatcaagccgtgtcatgagcgttatcttggcctaccttcctattcgggtagagacaaaaaaattctttttggagatattaaagacaagctttggaatcacctttcggcatggcaagaacaactattttctgttggtggtaaagaagttttgcttaaagctgtggctcaagcgattcctacatatgccatgagttgttttcgcttatccaagtctcttattcagcaaattgaagtcatgatgaataaattttggtggggttccaactcttcttcatcaggaattaattggaaaacttggaacgctctttgtaaagcaaaagttgaaggaggtatgggtttcaaaagctttgttcactataatcaagccttacttgccaaacaatcttggttcatttttgataatccttcatcactcctgcataagattcttaaggctcgatatttcaaatataatacttttttagaggctgaaatcggatcttatccatctctcacttggagaagtatcatttggggtaaagaactcctaaccaaaggattgcgttggaaagtgggtaatggtaaccagattttatgtgcttcggatccatggctccctggaattacttccttcaagcctttgattttcaaaaatccaagcctttctatgaaggtttctgagttaatcaccaatcaaagacaatggaatcactcacttctccaacaatgttttctagaatcggatgtggcaaaaatacaaagtattccacttactttgtgtgaccaaagtgaccaactgatatggaactttgaaaataatggaatgtactcggtaaaatctggctatacacttgcaaccagacttgaggagcagctgcctgctgcaagctcaaacaactcccttcaatggtggaaaaaattctggtccttgactctcccatcaaaaataaaaatttttttatggcgagctatgcatgactgtttaccagttgctgatatccttcaccacagacacattagtgactcggctatatgcaccttgtgccaccaggccattgaatcaaccacgcatgctctgttttggtgcaagaggccaagaaaaatctggcaactctcctctttctctatatcagattttgtgacacataatatgtctctcatggatgttttgcaaaatatgtctcagatttggtcctctaagcaaattgagcagtttgcttgtatcctttggagcatttggaatgaaagaaataaggaaagacatggttcgaaaacaaagcctcctgagatgactttattttttgccatggattatatcgaggagttccagtcagctcgtctcaacacatcttttgctgactctgcaacacatgctactactcgatctcagcagcaagaactgccgtggatgaatcctccatctggaaggctgaagttgaacactgatgcagcagttaatgcagtggaaaatacttctggttttggcgcaatacttcgtaatgacacgggcgatatcatagctgctatggctatgccttttaaaggttgtttcaagccagaaatcatggaagccttggctctaatctatagtttgcaatggctaaaggactctcaactacctgtccatttcatagagacggattccttattggtggtcaaaggcttgcaagctactcaaaggcatatttcagatttccattgtttgcttaataatatttcacttttagtttccaacttcccagaggctcagatctctcacacttataggtctgctaataatgcggctcatttgttagccaaatatgctctctcggtggatactaaatgtacatggtggaaggaattaccctccccacttaagccttttgtattataacttttggttattaatgaattggctttatctcaaaaaaaaaaaaaaaattgttgctcaattcaaatttagattgaagttttatgatcttgtatgtctcacaattcatttttattatgttcacatatttgtttaagggcttttttcataaatgtacaacaaatacaacataattacagaaattgtgaaaaaaaagttattttaaaaacttatacattttgaaaacttattacatgaaatcatacattttaattattaaataata

SEQ ID NO: 43383 - DNA, 5034 bp, Cannabis sativa
atttggatattgaagttaaagtttaaaatctataccatattatcactttttttttattattttattcaattattttatgtttgctcaattatatttgtcttatattaaagttcttaaaattaatttaaactatagcatattttagcttgaaatataaataatatatttttattttttgaactttaattacttgaattctaaaaattaacaataataattataaaaaaatgaagaagggtttggacgggttaacccgaccaaaccgacaaaatcattgggcgggttgaactttttctaaattttcattgggcgggttacgattaaatttttgcaacccgatatttatattgggttaataaaaatatgctataacccgaccaaaccgaccgacgtacacccctaactttcatagtgtgagatttaaggctatttataacaatttcccttaaatatttgataggaacggccttaggtataggtggactaggcccgtgcttagggcccacactttttgagagcccaaaataaaaaataaaaaatttcattaagtttttatttaagtaaaattaaatgtattatatataataaatattcatcgcgtaattgattggagtatgttatattatctaatttcatgacacttatttttaatattttttttatatcaatttttgagagtgaaagtccaaaaatttaattcaccttagactcgactcagatatttgatcatggctaatataaacatgaatttgttgttaagttgttacttgttattgttaatagcatactcaatgtgtggtggtgtatttattatataacattattaacgcataagtaacctgtaaccactcattaatattaccctctcaaatataattttggtataacaaaatttattataactgtaagcacaaaagttatatttaataggtgaatatgaatcttcctgttctaaactgaacaatatatttgctaatttcattaggttagagaatgtgtcaagacaatcttttggataaggtttcattgtatattatatgtagctaaaatacacatcttagaggtacatggtcatcttgtatcccttcgaaaaaaaagggttttctgggcataattaaatatatgagaagggtctggataaaaacattttatatactgaaaactaaaatgcttctcattttcaaagtaagattattcagttaaggaagcaactcagaacttggtgagatcattaaccaaattataggattcaccattgagcattccaaacctcaattatgatttggaatagaccattacagctcggaaataataaaaaagatatacaataattcagagctttcaagagctgagctgaagaaaccttagggccatggggtgcttggcctcggagagcttattagggtttaaaatctcaacaatctcaccattaacgagaaggcaaactacatcagcaatcctctgtatttgtttaatactgtgtgaaaccattataacagtcaacccctgtttcttcttcagctttattataacatcctctatgttctcggtcgatatgggatctaaggcgcttgttggttcgtccagaagcaaaacctttcaagcaaaatcacataaccataattggtaccacaaacacaaaaaactcaacttatttaaacctaccatatatatgcccaaaaatgtaagaccaatattctatgaatgtctttctattacagtaaaaggatcaaataatttagatgtgaactagtgagtacttgttcattcacaaatttacctcaggcttattagctaaagttctagcaagtgccactctttgagcttgacccactgagagctcagaacccattttactgtaaaaggaggaatcaagatctgaaagggcaagtaatctgtgtacttcatgctcacttagctttttaccgcttagctggggtccatatcttatattatctgcaactgtgcctgaaatagacaatatatattatagtttgagtaatatgatactgctacatataatacagaagctaaatatagtatactatatattgttaaccgtaacaataaaatatggaaccaggagcataacaagtacatatacaaaattttgtagtttatgaattaagaacaaacaaaatgaatatggaatttcttattataggtataatctgttgttaacaaatttctctttaatatgtataaatataaattaagaggtattagaaggaataaaaacttgattagagaaaaagaaaaaaaaaaaaagtcaatgcatggaagataccttcgaagagaacgggaagctgaaagagcatgccgaccttacggcggagcgttagaacatcaaggttgcagatatcacgtccgtctaacaagacagagccagaaggtggctcccaaaggcgattgagtgccctgagcagcgtcgatttgccgctaccactgggaccgatgattccgacgatcattcctttgggtatatccacactcacgccctttagaatctgatccccgttctctaattcttttgtcagatctcgaatctgaaatttcacttcagttgctccattctccttctcttcctcaacctctagtagatgctctctcgcctcatgttctgccaagaaaagaaatataagatttcgaattcgactagctttagaaatctatggtatgtataattatactacaaacctggtaaaagctcggcagcaagggctgaggccatggataaaggtcgaggttggtcaatatgaatttcggtagagagacagagagaaaagaataaatgtaattatagataaaggtacgtagaagaacctcctccagagtccactccaccagttggacctgttgttgtattgttctcattctttcattgtcatatatgtaggaaaggaaagagaaagaatttgggaatcagaattttcaagtgcgaaatctgtctatagtagtgtcaagttgaaaaagaaaagggataatttattagaaaacaaaaaaaaataaaggaagaaaatctcgtgtcccatttgttgcctgtgtctatgttccaagccaataaaacacattacacattttgagggtatttgacatttgccaccataacttaaaaccagtttaatgttttgattgatagggctgattgctgaacattgcatcgggttcaacccggacctgtaccacctcccgaacttggacctctttattggaatacatttaataattttaggaattttttcaataatatacttaatttataatctattaacagaaataacgttaattaatctaatacaatactaatgacgtgacaaatcatcacccctaccataaaaccaaactaataccaacctccaatctcgctcattaacgcgctaaactactccgaaaatcacggcattgaatttcttaatagcgcgtgatttataaaaaataaaaagaaacctataaatttataactcaaaatctcataattcaaaccaatgcttaaaaaacaaaaataaaaccattaacgaaaaaaaaaagcttcgttcgacaactgatcgaacattctaaaaacgcatttcgattctgaaaacagcaataacgatctgcaaaatcgcttcactgcgattatacaaatcaaaatcacagctcgaaaccttctctccaaaaaatccattaaagaacaaaaaaaaaaggcttcagttacaaaaaatcacagctagtcgattaacaaaaattcagaaccaacgaagcaaccagtcaacattacgacaaatcaaccaaacaatcgacacagtaaatgcaatcaaaaatctaaagttaagcaaaatttaccattcacagtgtaatcgacaacatgttcatcttcatcgtcttcctctgcctttactagtcgcaccaccaaaagctaccaaaacaggtaattataaaaattaaaatacataactgattattatacaaaaaatacttcattaattatgtgagaaaattattttttatacgtatacttgtcaaaaaaaaaaaaacttacaatattcaaaactgtttataataaatgttacaaatctatactcgatagctgatatcaattattcattaacacaattgtaaatatataatcataattgtatattaaatgtagaattttacggaaacccatatttgatatcgtaatattgatgtctctggaaaagagcggaaaaaattaatagcttctttttctctctggaactctctggtaagtatgcgaaccctcgtttctcctggtcgaactctggtccctactatggggattttggtccacccatactgttcatgtggtggtttttcttctcatttactgtctattcggtgtcttacagcaataaatgtgggtattaatttctctgtgtcttttgttatttctctttccaatcctacttgttttacttggaacatttattgctcctggtgccatattttccctctcaccttctctgttagtcatttctcattatggtttttgcatcttagcattaaaaaccatcttttcatcttctctttggccattggaaactgtaagatggaggcggaggcagatcatcaagattttttcatcatgggggctactccggctattgctagggttatgatcatggatctttcaagaggcatctctagagggtactggttttatctatataaggtacgatccaggtataattttccatctctgcttcacccttgtttctttcttttctttcttttgctgtctttgttgttgttgtgtaccatggatgattttctccgtaatgtgtccagtgcccttgtcttacctcctgatgaaaatactgtctttacctaccatgctattcatctaatgatactccaacccctattagcttgctacttaaacttcatactgttcgaccctttaatcgaccttctcttatgaaaaccctgtcttgaatttggtcatcgcaatgtagatttcctgtttgtgtgtctgaacatgtcgatggcttgtttatggttacttttgggtgtgaaggggacaagggtagagtt

SEQ ID NO: 43384 - DNA, 1735 bp, Cannabis sativa
  modified_base (1687)..(1695): a, c, t, g, unknown or other
acttagaggcaagtgatttcttttctcactttaaactatgtacaattaacaagagacgtataaccatttgatggattttggttgcattgtaatgtgcatccattgcccttctgattagtagcataaagaactttcattaaaggttttaataacaaatgttggcttcacctggggcttccttgcctctggttcattatgtgcaccaagtgtgattgttttaaaaaaaaaaaaaaaaacactagagttgatgaatcttgagctatatttagagtttccgatcatggattgcctatattatacatgttgcctttcttggatgatgctcttgtgtcttggcagcagttctaaatttctcctttatgtgcttgatttgatgtgtttaaatgagtgaagataaacatagcttgaaaagatagtggcgaaggatattttatcctagtatcggtactctgttgttctgttatgtactctggtgtgtttgagctaaaaaccaaatgttatcaaagaggataatagaacaagccttctgatctactttttctttgactggttgtttggtaatgagcagggtagctgtgaagcactccacaggtcctgcgggtgctgtggaagctttgtggaagacgatttgcagcttgaacagtgtgagactgcttgtgactttgctactcacatcttctgccacacgtgtgccctctgtcaagaaggtcgtgagctccgtcgccggcttcctcatcccggttttaatgctcaaccagttttggttatgatcccccctacagagcaaactatgggccgtggagcttaagagtatctgcctgaacatggacgagtgcggtccatctactattgtgatattatcatatgatatataaaattgttttactaggttatcttttgtttgaacacttatcaaaactaaatttaccatgaaaatgtagacttatgcacatgctgttatgtttatatatttacttttttaaaaaagtaatatatttgtatgattattcctgattttgaagtagacttgcagagtgttaattgtttatataagggaaagggaagtggtactttgatacttgcccccacgttgggtgtgaagctaaaagatgatatgtttatttttacataaaagtttaacctaaatttacggtaagaagataataatttggtgagatttcctttccttaacatagaatataaaggtgtttttaaagtgttaggtagaatggaaagaaaataaaatagaaagaaacttttatttatttgtttttatttttctatattgtttggtaaacagaaggtatgaaaataatcttatattataaaatttactattttattcattatatatttttttaattagattaatttagtaatttaattttattgtgtcttctctaaatttccggaggtctacatctttattttatatgtgtttccaattgaactattcacttacattttattttctcacctttcaaacacgctcattttattcacttttttttttttttggtctcttgaaaatttcttcctcattaacttgtggactctaccaaactcaatctaagataaatgggtcaaaatagattcttctatattaatcaaacaagggttttatttttgagaaatgttaaggggcaccagtagtgcctagcaccctcctatgtgtcaatatcgctannnnnnnnnctaagtatcgggtcccatataatagcttttagtgagtatc

SEQ ID NO: 43385 - DNA, 4853 bp, Cannabis sativa
aatttttgaaaattatttaagtttatatttttttaataatgggatgtatttataattttatgggatgcaaataaaacttaccttttcatatgttaattataagatgaattcttatggtccatctttttattagcttttagaataagaaactgaatatataaattaaaaattgagaaataaacaaataaataagattaaagtatttcaatcttttgaaaattacatttgactaattattaaaaaacaatacatttgactaaaattataatggggacttcttaactattttaatatttagagggtcctttttaagtatttatgagaatcaagagtctaaaatggtatttagttaaattacatgggaccaaaactgtattacccttatatttagttagtgacacatattggggtgttcattggaccacatccaatatttttaagcttatccaaaaccgatccaattatatagtggatgatagattttaaggtaaatactcgtttggtaccttatgttttaccaaaaaacaaacttagtaccttatgtttttaataatgattatttagtaccttttatttacaaattctacacatttagtaccctttccttgaatttagagaacccaaatttctagtatactatattacccttttaatatttatttatttttaaatattatatctgttcaaataaataaaaaactaaaatgaaaatctcattattttaaaacaatataaaagagattgttaaagaaaaaatatatctttacaaatattaaaataactagaaattagttcttctaataaaaaagtttgtagtaattagaacaaacaaatcattacaaaaatctttcaacaacattgcatcaagtcactttatatatataaaggctttctaaaattgttattgggtctagtcacttgagaaaaaaatctattggtgtttcagtcgtttgtatttcctcagcagatggttcaaaatatccaagtggagcctaaaaaatagtaaaaatagttaattgattcaactaaatatatatagcttaaatataatactagtataaattatttacctcatgtgatgatttgccccttttgttgccttgaaattttcctctgccacgaccaattgcgtttcttttgtcccgacttgttgttggttcattttcaaagttagaagtctcttgttctatgcttgttggttgaggtttcttgcatgaccttttattgtggccaaattcatgacagttcgaacatttcttagtgctagaaactcccttgctaattggctctttttgagtttgtctctgaacttcaagaggtaaaggcctctcctctcctgcaactcttcttctacgatgttttttaggtctacctagaagttttttttattattggcggtagtaatttctcatcatcaaactcaggccacatcgattcatcaggtataggatgaagagctttttgaaaactcttcctccacatttcagtagtgaagtatggcgaacaataattaaaaatgtctgcccttatagtgtttatacaagtagttgcatgaatacaaggtaatcccctcacttgccattggccacatatacaatatccttcattcagtcgcacaatacacctttttccagcataatcaacctgaaattcaagattaataacctttgctacacgtgcaaaacgtgctcttttttggatttcttgaactttcaagtgtgcttttggagttaacttgtgatgccatctatctgttgtcaattccttgtatacatcattgaggtatgctgcattcttaaaccatcaagcaattcaatgggaggtttgtatcggtgctcatctatccaatcattaaaagattctacaaagttgttggtaagatgttctaccttaacatttgtatcaaatttgctcatgcaccaatggttgaagtcaatattactcaaccactcatgtgcttctttattgactgcctttatacaatccattatatgcttgaaattatcaaaatttgctgtctcagctgctacccaaaatagtactttaagttctgatgcgccaaattttttcaccatgttgttctccaaatgaaaacaacaaaaacgttgtgatacatctgggatgttagccacaacatcaactaaaccctacaaaaattaagaaagaattagtttaggaaaaacatcaaggaattagttcattttgtgaatccattacatgacttactgactacaacttaaattcaaataagcataatatattatctaaataaattattatataagtcactttacttagccatatatataattcatacatacaaaatatataaagacagtgataattaaaaacaatttactgctctaaaactagcctttgcacaaaaactaaggaacacaacaaaaacttgagatagaaataaatagacaacaaatatatatataaatagtgtatatatgacatagttaattaattcatttatcactaaattacattgcttagctatatatttatatatatatacgtataaagtgtttgtatatatggagtacctggttaatttaatcagtattatatttttaccgcaataaaaagtttttaaattcctaaagaaaagaatataaagtcaatgtactagtcaacttctgtctatcactcataacacaccatggttggtcattattggtggtgtgcccaatttctcccaataacatttcaaagaaccacttccaactatttgtattttcagcttctacaattgcatatgcaattgggtagaagtgaaaattcgcatcaacccccactgcagccaataaaattcccttatatggccctttgagatgacaaccatctaatccaaaaaatggtcgacatcctgctttgaaactaaattttacagcttcataacaaatgaaaattctgttgaactgaggctttattattgaggcattaagagtcaatagttcatcagcgtttccctccatattctttttgatttccactaagttactctggacaatagcagcactaccaggattaaatttaaggatcatagtagcataatgccttaagtttgcatatgagtgagcatagtcaccacctgaatcccctctagctttctgtctagctgcccatagctgtctgtttgtagcctcaactccaaaatggtctcttagctcaactctcattttctccacactcatttcaggatttctagcaaagcttctatgaagctttttggcaatccatcttgttgtaactgttcaattcttaacaacacattggcaattatattcaggattgtatgtttttatgacaaactctcttccatctggtgacttagaagcatgtattctccatttgcatccttttgctctacaaattgtagtgattctactagaagcatgcttgactttacgaagctcaaaaccttcttgtacagcaaaatctttcaccacatcccaatagtgcttgtgatctctaaatctcaaccactttctaagaagtatatttccattctcatatatgtcataacctccttctggattgggcaatttactatttgggtcgattaactctttgttcctttccaatctcttataatttctatggtttcccgcatcactgtcgtagtaaaccccaaactcttcttctatgatagattcgtcacaatattggcaaatttcagaactatcctcatcatcacttgaagtggcattttttttttctttccattccatgtcactatcatcagttggaattgacaatgcatcatcattcataggagataattgattattatgtgtcactgaaatagccctccgagttgcatatttgtggctccgaattccattttgttgtgtagcaaaactatgatagtcaaaattaaattctagcatgccaccaaactcaaaagacattggttccacattctcatgtggtaaatactcattattacgaacgacaggggctggattttgttcttcaaatgactcattttcaattgattcaaggctttcaaatgaaaatggtgcatgaattttatcaactttcttgcgaacaacttgtttcataaccatatttcaaaattaatctgaaagatcacccatgaaaaaagaaaaataaataataaataacagcccatatctgtgtaaagcccatatctgtgtaaagttatcgtatatatatatatatattctctattgaaaaatagagtaataacaataaaagaaaaagatccaagctaacctttacaacttagatttttggcaatatacacggtcttgacttctcagtttggctcttcgcttgtcttctcaggtggaactccaatcatcttctccgtcaaaggtgacgattgtgctcctttagcgtgtataagacgaaatgagagaaactattcgtttccctcaacttataatatcatcattgttttatgtgtaaaataaatttttttttataattaaaacaaataatgtttaaaatcatttaaaattcataagtattaaaattaggggtaatttagacatactaaaaaatttaagttcaataaattaagaaagagggtaccacatgtgtagaatttgtaaataaaaggtcctaattgatcattattaaaaacataaggtaccaagtttgtatttttacaaaacataaggtaccaaataagtatttactctagattttaccattggatctgatctaattaatttcagttatccaatcaatccaacatctattaaatgttagattggatcgattctatcaattgaatgtatttcatatatatttattgatttaatttgagtttatccaatattttagatctagtattttttgaatcagatcggatc

SEQ ID NO: 43386 - DNA, 2388 bp, Cannabis sativa
  modified_base (37)..(75): a, c, t, g, unknown or other
aatagttcagggggcattttcaatgaccttaaaagtnnnnnnnnnnnnnnnnnnnnnnnnnnnnnnnnnnnnnnncaaaaatcctaattagccattcaattattactagaaacaattttagtatgttatttaaatattacaagtttgtgtatgtttttgttttttataatattactataatattatatatattataatattttatgaaagtatttataattaagtgttaattggattagatggattactttttgaaataaaatagcatttaattcacagaaggtgcgaatttcaaaattttcaattccatctaattggcacaagcgaagatatttatattttggagattgaattgaattatgtgaatggaattagattggacacttgtgaataaccataggctgtcatgttcaataattgtgatcaacttatggtcaggtataatgaaatctataatttgaaatgcattcatagattgcactacaacaatcataagatatttaattcacgtagatatatcaactacttaatcttgcaatataggccattgattattatgtatccagtgaatgggaactgagcttctaagctttttattccattgtgaaaggaactgatgtagtcaaagtcaacataagtggctagatattgagcttcaatcaagttcaatttcaattagtcgatgaaaaatttggttgtaattgataaacaagacaaaagagttttgccagaaaagctataagatataagaaaaaagtaagatgactttgacttgatggtgaccacaacaattttgtggctacaaattaaattcaattagttgagagttgtacattttcgtttcaccttcacgctaacatcccataccacaactaatcttgtaaagtgtattgatttttatgaaaagagggatgaaggagtgtttccatttttgttcatatcatcatcttttctgtatatttttgctatttagagtgtcttctgctggtgatagcttaagattgttggagcccatcagtgatggcagaaccttggtttctcaaaagggaaactttgagcttggtttcttcagtccaggtagttccaaaaatcgttacttgggaatttggtacaagaacattccaattcaaacagttgtttgggtggcaaacaggtgcaatccaataaatgacacgtcaggattgctaactctaaatagcactggaaatcttcttctgctgggacacaacaaaacgatcgtttggtcatcatcctcaagctcatcaaaacaaatccaaaagccataccttcaacttttggagtctggaaatctggtcataagagatgagaaaaacaaaagcgaagaagcatatttatggcaaagctttgactatccttctgatacattgttaccgggaatgaaaacagggttcaacgtgcgaacaggccataagtgggttatatcagcatggaaaaatgcagatgacccttgtcctaccgatctaacttgtgggatagagcctcatgcctacccagaactatccattagaaaaggagccaaagagtactatcgacatggcccctggaatggccttcatttcagtggcacacttcatttaaggcctaacccaaattcagaatatgaatttgtgcacaatgatgaagttttcttcaggtatcatctaaagaatccctctgtcatctcaagaatggtcctaaatcctacaactagcactcgcgaacgacttcaatggaacgatgcagagaagacttggagtcttttgtccacagctcccacagactactgcgatagctatgggctgtgcggggtcaatggacagtgtgttataagctctaaccccgtctgtcaatgtcttaaaggttttaggcctaagtttccggagagatggtattcacttgtttgggttgacgggtgtgtaaggaatgctccactgagctgccatgacaaaaacacagatgggtttatcaaatttccaaacataaaagttccagatactaggcatacttgggtcaactggactatggatttgaaggattgtcgggcgaaatgcttgagtaactgttcatgtatggcttattctaacacagatatccgtggagatggtagtggttgtgctatgtggtttggtgacttaattgatattaaacaaatttctgggggtggccaagatgtatacatacgaatgccagcttcagagttaagtaagtatagactttagccttatatattatatacgattaagtgagatatttacatttatttgttgtgtttgtcttacaatttagctttaattttcttctctgtttcgggacaatgacaataaataaaaaaattagaagcaaaaggtgatagtagattgaaagcattgatcgctgcaagtgttattg

SEQ ID NO: 43387 - DNA, 1753 bp, Cannabis sativa
tatataaagagccttaactcaaccctaaaaccctaagtcataattaagtggaaaaccctaagccttaagctctaagtctaatatcacttcatatctctttcacacacgtccattgcttctctcaacacttaagatttgccatctttgatttctactttgtaaccttcagagagctatatcagattccacctttattgatctgaatagtattatctctcggtatcaatacaactaaaagaggagtaggtcattatcccctaactaagggggtcgaacctctataaaaatctgtatgttcttatactttttagttctaattatataatacgcagctagcattagtgttaatatgactccgctatcagttggccaaatctgagatcaacaaaagctattgaaggaaaagactcaaagatatggattcaagcaatggaagagatatgggatctctaaagaaaaaattggatttggaaacttgtccccaatcccaagaacaagagcataatgtcatgtaaatggttgtttaggctaaaaaaggaaagaaatgaggaagaacttgtcaagtacaaagccacattagtagaaaaaggtttcacacagaaggtctggatttcacatagattttctctccagtaatcaaatataaaacaataagaatcattttatctctggccacacactttaacatgaaaatagacaaaatagatgtaactacagctttcctacatggagaattagaataagatatctatatatatgaacttaaggggttcgaagctaaaagaaaggaggaacatgtctataaactgattaagtctctatgcggactttaacagtcatcaagatcgtggaacaaatgctttgatgcttttatgatcaagcaagggtttttcagaagctactatgatccatgtgtgtttttaagggaacccaagtatatgaagtcatatatctacttctatatgtagatgatatgttattcatcagtaagaaaatatgatagataaatgagatgaaaagcctacttaaaactgagtttgagttgaaagatttttgtactgctacaaagatccttggagttacaataagaagaaagaaatggaaagccatttctaaattaggatgactatatctataagatcatttaaaagttttcaattaatggatcaaaaccaacaacccaacccatcacatctcagtacactctgtccaaatagcaatgccctcaaatagagaaaaaacaagcagagatgagcaagctgccatactctcatgcagtgggttcaataatgtatgcaattgtcaacacaatccatacctatcctatgcaataagtacttcaagtaaatatatgtctaatttagggaaggttcattggcttgcaatgaaatgggtatttaggtaatatattgggtctactagggtgggtttagtccactacagcaacaagaatctacgtcagtctatttttcaaatatgggcaattgtataagctaaaaggtacaattgcagtgagtagtgacaatttccactaccaagttggagtatattaccactatagaggcaataaaagaaactatatggcttaaaggactaatagaagaagtaaagctacttaaagaggtctttgttttcatattggagatattatccatccctatatatattcatgatctttctcatttctagtaaatgttagagtttagttgcacacccaacactctggtgtaataatattggagttgctatccta

SEQ ID NO: 43388 - DNA, 3710 bp, Cannabis sativa
tttttttttttttttgaaagcaacgatattttttttttgttattaatgtttccatgtttaaaatttgaaatttataactactaaatatctcaatccatatccttttaaaattaaataaataaatagcttgcgttataatcctcctactttccaggccagtctccatccccaacttttctagtgaaaaagaaaaaactatgtcttctccgaatgaaaatcttcctcaaaaggaggagacagagtggtccctcccttcccacgtaattcccgagatcctcttgaaacttccggtgagatcactcatgaggttcaaaaccgtgtccaaagagtggaacttgaatatatgtaaccccaaattcgtcccaaaacattatgagaaccagctaagaataactccacaaaagaaaatatttagatgctataacaatactaccaacaaagtactttactacattcatagcggtggtgtcatcaaatcagagaacttcacaccactacccaatgatgaaaaattctcccaaacagaaagaacaacgtatcttagaaaagttggttcacataatgggatcctctgcttctactatcctacctatgatcataagtcgaagttgatcctgtggaatcccagcttgcaagaatctagatgcatcgatattggacccaaagatcgtaaaattcatatgttgggattcggatatgactctggtactaaagattacaaagcggtgaattttcgatactcgcatgatagtcctttgtttgttgacttgtactcgctaagaaaagaaaaatggagatacaacaatagtcccaataattattccctcttgccttacaaactagtcaaatttgtttggcgttcgctgaatttagaaggcgggaataagattcattggcttgttttcttcgaggacaacaatagggatgtgtttaggagtatcttgttcttcgatgtgagggagaattcggttggcctaattgcattgccggaaagtttggccgtggtggcagatgacagtgatgtgagtcttgcctattgtgttgatgatcgtgatggtttgcttactttgtttgagtacaaaaatgatggtttgatgagcttttgttgtaatgtgtggatgttgaagactgattccatagattatacttggactaaattagagtttagcattaatttagatagaaagttcaaggctttagggttcttgagtaaatatattattttggttatcagtggggataagaagattttgtttgacactagaacccaacacaaacattttattcagattggtgatggtgacatttggatcctctcgtacgttggcacatacatggagaacatcatcaccctcccaaaatatgacaaaaaaacaaacccaaattgatgatccaaagacaacaccatcaagtttgttcaagtttgttttatttatttatttatttgatttgatttacatttaatgtattttttattatcctgaatggaagcataataagctttttaattagtttaaataacagggtcttctctcacaaatacacaaaaacaaccaaaaaattacaaaaaaaattcaagaaattctaaacatttttactattttttaattttatttacaaaaaattcaatctttttatattgtactcttattaaattgttattgattttttattatctatatgttattttttgttattgttttgatattatttagatgtcatattcattgtaattttcctgttatttttgtgatgtttccattaaaaaccgtaaaaatgtaaaaaaaattatttaaacgtaaaattgtaattcttttataaaaattagtgccttatgtatttatctcggaaaaaaaaagccacaatttataacaccgaggtggccaacacattgaaggaacgaatttgcattcatcacgaatctgcggatagtagacaaaaagtataaatataaaaccaaaaaagaggtggtcaacttcaatcttaatgaaccagaagaagaaagtttaagtatattattagaccagacaaagctattggaaattggcaatggcaaagtaatttagtagacctgttttgatgatatcaaaatatcaattgtaaacaaattaaattatgacaattgtaaccaaattatattatgacaataacaaaaatctggtattctgcagtacatataaaaagaggggtggtcttaggatcttttctgcagcctcttactcctaaagttatcaccagtcacagcttgagactgaagaatttagcacataaaagcttttcttgaaccccagaacattcatcatacatcatcattgcaagctgattaaataaaatagatcagtgacaacctcatcgaatcctaacattcttagtttaagaaaattacataatgaagaatttggaacgccaatgacttatttaagagcatagattgaaaaaccaacagtcaagcccacatgtaatagcttatcaaatgaaagaagttataaattcaaagccaatataagcttattccacatgaacatactgtggaaaacatcagtatgtatctctaaatcaatgaatcctctcagaacatgacattttttatatataagtaaaaaaaaatctactgtttctaatgatgtttgaatgattactctcaaaaataaacctatgtcgcccgatccattaataggatatcaccctataatttaaaagcttgagaatgttaagaaactgtgccactccatcttcgcttcttgaccttcatcgagtcttgtcttggcctacaacataagaagaggagtggtccttttcactaacaatacaggatcaaattactaattaaaagtagaaagggagaaagggatgcaacaccagaatatcagtaggcttgactaggaaatctagccatggaaaaatgggcaaaggaatggaagaagtaaagatcataaaatagttatataaaattctaatgaagataatatctccgtgtcagcatcgccgatgcatatcatgtgaatcactcctactgtttaatttaattgtttttttttcttatagtactttattataaaattcactattacaatccttaacttaccagaaaaatgagaaggaagaaaatgacatcaaggggtcctacaaatgttggctagatacctaattcaaggggaaaaaacacttgattaagagccttagaagcaaagctaggttttcatgaaaacaaggaacaagactactgcacccaagaaaatatgcaacattttaggaacctagatatctaagaagaggaaagctgagaccaaagatgatcatcccgcaataccaaatctatagattactctctttgttagccaaaatgaggttatacacgtgacactatctctattcaggaagatcagtactatatgtgcattgatgccctaagcaaaattgcattaacgatgaaacaaaataaacttttccttgacaaaaccagcccaataagtataaatgatgaaagaaggtcaattaattactggattcctatgacaaaaacctctgccgatgtagttaaaatatactcatttgatttgcaaggagggtccctaaaaaaattcaattcgtgccataagacaaggaccccaacctttcactcgggttataattactacacaaactaacattccatggtgaattctgaaattcagtagaaataactgttaactcacttattcatttctttc

SEQ ID NO: 43389 - DNA, 1506 bp, Cannabis sativa
tatagctgttgaaacttgaaacttggttccatgctgcatggattgttgatctttctaaaaggtttggttctgcaagaatttataacaaagcctacattggagcttggttgtatcaaagtataggtctgagaattttcaagaatttatgaattttcatgcaattggctcttgggggattatggaaagatcaaataatctaaagtgaaaagattttaggattatgtgtacgtacatatagattgttaatatggaaattgtcttgtaggaacaatgccaaattcttttcccagaaaccaagagagtttttttagcttgagtcatgaacttttcggtgttgcttgtccttcttcagtgagctaaactgtttttacctctgtacattcctcataatttcacttgactacttctcatttggctcttattcctcgaaggatagaaagcattatttggactcccagtaggtttttgttttagaaagaagagaactcatttttacaaaacaatagtaaaaacttaaaaagcaaagtttcctttgcattatttatcaagatgatccttagtgttatagttatataatattattgttacttttgaaaaagagacaaaggtcgaatgtcttatgctccagaccaatgttgcacatgtgtactccaaggagataggattattttggaacaaaaaatgcacttctgcttcagtagttcatactgagaagaaagaaaaaacaagacaagagaggagggggacaactttaaaaactttaacacaaccagaattacctcctcaacaagatctccagcaatttctctaacaacttcacataaattgttctccgtgaacgattcatcaatccaaaaactaatatctttgtaacaaggaggatactgcaaaatgaaaagaatggtaaattaatattttgcaagcagatttatgccattcaaaattgtaaaataacatttcaaaagatgggtgaatgcttcagataataccttggaaaatggcttgaatttaacacccagctggccagacgaaaactgtatgccaaaattactatattagaatatcattaacattagtagttcacaaaaccatgatcttattcttttccacaatgtaactgcattaagatatgatatatcataatataaataaaaaattcatgattacctgagaagtaaacctttcatcaactgaccaaaacaggcgtatatctggtatatcaaataaaaccattgctagccgctctaatccaagcccaaaagcccaggcaacgttatctgttttcccacttctttgcaatatttctttctctgtaaccccacatcccaaaacctctaaccacttttcctgatattataataataaatgataagcactctgaagataaattagatcgaacggtgattcacaaccagttcatttttaacttttaaggcagaatatttgatcatgaatatcaacgctaatagactaaactaaacagccagaatttacttatttaccttt

SEQ ID NO: 43390 - DNA, 4643 bp, Cannabis sativa
ttatcctgtaacaccacccctcaaacgagagggtgatgaagtcactccgagtttgtcaatcaggaattggaatcttgaatgtgcaagacctttagtcagactatcggcaatttggtcatgagatggtatatatctgatttccaactccttttgtagaaccttgtctctgacgaagtgcacatctaactcgatatgctttgttctggcatgatagactgggttggcagcaagtgcactagcactcatgttatcacaccagattattggtgcagcagggagtttaaacttcatttcttttagtaactcctgaagccatgtgagttctgcagctagttgagccaaggctctatattttgattctgtactagatcttgcaaccaccgtttgtttcttagaggaccaggatacgagtgagtcacctaggaacacaatagccagcaatagatctcctgtcatctggaaaacacgcccagtctgcatctgagaaacccgtgagtgaaagtctatcacttggggttatgtgtatgccatgctgcatagttcccttgaggtaccttagtacccgtttggtggcattccaatggacatttgtggggcatttcagaaattaactgagcttattcaccgcaaaggagatatctggccttgtatgactcaaatatagtaaggcacctataacacttcgatagtgagaaggatcggccattggttctccatctcggatagacattggtttatttgctatcataggtgtaggacttggctttagattcatcatgttaactcgttgtagtagttcagagatgtatctcccttgtgatagataaacacctgtgttatcccgaaatacctcaacacccaagaaatagtgcaactctccaagatcctttaatgaaaatgtcttgtttagtcgagcaatgaacctttccaattctgttgtcttgctgcctgtaacaatgatatcgtcgacgtaaatcaagaccataatgacatactctgagtgttttaacatgaaaaaggaagagtcagctttggaattcacaaaatgccactgcagtaatgtgcttttaagttgctcataccacactcttggcgcttgtttcaggccgtaaatagacttctgcagtttgcagacataatgtggcttagatggatcttcaaatccttgaggttgggccatataaacatcctcatcaagtgtaccatttagaaaagcgttgttaatgtccaattgccttatagtccaattataggccacggcaatagtcaacacaactctaatggtagaggctttaattacctgactgaatgtctcactaaaatccaccccggcctttgatgaaaccctttagctacaaggcgagccttaaatcgttgaaacacaccagctgcatcaaatttttctgtgtaaacccacttattaccaaccacattatagtgtggtgagggaggcactaacacccatgtcttattttgacgcaaagctcccatttcagtattcatagccaagttccacccctcatggtggagtgcctcctgaacagtaagtgggacaccagaacctgtgtgagaaaccagaacccgtggcttaaaaatcccagccttgccacaggttatcatgggatgttgaggaacatttggttgaggcagaggcacatgtaagagtgactcaggagaagggaaaggaataggtgaggcagctgtttgggaatggactgtggcagggctagtagcagaagcttcaggagtatgcaaagaaaataaatctgaatttgtatttggtgcagcagacatgtgagtatcagaaattacccggtcttgcgaggaaggtgcctgagaatgtgatgctgtaggagaccgagatggaattgtattaaatggcaagtcaaaccaggaatgtgggatagtgacagtgacttcacgttcagcttggtaattatgaaagaaaccgtgttgacatgggaattctttttcattgaaaacaacatgtcttgaaatgtaaattcggccatgtgagctaagacatttataacctttgtgaacatcactataccctaaattcacacactttgttgaatggtattggaacttatgagtttggtaggtacgaaggcatgggaaacaggcagccccaaacactctcaatagtttataatcgggtagtttagagtacaagacctcaaaaggagttctgtgaccaagcacagaggttggcaatctattgattaagtagactgcggtctgaaaggcatcagaccagtatttttggggcattgttgcctgtgcaaggagggtgagtcccatttcatcaatatgacgattttttcgtttagttcgaccgttttgagctgaagtattgggacaagagtgatcaaatagtatgccattttgtgttacaaggctcgaaaaagcctggtattgaccacctgaatcacttcttagtttctttattttcctaccaaactgagtctctaccatagctttgaattaaataaaagctgataaagcatcagacttgtttttcaataagtataaccaggtataccttctgtgatcgtccagaaagtgtatataatatgtgaagttagtgtgtgagtttatgggggcaggcccccacaaatccgtatgcacaagatcaaacaaaccagcagctttagaatgtgatttttgaaagggtaaagcatgtgattttccatattgacatgcatcacaaaagtgtggaatttcatttaaaggaaattttacatttgacagtcttagaacttgattcaaaacattaatagaaggatgtcctagacgcctatgccaaatgtttttagggaatgatgattaacatgtgtaacaggtggcttgttggtagtaacagccgagtagacagagtgagtttgttgtgactgtggtgaggagttgagttgatacaatccatctttaagggtcccttgcagcaccactttccctgtgctttggtccttcacacaacaaaaaccagagaaaaattcgacagagacattattatcagccgttagttttgaaacactaaccagatttttagatatactaggtacatgcaacatgtcattgaatagtaaggaattagtagtgaaagtttgaattaaacctgtgccaatgtgagaaataggtagttgactaccatcaccaatggtaattagttccttaccctcatattctgtcttgttttgcattttatttgcatctgctgtcaaatgattactcgcaccactatcggcataccacgagtcatcgttgatcatttcgggtgtagcaacaagggcagagaattgcttgtcctgacctcctgtagtgttgggttgatttcccatgtagctttcatcatatctgttataacagatcgcagctgagtgtccatacttgccacacacttggcaagttggtttaggcccattacttcttcctcgatcccttcctctttgaccacctcctcttgtgtatccagtatactgttgttgttgacccctgccttgattctgatttgaaccaaatcttctatggcctgctgtgttggatgacccactcgacccaggtttttgtgcaaaatttgctgaagcatttcccaccagtttgctaccagcagagatggtattaagtctctcgagcctaccatcaaagctaagtagcatactctgtaattgttgccaagatgtactctcctgggattcgattaagacaacaatagacaagtattctacatctaaaccagataaaacattagaaacaagatgtctctctggatagggttcacctgcaagtgctaaggaatcagcccacatcctcttcatcttcaagtattctgccatggactgagaccccttgcgcgtggtctggatcttggttcgcaaatcatccatatttgcccgagagtgtgcaccatataattcttcaagagcattccaaagagcaagggctgactggcaccccatgacttcagatgcgattgcttctgtcattgatccatataaccagcccattaagagctggtcatgaaccaaccatgtttcatattctgggttgatgtccattctagatccaggaacattagcgactggctctcctgtgcgaatgaactcaagcggcggtggacgagtcccatttataaacccgtccaacctatgtcctcttatgatggtattcaccatcgtcttccacagaggaaaattattacggtcaagcttcaaggagaagggttggctaagagtgttgctgaaaggagttgagattggagaagggttcgaggaagaaggtgtaagggtcatggttgaagctgcaccagtattttggccagcaggagtctgaccgccttgattggttgcacttgcctgatcttgtggagtcgacattgcgttggcaaatttggctctgataccaagtcaaaattcagagtatattcaaggtgaaaatgatcagctcaattgatactgatgcagacaattgtatttataatgcagcagagtacaaacaggggaaaatggccagtgatctgagccttacacgtggagctaatcaatacaggcaatcattgcataacagaaaatgaatctctaaaaatctgtgcaaacggtaaggataggacagctgtgatggtgcatagggattgcaaatttcca

SEQ ID NO: 43391 - DNA, 2359 bp, Cannabis sativa
agatattgtctgatatggagtgggacaggttctggcaaggtcaatagaatggttttggcttttgatgagtaatagtattctttcttatttggaacattggtgctttacaatttacatgcattggattggctctgtggattgtgactgaagttgcattattcattattggaacatgtgaccaaatggccccaccaatcccaatccacacatgcattgcatacacaagtaagtttcttttctttagaacaagctttagatgaacttgtttagtaactctatcctaatctcagtttatatatagttattatattatataaatatattatttacccacaaaaaaataaaaagtctaaatcttttatcatatccgtgacccctttcattttccattagtatgaaatggaatttagattcattgcttggcaaaaggccaattagactatgacaatcaaatcttaaataattgaaagttgtgttagtatgtgtgtatataacttccaacattaatcctctttaaaatgaaaactatatttagaatcaactttttgtgtacaaagtacaattaaaaaaggatgagtaatgcttaaaaaataaagaaaaagaagaagaagaagaaaaaagatgatgagaaatattagacatacacttttaaattgtacatacttcttccacaaatatattttaagtggggattatatctctttttattataagaattaaattagtgacatattatcaaatgtaaaagaaaagaagtactcaaaaagtgtctgaattattactctgaaattactcttaaagtgtatttgcagtgaaaatttttgtgtgaaaacaataggggtaaaatagcataaacttttaaatacataaatttcaaacgcgtattatatttacacgaaaattctatagttagcgcaccatattttgtgttctattttttacactttgaaaaaaagaaatgttaagaggtactttatgcatattgttattagtgcaaattaatatcaggtctcacacaatttgatttaataaataatataagaaattgttaataaatcgtaactcgctacatcggtataatattaggcaccatataatatttaatagcaatgctctttgaaaaattataactcaaatacttttatatgaattgacattgtaccttatagttatagtatttattccaataatttttagaaaattagaataatttatgatgtaaaaaatatagtttaaatattggtatcttaaaatttattcaaaataataaaaataaaaaactagtgaaataattactgtaactaccaatttagatattcatatgaaaaaaaaaaataggttataatttttttcaaatacagaagacatatatgtctctttcaataaggacaaaagtgacactcctacaatagttgctcccacatgaaacaattaggagagaggttttcataacaagggcacattttgttgcttttggtagagatgtccttattttgaacatttaaagaaattaataatcaatttttcttatataaatgtgcacattgtagctatgcaagacattctattaaattttctaaaaatttagaactatttattgtaatgaaaacatagttcaaacatagtgcaattgactattttaaactatttttttagtatcataaattatttaaaattttctaaaaatatatattatattttttttatagatttaaccatactaaataacattttttaaattaccaaaatcttatttattataactataatattcatcatcctataaaaaaaattaataataatttaaaaaatatcaaaaatatgaatatctttaataaaagtgacacttctactataaataagtaaataaataaaaaaatctacattttagtttactttgtcagtgtcaccacttacaagagactagcttagatggttaagtgtgttacttataaagtgagagaagacaccaatacaattatttttttttatttttttttaattattattttattttattttttttgcttaatacgaatacaataatttactaagtacgaaaacgttcctttcaataggaacaaaaataacaacagtaaaataaatagtctttttaattagaaaatgtaattgacatgatgaaataaatatataaattatataattacttttaattacacacaaatctaattacattgtgactacatattaaattggttaaagatgaagagatattgattaatcaacctcatagtaaataattaataagttaatttagtttaaatactaattacaatctcttaattaacctccatatctaaaatcacatattgaaatatttcttttcaattattttcat

SEQ ID NO: 43392 - DNA, 1780 bp, Cannabis sativa
tggtcaagggtgctttagtttgttatgtaataaaatattgtaaaaagaactgttgaaaatggaatagattaggcttttgacaaattatgattagttttgttgaacaagtatttggcttttttggttgtgttgaaagttgaaacctataatttacagttgtaagcagacccagattattaaattgcaaaagaataaaacaaaatgttcaatagaagattctttttcttaataggttgtggcacatatgataattaaggacagtgaaggctttctttgcaataatgttattaggatatgttccatgtggtctacaatgtctactgttgccaacttaagtattgataacttgtccacttagtttattaaattgtgtgaccaagttatgttaacaagctcaataattgactgtagatgactcccttgcaaatgcaatttctgatgaagtaaaacaagctgaggacattgatggagtggagaaaccacataccaaaacaacctacaatattgtctttgttactgctgaagcagctccttattcaaagacaggtggcttaggagatgtttgtggttctttgcctattgtacttgcttctcgtggccaccgtgtcatggttgtttctcctagatatcaaaatggtactgctgcagacaagaactttgatggtgctgtcgatactggtgctcgtgctaatgtattatgctttgaaggagtgcaagaagttggttttttccatgagtacaaggaaggtgttgactgggtaagaactctgatttatttatatcaaagctgtttctttgtttgttttgggagattgtgttttatcacgatgaactctttccttccttgcttcaggtgtttgtggatcatccagcatatcacaggcctggaaatccttatggagatgtgtatggtgcttttggtgataaccaggtatgcttattgttattatctttagcttagtaggcaaaaatactgttttgttcaccattaacaacgagctgtattctgatttggttttacagtttcggttcactttactttgccatgcagcatgtgaagctccattggtgattccattgggaggtttcacctacggggagaaaagtattttcctcgtcaatgactggcatgcaggacttgttccagtgtatgtttttattaattttgcaatttttacatctacttcttactgtatgttcttaatgtgtaagtaatgtgtttcaaggagcactctattcccttaagattaatttgtgactcctcaataaaattagcctttggtggagtgttaaccattacttgaattctggtgtgtaggcttttggcagcaaaatatagaccatatggagtttacaaggatgctcggagtattctcgtaatccataacctggcacatcaggtgaattgtttcttcttcttcttcttcttaaaaaaattttacaactcaaaacacatgacaatgtcagaactcagaacattacatgcttttctgcataattagtatgagattaaataaaagaaggttcttaaaccagaagagactaggggtagaggttcatctggtgatcgatagtatacttctgataaacaaatgcttaactgcttctactggaattgtgagaccaacttcatttttaattcatgtgatgagagcaaaaaggttttgttccgattaatttgataattattcttaaaaggaaagcagaatgtgatgtctgaagttgtagtgaaatctgaagctagatagattatagttcatgaaattgaccttgtgataat

SEQ ID NO: 43393 - DNA, 3728 bp, Cannabis sativa
catcaaacaaataaaccagcaactttgccaaagaacccatccgacccgggtataaatgatgccaaacccgcatattagtccaaagaggaagtaaagatgagggtattttgaggtaattagtttgactaaactacccataggttaagaattacttaagagttaagttttgggtaaaatagcttttttccttattttattaacttttgtccttagtatttttctagaattatttaggttgagtataaattgaatgtatcatttatcttatgtaaatattattttatcaaattaagataatattaagaagactaaccatcctcttctcttctcctttttggcctagaaagaaccaaggactcaaatcaattttgccatctttatacattggaaattcttcaaaaaagaccaagtggttgttagagaaacctaaggtaaactcaatcttttgttctctttgattctcaaaaagaaaagtttagggttttaatgagtttttgtatgttttgattctgtgagattaagtaagtttgaaagcacattttaagcttaaatttgtgttgttatgaggttgtttaaaggtattagatactgattttggtgtgagcttcaagtttgagttcatggaactcaagcttgagctctaatagcaagttttgaattgtgcagtaattttggtttacattagttattaggttatgatgtattgatgtttttgagctaaactgttgaatttgggaggatttagttgagtttgaaaaggttggagatgtattaaactcagaatttttcttcctgcagaaaacggcaaatcgtttccaagaaaatggtctaccatttttcctggtaggaaatctaggaaaacagcttgtcatttttaccaattggtctaccatttttctagtagaaaaccttaaaaacggcttgccgtttttccaaatggtctaccgttttgggtgatgctcaggaatctcgatttttgtattttctcgatatttaaggtattgtcacataattttctcgatataagttgttgatcgatttaccgttgttttgacataaagtcgagattgtcggcgattctccactcaagttggtcggcatgcatgaatttagattaaaggtaaaaaaaaagtacaattgtactacatagcatgtcatgttgggatacgattattattgtttataagacacgatcattaccgttatgtgagaaaaagtcacgactataaattgaaactgtttttaagtttcttacttgtcggttatttccttaggtaacaatagtgacatatggatgtcgagataggtattaaggttgtcttatgagacaacaaaaactatatttgagtagggtaattaggattgtcttattagacaacaacgagattgattaccttataaattaacagttatgacttgtacgtcatattacataagtatttgtaaattattgaatgtttatatacttgtgaatatctgattgtaattatctgagtttaaattgatgttatttgtgtgctaatttgtaatgttatttattactttttttgttaagtctatgtaactcactggtgttatgtggtacagataagagttagaaaatatttggacaactgtgtctatttttcttgttaatattaaatttaacatcgagcatctaaaatgttacaaatttaattttttccactagaataaaataaaataagctaatatttataattttgtatacgaatatattgagtaggtagttttttttttttttctaataattataacattaaaatgggacaaaaatatagtgtcatgatgaagaaaaagagaaaatgatggaattttaagacatgaatggatttttacctagtcttattaaattagactaggtagaagtgattgttaatgcaaaacttgattataaaaattaaccacatattatttagtcaacacaagcaaaatatatagcttaaatcttaagctttgggggtaatatgaaaataaaatttcaaatattagtgaagtttgtattatacttcaaaacaataattttttaattatgacatccttccatttaaaattatgacatcaacatgaattattatcccttaccaatttcacatgaacaagctacttgtaaataaaataaaataaataaataaaaaataatttacagtataaataaataagtataatttatcattatatataaattttaaaaattaatttttaataattaatataaaattattatatattttttattgatatatttaaattaatttttaattaaaaaataaaaattttaataataaatttttttaaagtaatcaaatattagtataacatgtaacttaaattattttaaaattaaatttaaatatttaagtgcaaccaattaattatttatgccaaattactggtaaagaaatagataaataaataaaagctacagtcactactctagcaattttgtctctataaataactccaactcttcactccaatcacacccaaattcagttctttttttttagagagaaaagtcatttctttctttctttcttcttcttcttctgaatttggaagtttgatctctgattgttgattttccgattcccctttgtgattccacttccaatcgctgtgttttgaaaaatggaaaacccccaattgaacttgaatcctcgatttattccaaggcgaggagaaatactgaaagcgattcttcagagttttacaacctcaaagaataatcccaacgtcgacggcggaggaggagaagaaggctctctcagttcgaatacgaattccccaacccaacccgaccctactacttcatctgggtagtcccaacactatacacacgtggcgattcaccattggtcactctgctttaatttggttcttaattatattatatgggctttaagttttcaggcaataaaattgttgttcagggaataagtcgtgtatttctttaatatatattttttcatgttaataaaaatttaattatttatcaaattcattcactctatatatatacaaaatacatataatatgatatagatcatatatataatttaaaaactctctaatttgctcatgtattaaaaaaatttgtttagtacagaagtataatagctatatatatatatatgtataatctcaaaataggcataaaaattgggacacaaaatgagaaaggtagccgatccacctaagagaggtgggttcatatacaataaaattgtttatgtcgagtatcccgatttacgtggcagttcaccacgtgaatcgggtagtcggaatactcgggatgaatagcaaaattcaagcataaaaaagactcaaaaagtctcatcaaatcaattgagtgaaagcttttgactcttatcattttcttcatcacacactttttttctttctttaatttttgaaacctatatatttttgtccaaattaaaaggatatacacgtttcgaagatttatgtgaaaggataaatacataaagattaatttttccttcatcaaataatagacaatattcatttttccttaagcggggagagcatacataaatattcatttaatttaccttaagattatataaatggataaaaatgacactagagcatatttgaaaattaaaaaattacgtatgcatataattacatgcatttagaaagtaattataataccactttcaaaaataaaatattttaattagaaa

SEQ ID NO: 43394 - DNA, 1338 bp, Cannabis sativa
atgtatacatttatgtaaaatgcttttttttttttttttttttatagtagttcatgaattgggtgccacgtccaagtctcatggaggttgggccaatattgtggtgttgtccaaaaataatattttgtaataaaaaaatttaaaagtaatgggtgttataaatattacaattttttttcctattttgagaaaattaatcctaatttaataaaaaatgatagcatttttgcaaataacacaaaagtcaaaggttattttctaagaaaagtaatgtttgttcgctctcatcggcatttcatttgatttttttaatatatagatattatattttaattattattattattaagcattttaatcaattcaatatacacaaccaaacgtctattgaacccaggaaagcacacttcttctccctcttcgacttccacttcttctccttccttttgactttcatcctatgacttccaacaacgaccatgaaaaaggaaatcggagccagccccttcttctctatcctttgacttccagcagccaccaagaagcgtagattaaaaggaaattgcagctcttaatttagtaatttagaggttaccaatattccttttttctcaatttttctcttgtttgatcattaatcttcgaattatgtatctcattattttgaatcacattgattaatgctattagaaattatagttttagattttttgattcccaaattatcctaatgatttatttctattgtctcttatttcttgatgtcatttgggaatttttgagttggttggaaatttcattttaatttgttgtttggtggctatgagataaattaaggtcgggatgtagtataattagttagggatagcgagctttgcccatcacctataattaacctttatttgtactataatataatgtttttttttttgaaaaggaaatgtaatagattcataagcccagataatataaattgttcaagagctgagctcttggtcattacagaaccaatctgcttggatagaagtaagctcaatagacccagtcaattttttatgctatacattatttgagtccagtactgtaatattatttatgacattatgattatgactcatgtatataaatctttgagttgtggttttcaatctatttgaatagatattcatgaattattaagatgtcatttttaataatatcatcagaatgtaatatcacacttaattttataaggtgaggtaattaaattcttttcagaaatttgcggctaaaccctcttatgtttatatttgtagacacttaacccccttatgttatttttgttggaatttattttac

SEQ ID NO: 43395 - DNA, 2065 bp, Cannabis sativa
aagaaggaccaaaaaacaaaacaatgccaagattagttctagaagaccacactggccggccagcccctctatggtgctacaagggtcagccaacctctcaataacactacactagccagcaagccttgaacacaaactccttatggctggcaagctttaaacaatagtgcaaagtgaaaaaagttagatgtgcaacataccaaggccaactctaggagaccattcgaagatagcctctcttcctccttatcactgagcttctgaagctcataactgacgatgggtaagactctacccatatgcctacaagccacctccatggctttctgctcaatggatgaatccacccatcgattgggcctttgggcacccttgcttgaaggttgagtcctccttaatggatggtcaacgatcatgggctacccaacaggtgcaggcccaagaggaagagtaagaagaaaaggtcctgcatcattatcgaaataggtggtctgagccaccttagccctatggtgacctgaagttttgtttgaaagccttctaacaagacctctgagtctagaagcctgtctacaaaaatgaaagtaacaaagttagaatacaagacaaacatagaattgatggtgcaatcaactatcaactaccatcatccttaggagaggagtcatctgaatcattagcaaccatcttgcccttgcctctagatgtgagggagaggtgagtgggcctcaaaaaactttggcctctaggcttgttcaacaaagtggcatcatcaataatgcccttacgagtgaagcgctgaaagagggccctttgtcttttctccaaattcctggctattcgtgatagaagaacatcatcatccatatcgaagtacgcctgcctcctgggctagccttcttagcaattagggctccatctataacacatgataggctttcagcccctgtaactttagactcggggagacacaagtcgtatctcttgaatttggccacacaggccaacccaggtatcttcctcctctctagttggaaggacaatatgtggtttgatctatccctcatctgaagggtaggaatggagcgtttgtaaattggtactctctgaaaacgatgatgtcaaacttgctagatatcctaggcaataatgtagttctgggcatatctccataacttcgacaaaggtgtatttttggtatcacccaaccattgatagccaatttagctaaagtagaagtaccccgtccgattctgctttggagcaaacttcaagtcaaaataacatccaatctcataaggagtagtaccttttggggtgatttatgatggggacattctaaagtatgttgcgatgtctctaaagtacgggtgcaaagtagtactgcccctgctaaatgtggttcttttaccatgtaatctagttgagggccaaccggtgtactcgttggtcccttgacgacaactcacactggatgcctctcactagtccactctctctaatcatttcgagagtctcaacattgataatagatggaggagagacccaattgtctccctacgctctctgatcaagaacttggagctcagcaacctgtattagaacatggtctatgccaatcaacgaaggttggccaagcctattcaagggttgcctatcaccatcatacgagcctagaaaggccattggagagaatagaataagtcctatactgcctccttctagcaggtacaacgtcctcaacctcaaactcactgtctaggctctccaaacaatactcagccataggcacctctacctggccagcctctagatctctactatctagaggttacgtggcctcccccattataccaaacctacctattattgctaacctggaaatgtgagggttaaaaggtggagctctatgctaagactgcttagttcttggcataatgtaaatagtatgaacctcgagatcactcaaaaagttgcaagaaaatggactggatgctagtccacaaaggcaagattgattgaacctatgacaacatggttgtccctattgggttttgtgccctaa

SEQ ID NO: 43396 - DNA, 2088 bp, Cannabis sativa
ccatttaccctaaaagtaatatatcaagtatttaaagaaaaaaataataatagaaggacttttttcttcaagtatcactttgaccgtttgatgtagaactctcgcagtctcactgtataaaaacataccttatcttttatcaaatctttttaatgtcatattttgggtttagatcttcatcttccaatcaaaacccacaaaacctcaacttcattcatataaaatgccaggaatggagatattgcaatatttaaatatatttaaaatataaataaaatattaatgatccaaacatcatgggaaattatttgagaatactgcaccatcaggtaaacttgcatggataatattatgccacgtcatcaccacgattgatccctagtatgccacgtaatcaacaactttaagaaaaagattcttgttataatcatttctctccaaaaataaaaatgaaaaagctactctttttggcatgacttttgccacataaagtgcttatgacagcagaaaaggaaagctttcatagttttttgcacaaatcatgttttgttggatacccacaaagacatatagcccaacttagattctcaattgggcatttaggtgtccaagttgtcaattttagtccacatggaaattatagtgatttgattgatagtaaaataaaattatgttattagtgtgtaagtttattttgagcaattagtttaagtttctatagtttaatccaaaattgttgtttatgaaaattctttcatataattgcaataaaagtggttccaagagaaaaagacaagcactaaagcaatgagggaaaaagaaaaaaatgtggaaaaaagtagtcttttcatattgttggcgatttgcatataaagattatttaaccaaaaaaaatgaaccttgaagaagaaggaagatagctttttaacccccccaacaaagaaaataaaaatgagtcataccttacccttttgtgaaaagaaaatataaagaaccttttggaagtccttgatttcacacccaaccaatcatattttcaaaatgcttctctttaaaatctcttggcacaattattgtcacattcacaaaaactatatactatacaaaattcctcttacaatatagattttttaacttataaataaatgtgttttagattaagtgatcttcctaaattgcagtgttataattatatatgattttctcttgggtgatatcaaacaaactctttttttttagatttcctctaggattaggcttcatagactcatctctgggctccgacgtgcccttggttggatgcttggtagtgactaatggacaattgttacttgggcggcctagttcctccttcactctaggtgattttcttctctagtgactcactcttctagaactcgacattgtgagatcctgacaaccttgaaatttttatttggatccaaacaatgcgaatcaatggagatgatgttagatgtggtgatggtatttttgtggtaatatttgtgttatcatcgatagttagaggcagtttgacagtatttttagtttttaattttcataattaattgtgattttaaaatctagaatagaaagaaaaaatttgtcattttaaaaatttaaaagtgtttgactaatgttttctgaaaactatttttagattttttcttaatgaaaagaataatactttagtattccacaccacgctacaaactcagctccacccctacctcggtacaaactccgtacgtcgacccaaatcagaccctagactcgaactaggacccagacatgccccggaccttgaactagaccccggacccagacctagacaccggatcagaacccaaacccaaacccgaacccatgttggtttttatggtactaaatcaggtacgtacataatgaaataatttatattatctgattatcattgtaccacaactcaatggatctacaaatatgtgtataatgtgttcttgttgaaattatcaacacatgagcaagaataatttgagagagcaaactattttctttttctcaggtaatttcaaaaattagcttatgaaaatcatcatttgatttctc

SEQ ID NO: 43397 - DNA, 4686 bp, Cannabis sativa
atatataaagatatatattaatatcttcggtttcaagtcgtccacggaatgtcctatgtcagtgatgttttcaaagtagtcatgcatttaacggtgacttcattggttagaagaagaaataagtcaatgtttcctgcgagaatggttcattttgtcaatttgtagatattatagaaataaatgtgcaaccaattttgtctaaatctcacaataaatgatagttcttattcttttcatgagcccttttgatccatttgtgtaaacttcttagttcttttgctaaagaaaaatatgttggatcttattctgtccccagttttagagatgataatcgataagttaactgctccaatggttgataagtttgggagtcatttgaatcttaatgacaacatccaaaagttgcagaccactttaccaatggttcaagctcttcttgaagatgcagaggagaaacaagccaccaacacaagtgtcagagtttggctgtcaaagcttaaagatactgcctatgatgctgaagctcttcttcttcaactctctgctgctcaatcccttgtaaaccaaaaatatgccgacgaggttaacaacatgcttgtcgcgttggagaaggctgcgggtgaggggttttgcttgaatttgagggagaatattacagtcaacagagaatgggatagaagggaaacaagctctttcgttattgaatctgaagtttatggacgatatgaagatcaagagaaaattgtccatcttttactctcttctggtgcattacaaggaggaggaacagtgtcctgcattccaataataggcatgggaggattaggaaagacgacccttgctcagttagcttataatgatcaaaggatacaacaatatttccatgaaaaggtatggatttttgtttctcataactttgatgtcaagcatatattgatcactatcattgagtctatttctgaggctaagtgggagctcaactctatggatgaagcacacaagaaagtaaagaaactgttatacaagaaaagatttttgattgtgttagatagtgtttggacagaaaatcaagaagattgggatatgctaagacaattgttgtttgggattggtattgatggaagcatgattttagttacaacgcgaagcagaaaagttgttgaggcacttgttgtggcacactttttgaaaaggccatattatttgggagaattagctgaggatgcttgttggtcattgtttaagcaccacgcttttgaagtaggtagagatttggaaaaccaagatctatttgctgttggacaagaaattgtgagaaagtgtagtggagtggccttagcagtgaaaactttgggaagtgttatgcggttcaaaagaaacatgagagattgggagtttgtacgagatagtgaactttggaacttggatgaatgcaaacttgggattcttccggctttaaagttaagttactatcacttgcctttgcacctaaaacgatgttttgctctttgctcaatctttcctagaaattatgagtttgagaaagagaggttgatccttttatggatggcagaaggcttaattcagtccaagttaaaagtcccagaggatgttggaaataactacttcactgatctggagtggatgtcttttttccagaagacaagttttgatgaagataacagatacaagatacatgatatcatttatgatctgttgcaatctgttattggttctgaatacgctatcataggcaacggttttgagactccaactacttttaaacgaattcgtcattcatctgtgttctgcaattttaattcatcccaaattccagaagagttgtatcatgcaagtaatcgtttgcgaacactcttactgtattgtgaaggtaatttggaagtgccacttcataaactgttttcttgtttttcatgtttgtctgtgctgagtgtgagtggatccaatctcgagagtttcaaggctccaactggttccttgtggcatttgacataccttgatttatctcacacccatataaaagagttacctgatgagttagaagatatacctggtttacaaactcttaatctctttaattgctataatcttttagcattgtctgacttgacaaaaatgaaaagcctcagacatctcaacaacaatggatgcgaaaaactgagttgcatggtgaaaaatggctcaacatactgtggtttaagtccgaacattcagcttaaaacattgccattgtttgttgtaggcagtcatcttgacacactccttttaagatggcttgagcttcaaggtagtttaaaaattacatacatggagaacattaaatctaaattttttagactgaataccaatattagaattgagtcattaggactattctgggggagcgatgatagttgcacaaacataactccaaaaggcgatcttattttaagaaagttccagctaagacaacaaactgagccatcaggatcgtcttcagaaaatgatgtacaagatctttctaaaccaagaagagtgctggaaaaaatcatgctacctaatgctcttaaaagtctccttatcaaaggatatccaggattagagtttccaacatggaattctccttatttgaattctatccacttgatcaactgtagagaaagcacacatcttcctacctgtggccatcttcagtctcttactagactttcattccaacaaatgcatggagtgaccataattggtgatgagttctactctagtttctcatatggaggtagaaatgagatatcattccctcaactcaaagagttagtacttaatgattttcctaatttgaaacactggattagtccatattctggtgtaggatcttttcctatgttgaggaaattaattcttaataaatgtccaaagctagttgaaatgccaagcttttcatcattgagtcatttggatgtgcaggactgtcatgcgagtatatttgtttcttttcagaatctaacatcacttgaaacacttgtaattgaaggagtcaaagacttgtactgtttctcaggaccatttcctataagaaatcctttgcttagaagcttggaaataaaatcttgtcctcagctttcgattttgcccgaagacttggtaaatctttctaatttgaagtcattggtgattcgttggtgtggagagctcaagtccttgccagcaagtttgcagtacctcaattctgtagagtcattggagattggtgattgtcatagtctaatgtctttgccaggtggtgaggatagaggcttaagtaaccttcgctctttgtcgattgagaattgccacaatctaaaggacttgtcaatgggattccaacatatgacatctcttgaaattattatgtattgtccatgtattgttgaattacctgaaactgttaagcacctgtctacccttcaaagcttaagcatcatgtattgccagcagctattgttcttatcagacgaagtacagaatttgatgatgttgcgaagtttggaaattaggcgatgtcccatgttaaaagttttgccaaactggattgaaaaacttgtttccttgagatccttagcgatttcagactgccatagcattacatttttaccagaaggtatgcaactcctcactgctctccagcacttatccattcatgattgtcctcaacttcagcaaaggtgtaaaccagaaaatggtgaagattggccaaagatagcccatgtcccccataaacatatcgaatcagctagcctaaagcgtccaagagaagaaggcagcaactcttcaaatcattgaaatgaagctgggacttccacaattaacaagtaagaaacctttggatgcttaagtgactaagttctgtttgaccatttagttttgatgtaaatgatcttctttcgtcaaccgtttaatgtaatggtgttaataagttaattttatcaatacatcatcaaatttgattccaatattctatatagaaggttaattttttttatgcaggcgtggcattttattttctcaagaacaactctgaataaatggtgagcaagaaaccagagttatgaggctgttgcaagttgtggtaatggattagctgtttcttctttctgaaatcaatctatatgattttgtaaagtgaggttttgtataattgagtaggttgtgacatgatttaattgttatgtatctgttattaaagttagctcttagtgatgtaaatgtagaaatgacttgagtgaataattgagagaacatgtttgatagttgtttgtgtaaattataactgtggttatgcatacgttatatgcctaaaacagtacttttgttcttacaaaagctattgtaatcaaagtgaaaaatgcattaattctcttttaagagaagatcttgatttgttttattattcaactagagaactaagccgcgcggtcttgtaatttttttaaattcttctaattcattttttttgcttaatgtactaattcaattaattcaacttttatgtactaatatgatccaatacaaatattaataaaattttaaaataacagaataacttaatccaatttatttaagtctcaaaatctaattcgattagtaatttgattgatttgtttttttaattgaatttttagttctagaacatgatttcaatattaactt

SEQ ID NO: 43398 - DNA, 2465 bp, Cannabis sativa
  modified_base (31)..(39): a, c, t, g, unknown or other
  modified_base (2428)..(2430): a, c, t, g, unknown or other
ttacgtgcctcggcacgtaacttctaactannnnnnnnntatatatatatatatatatgggctctactactaaattataattcctagattttgggattttattatgcgccgttatagcctttctttaaaatataaaattgtgaagagtttttaagctaggcttgtagattatatatatggtatattaatttattataagtaattgaattaagaaattattaaatatatatatatataatcgaaatttacgggtgaaataaaatattgtttttattttaaatgttaaaaaaataatatcaacaattcatatattatatatattgattcaaataatggaactttgaggattggttacacatataatatatgtgaaacaacatatgggatttttaatattaaaaaacaaaaaagacaatcaatatcctttaatattttcgacaagagagaggctatatatatatagctaataataagtggtggactcaagatataacgtattaaaaatcgatacaaatttatatttttataatactaaatataatttaaagtaaatacaagttttattgatagaatttaaaaaaaaaacacttaaaatactaaaaagtagacatgttcttgttgggatataaacccatgtcctcaactatgtgtataaaatattataaccattatactaaagctcacattatgtttactaatatcatttttaagtatagatatatatagtgtaattataattaaattactttttcttattttttatagaacaattatcctctcgcttttatgtgagcctgcttatggctaatattgtatattaccttctcatttataaattttttttggtcaaaaaaaagaaaaaagaaaagctgttaacaaatttataatatatattaaataaaaaaaaggaatactttaaaagaaaaaaaaattacaaaaatacattctgtacaaaatttttaacattttttaaattttatttatatgaaatacagtctttaaatgtatatttatgttattttattgttgattttttgttattatatattattttttttttatgttgttttgttattattttcttattatttgcatgtaatttttttttgtattttatataaaataccgtaaaaatataaaaaaaaatataatttattttttttttaaaaaataatattttatataattatccaaaaagatattatgatataaagtgtctaggcacatgcatttgaataaaaagaaaaagaagtgtatgtaaaaaaaacttaattaagtataatgagaaagtgagtgagtaatataatgaaatgaaatgtgtacgtgtacgtgtcgttttgtatatatgataacttgtggttgaagtaaatgtttaagcttggccatgcattcttacggttacgtacggaccagatccatccagatggtttttgttttatgggtaaaagttaactaattacaaccaactttcttattaacatttattttccattttaaaataaataaatgcggtcgatagttttccaaaatgcaatttctagcttttaactaatttctttattgatttttaaaaaaaaaataataataatttctttattacgcgtacaggggagtgatcttctggacctaaatttttgtgataaatatttatatttatatattgatttgaggtcaaaagtataaaaagacatcgttctatattacatggtgatggtgatgagttcataagataagaattgtaggacagagaaattattatcaattaaagttaattagaaagaattatatatatgtaaatgtaatagccaaaacaaagacagtaatataaatatatatatatatatatatatatcaatattaatcctcaaaacacatcttactcgctagtaccacttataaatgttttaattaagtaatagtgaatgtttttaattattatttttaataaagttgcaactaattccttttgtttaccgtgcatgattttcttacatcacttttaattaaaaacttcatgataatttagaatgttgaaatttagaattatttatttatattatatatattcaactattaaaataataaaatatagtatgtgtatatgtgtaaggcctaagtaccttactttagtgagtgaaaaaaaaaaaaaaaaattggtcccttatctaaaaagaaatatagtacttttaaaaagaattttttttgattctcttgacaaaatgcgccctaagtacaatactaacttacttatgctgaagcctgtataattataagtattatgcgttggcttattaatttgttaaatgctttgggaaatttagtttaagaaagccaattcatattatatattacacgttataccctaatttgtacaagggcttttttcataaatgtacaacaaaaacaaaataattacaaaaaatgtgcnnnaaaaaattattttaaaaatttatacattttgaaaa

SEQ ID NO: 43399 - DNA, 4197 bp, Cannabis sativa
  modified_base (1138)..(1141): a, c, t, g, unknown or other
atcaacttgtaactttggctttctcgttaaaaatattactactctcttactttttcttaccttcttgttttgtgttgtgtaggtcaatgaccttgatacaacagattcctcaatgacgcttgcaacttctgcaggctacttacgctatcctccacctactgtgtacttagcagatgctcaatctaccgagcattctagtttcacagatggaatgccccttacgtcattaccatttatgatatggccttcatttggcagggataatggtagaatttccatgcaacgaactgatactgatgattcaagcagcgtccagcagagagttgacccctctgcttcagtacgacttttaacatattcaactccatcaggacagtatgaacttctgctgtcccctgttgaaccaaatgacacctctcctgtcccagaagaaataggagctaatcctttatcaagtgaaatggaggctgaactttctcagtctgcaaatgatactttagagcctatggaagtgcaacctgaagcaagaacaaatcctattttcccttttggtgacccaacatattgggagctacctttcttgcaagggtggttaatgggtcagaaccaagctggtcaacgcaatgtgaggcctctcaatagtgctgctcctgataataattctacacccattgcgataggaactccaatttttccctcagtaatgccgacgagtgttggacaatctagacttataggacgatctgggtcaagaaatcgtgcttcgcgttctcgtgcaatgtcagtgactggtgctagtgaaggtgctagtttaaataataacatgcatgatgaaagtgatcctcaacctgttgttaatagaattcaaaccgaacttgccacctcacttgctgcagcggcagctgctgagttaccatgcacagtgaaacttagaatatggcctcatgatgttagacatccatgcgtgccacttgatgcagacagatgtcgtttgtccattccccatgctgtactttgtaggtatgttctctttaaatatatttttcaacatattcttactatgttaaccttaacatgtctattacatggttctatagctttgcagacatgtcatttttgatatttatatatatatatnnnnatatatatatattctttaaccttgtgtcaattatggtttggatcagtgttttcttttttatttaaatttgaaatcaagtttagagtttgttttagaataataaataaataaaacaaataaatggatgtttatcttggaagttggcagctcctatgatttcttaaaaaaagaaaatcttgtgttatactcttgcagtgaaatgggtgcccatttttcaccttgtgggaaatttttagcagcttgtgttgcgtgtatgcttccccatttggaagctgatcctgcctcacagaaccaggccaacaatgatgtcactgggattccaacttccccaactcgtcaccctctttctgcacatcaggttatctatgagcttcggatatattctcttgaggaggcaacgtaagcttcaaacctctattcatgtgttgtgttttaatgttttcttgctttgctgttttcaatgaaattgttcattttgcttgtatagatttggtttggtgcttgctgcacgagctataagagctgctcattgtttaacatctattcaagtaagtttctttcggcagattcagcttacatgcatatacccatgataattctttgtttaatgttagctaaattagatttttcttattgctctgtaaattcattgcaatatttaatgattgcagttctctcctacatctgagcatttattgcttgcatatggtcgccgccataattcgctccttaaaagtgttgtaattgatggagaggcaacggttcccatttacaccattctggaggtaaataaatctgttttccaggtcattgaatttatgctatatatgttgattagactattccgttgaaaaatgtggtgttcctttcatttctaagaatgatgacacatttacagacagagcaacaattctttcctcactatcatttttgaacataagattagaacatttacattgcatattgtagccatcagtgtcttccggttgtttcttgctatctttgtattgactgagcagcactatatagtttctagacatgacttttcaggaatctaaaatcttgttttagaaatccgagaccaaaactgaatgtttattttgctatcgctcagatctacagggtttctgatatggaacttgtgagagttcttcctagtgcagaggatgaggtcaatgttgcttgttttcatccatctgctgggggtgggcttgtttacggaactaaggtaaacgctcaaggttttgtatccactatttggtttctttcagttaagattacaagctttaatgttcttttggtgtttctaggaaggaaagttgaggatcctccaatatgatcgctctcaaggcacaagtcaaacatcatgtgtatttctcgatgaaaacatgcttgaggtagaagaaatgctaagtttctagatttaaatgttgatctattcttcatattctatttttcgttacttactatacttgttcatcttgttttaggtccctacttatgctttggaatgctagaagccgtgctatccacatgcggatgatgctgctcggtttagctggtttgtttctattcatggtaaattgaattttttagttttgcttttaatggaatttgctcagttaaccatacccatcagggagattgtctcaaactcactttacttaattccaatcgtcttagtagtataatttgaagtatgtgcttttcggctctaaatttacagatatccttctgaagggtaccatatatttatttgtttagttttaataattaggaacctgtgtccagtgagtctttttatcttactgggcaggtcaccgtcgttagttgcaaaaggaaatacatttctcgatctacaacgggaagctgtctagaaagcaactacaaaattgctcaaattgtcctgtgcacttgtgcatttcttggtacaacaaattcatatattatgcaattttatgatcaagtttaatccaatgcatactgttgcttcttaattcatgatattaataatcattgatcattttccccatcacttgtttttatttctgaatctgatttactggccctacatataagttgcaaactacagttaatcataattaaaaagttattatttatttttctcaggattaaaaatgagccattcttacagtgaacccctaataccagtctgttgttttcctcgatcttcggtgatctacggcgatacggtgcagtacaagttggtgaatgaatgaatccctttatcatattttttttccagttaaaagaaggaagaaaaaaaaaggtcttgttgggtgacagaagtaaatatattaggaagttgatcttaaattggagtgaagcaagaggtggtttaaaatgatattttgtttttgttgatccttcagttttatgttaaagaaagataaaagattgttgatatgtaattcttccttttttgttttcagaaatgtaattagttttgttttctgtttctatacaaatgatcagacagagagggttaaaaccaagaatgttttctccttttctctttttttgacaaaaacaattgagtagattttgatatcaaaattagagtggttggttattttgcatgttgctatgaataaatatataaatatatatacaattttggttaaggcaaaatctgtaactgagacttgcacaagggagattaacttcgatttacatagctcgagcattgtgtgtcaaagcataattgactaattcacgagcaactctattaactttcctatacacaaataaaaatttcagcaatatttgtcaaacaataataaatgacaaatatgatgtaatataatattcatatcccgtcagcctttttttttttttttttaattaattagacagtttcaagacaatcacattctatacttaggaattttgctgtttaggttattttgtttaacaaaatgtttgttatgtaaagttgttttaattttgtataataatttaagtaatgtttcgtcttactaatttaaattttgattaaaggtggataaatattcttatctgtcgatttgttcaat

SEQ ID NO: 43400 - DNA, 3354 bp, Cannabis sativa
taagacataaacaaatggaaattatagtattactaacactagatacttatattgttaaaaaattagttcggtttatgctggttaaaaactcagaactttagatacttatgctgcagatattccttatatataatatgttccttctttaaacaaaatctcggaaaactagattcaaaattgtggcttgctcatgcttgtatttgatggttgagttgtgattgtttatttgaaatatcacataaaaaaatctagttaaaagctgaaaattttgtttgttatatataggctgttgacttgttcatgatgttgagctcctttcttcctaaagatggacatatggtatccgtaactgtttacccatctgaattcggtattcagcgtatgaaagaggaggaaattcatggtcctgttgccctctttgatggtgagaatgagaaaaatggtgaagatgatgacgatgacgatgatgacaatgatgatgagatggacaatgaaaaattgcgtgcttatgagaagagcaggctaaggtgatttcaaccactttgttttgcgagtttgaatgttttttggctatttgcagtctgcaaggttttatttttttcattgtcttatgctgcatctagttgttttaggtattatttttggaaagaaagacaacatcaacatttaaattatcttctaagcatttccttggcttttttaattgcttattgcatgacatcatgtttgtaggttttcccaataactgtctgaagttcttatcgggtgagatcatgtttgatgtttctaagcttaatattttgtatgtgtacttatcttcaggtattactttgctgtggtggaatgtgactcagttgctacagcagattacctctacaaagcttgtgatggggttgagtttgaaagatcatcgaatgtacttgatttaaggttcattcctgattcgatggaatttaaacacccaccccgtgatgttgcaacagaggttagtagcaatcattttaactaaggttaatgtatgtaaaagttatttgaaagcttgaagctattctatgatgctggttatttttacttccttgataagtcgaaggacttgtatgtctccaatataaaaggaagtatttaacttttcttctaactctagcatggaatttgttaaagtattttttattttgctcaggtccctgcaaactatgagggtttgaatttccaaactaaagctctccaactcagtaatatcaatctttcttgggatgaggatgaaccggatcgtgtaaaaaccctgaaaagaaaatttgatgccgatcaggttggtaccttttgacttcgaatatgttgaccgcatgcactttttcttgcaattcagtcaactttgtttaatggttcagttgatttgttgggtgtgtgagatgattttgctctatttttacttactgatttatgctaatccgtgattatctctatactttattcatgttttcatactgtcatgtactaagaaacgtctgctgaactacaaaccatgcttattctgtatgttggatggtttcattgatgcgttagttggagtaactatctcacttaggatttatttcctttctaaacaatcacattctttatttttagttgattgtacctttgtatatattaacattcgtgtatgaaactgggtccgaaatgatacaatcaatttggagtattcagtatggtgggaagaatccttttgctttctgagcaataatatgcatatgctgtaaactacattcaaatagcgaatgaaaaggataaaaacttggaagttttaggggtagtttgttgtcgttgcttattgcttcgattctgatgcaatctgtttttgacatgtagctagcagaattagagttgaaggagtttcttgcttctgatgacagtgaaagcgatgaagaaggtgaggacgaagaaggtgagggtaagagtgataaaaaacagaaaaagcgagatatgtaccgagctttacttgggtctggtaacggttcggatggagatgaggaagaggatgatgatgatcaggacatggaactcactttcaatacaggattggaagatataagcaagcgtatgatggaaaagaaggataagaaacaagaaacagtttgggagaccaagctcagacaacaacgcgagaaaaagaagcttagaaagcatagatccaagaattcatcagaggatgaaggtagtgataatgatcaagaggcaataaacgaaccaggcgactttttcgaagacgattctgacgaagaagagcccaagaagtctaataaaggtaaaagtaaaaaaagaaataaacaagaagaagatactagcgggcaagctgaagctacaaaaaacgagcttgagttgctacttgctgatgatgataccatggcggcgggtactggtgctaagggttataacttgaaacgtaggaagggtaaagatgggaaaaagattaaactaactttagaagatgacaaaataccacaaattgttgaggaccccagattctcctccctcttcagttcccctgcttttgctcttgatcccaccgacccacgtttcgaaaggtatcacttccctacacaacattaatatgctcaattattattgtcaccatatcctttttggctccaaccttattatcaatatttagtacttacttgtctgtatctgacaaagtgtagactttgtcacatgtctgtactaacccaatcaattttccaacagctttgtatcaaatgaggctcttaattagaattgacatttaaagttatattggcctaatattttgagtttggtgttgcaggagtagctcgacttatgctcggttagtctcgcaacaaaaagagaaggcacgggaagtggagcaacttgcacttgtagaaccacaagctgtaacggatgagcaactaaaatctgatgctggtgggtcttctaagaaagcgaaggacgagttatcggtgttagttaaaatggttaagactaaatcgaagcaaatcaaattgccctcaaatgagaagtcaggtaagaaagaaaagaaggagaaagatacaccggttgcatcggtgaaccggaaaactaaagctctaaagaaatcaaaataaaagaaaattggaaacataaaaatgataatcaatttttggtctagctcaaattttgctcgagaactttgtatttataattagtacataaattgtttaggctatggattttatgattgtctgagtttaatatgcaggaatattttatttattttaaaatttgttttatattaccttttatataacaataaagggttactattaatagaaggaaatttgagaattgtagtttaagtaa

SEQ ID NO: 43401 - DNA, 2819 bp, Cannabis sativa
aaaaaaaaaaaaaaaaaaaaagacacttagcggcgttagtaagttaacttggtagaggattggttaggccttacgttagaagtcgaggaaaaatgttggtcctatcgcaagctcctggcggagctctctcagccagaagttgctctttgaggtcttctccggcattaacgactccaaattctccacttttctctaatggcaaatccaagttcatctccaccagatttcccgacaaacgatttcctatctctctggcaaaagcagaacaaggtgtggattcgaccccctcctcctccaccaccaccaagcagtctttctcttcctctcccgctttcgacaatgagcaaagggttttcgtgggtgaggatagtgctcccttggaaggtgttatccagttcgataaacccgacacctcttctcgtttcaaaaaatgggggtaaactttttattttttttaattactaatttctgtcaatttttcttttcttgagttgtaatttcgatttctggatttgggttcagacgcgtggctctgtttgctggcggggatgttttggcattgattgtgttcgctgcaattggacgattcagccatgggttctcggtgtttgatgctgaaactcttcgcacggccgacccttttattgctggttcgtttgtttttcttacttttgaaatttcaattaccaactttgtattgaatattttttcaggaaaattaataataataattgtggttaaacagggtggtttttgagtgcttatttccttggaggttatggggaagatggacgaggaatgaatggtctgtccaaaggtgttactgctacagtaaaatcatgggctgtgggaatcccagtaagtttgaacttaatataatctttatggctaaacaagcttttcttataatgattcctactaaaaagtttggatttgggaattttaatttcaaattataactgtatcttttaatgtaattgcataagatgtagaatgtttttgcagttttgatctatttatatgtggtaatgcttcactggatgtcattgatatgtacatgtattcttaccattagaggagagctgggttttgcttttactgatttcaagaattttgctcagtttaccaataattaatttaatgcttctattgatatccttttcctcactctggcagctggggatagctataagagcagtgacgtcaggtcattttccagcatatccgtttatattggttaccatgggaagcactgctgttttacttactggatggagagcaatactatacagccttcttcccaatgataaaatcaagaagactgacgattaccgaagtggtagcccatttgaattgtttgaggtaaaaattctccctgtttgcttggtgttatttcgatttaagcaagaagttcccaaattcaaaattgatagagtttcctgtacattgtactatttcaaagcatgttaggcgtctccatgatataaaagcttcataacttgggacacttttataatggctccagaccaataaacccttaagttcttgtccagttgttgggagagattatcgattatgtgtcaaagtgtagtagatttttaatgaccaaacttagttccataccaacatcatatatattcttcattctttcttaccccttagattggaatcagctcccaataatgtttgcattttctcttggttgttgcagctgctcacatcattagttcgacggtggtgatatcaactgtttaagattctgcagttgtagagtactgctattatgaatataggcaccaagtttctttgtcgccatatacttttcagctcttatgtagctgtgtggttagtaaaatatatccaatatgttgctaccaattttgttctctcagatgctgatatcattctgcgcgtctaatctgtaatctccctgcaaagattgcaagaacaaaagtttgcaatcttatacaaaatacatgagcagagactttgctaatggtaccttccttaatttgaaaagcctgaatgaaataagttattcacagaaacaagaaccacgactattactatctgtttgcaggtacatgaaaatcataaggggcatctgataaaccaagtgtgctaacatcaaactcaacctacaaaaatattgtgaaatgcatactggtgattttcttgtttgtgcattatgatgcagtgtggtttgctttcgtgatatggatcagagattgttcacttaatgtgttctagacatggtattgtgtaattattaaattttatatacgaggtaaatcaactgatgtatttgatatttaccaactaccaagtgtaacaccccacccatttaggtggtttaatagtgttaagtttgttaagcaatatgtttttaaatctaatgtgtagttccctaaaaaaaatctaaagtgtaattaaagaagaaaattgtgatgattaaaaacaaactccataataaacttaggtggcgttttgttgggaagaataaaaatataagaataggaatgagaatggaaattggaataggaatataatggaataaaatttaaaatacacaaaaaaattaataaaaaaaattattaaattttttcaaatcttgtattggaatggtctttcattccatttcaaaatgaaatagtcattctaatagcctgagttacatagtggtcccaaatagacaagttatcgatttcaggttgcaaaccacaggtgcaggagatgatcttgtaccttgcactcttgtctcgtgtcaggtggtcccaggtcagagaggtggtggctgcaacgtatccttagtcgagtcc

SEQ ID NO: 43402 - DNA, 2845 bp, Cannabis sativa
  modified_base (29)..(61): a, c, t, g, unknown or other
tatatgttatggacttaacagattttgtnnnnnnnnnnnnnnnnnnnnnnnnnnnnnnnnnaaacataaatgacttctaatctctaggaacttgtttcgaaagaaattagctataagtctttgatcttcaatccagtgatctccgtctttagtaaccgcccaaataaaattcttttttcttttgaccagaacataagcatggaagaatcgagagttgcggtctccattcttcagccataattctcttgatttttgcttctaaatatcttcttgacatgcttccacttcctccatctcaagcaagatcccactttcagtttgatcattctctaaagaaggagcacaatgctagacctcgactaataatcgctccaacaattcaagctttctattacagtggccaaagcaatccctattccatttcctcaaggcctctgtcgtcgatcgaagtctggagcaaaggatgaagctatattacccagagatatcaatgttccaggcctgatggataatagctttgcaaccttcatccttattccatgcatcaatgtatcaaaaaggagctttgaatggggcaccatccatcaccgtatccaaaacaagagtcgcgtgatcagagtacctaatggaaataatcttggagcctgctttagggaaaagagtaagccagttggaagagcaaaggaacctatcctccttttctcgaaccagactatgccaatcctgcccattagaccatgtaaacattgcacccataccctttagatcaatcgctccacagtcaaacaaaaaattttgaagccctcgaccttcactttcacatactggcctacctcccaatttttcattctggttaagaatggaattaacatcccccataaccacccattcgtccacgaggccattcaccatttcaatcatcgaccccccaaaactatccctttcatttcttttgggaggcccatacacaaaacatcctacccaagatttgaaattcatgtcctcaccaaagcgcactataattttatcgatacacagagagagaacctgaatgttccacccaattttccaaaaaagagccacaccacccgtagcacccagcgtcgacgttgcaactcccgcattaaaatccaatctttgccaaatcccctccatattctccttactctttttggtctccatgaggaaaaccacatttggattgacattacgaatcaacgtttgcaatgccctcactgcctgaggttttttgagcccttggcagtttcacgaaaggactaacatatagagttggagagcatgatacggctcgcctcctcggcctgaacaaaatcttggatggagtctccatggacaacatcttcattatctccaaagatctcgcctagcttctcaactttccttcaagaattaccccttatcgaaattccccactggacaaccttcttttacttcgtactcctttcccagtttatcactgttatcattgataaaactggagaacattttcttaattgggccaactaactcatgcatccccgtattagcccagttgttgccttcaaaagaagtctctccatgtctccttttcttgctaggcccatgcccttcaagcgtgggcccaatagcaaaacccagcccattgatatcctttctaacaaggcccttcagcttttttttttttgaatttgtaagaagattttgaatccaaattaataaccccttggaaaatcatcgccaagtatccaatttgcgaatcagtgggggccaccaaaacaacctcttgccctccactactgctattcgtaccattctttgtacagtcaccgcgtccattttttagcacgattctgaaatcagaccctccacgtcatcattctctacagtactactttcatcaaaatcactgatactcctaaccgtttcgaccatcggaggttgggttggccgaactgcattgtcctgcttctcgatgccttttacgtgaacttatgtgccaactaacccatgatcaggttccacactctggtccccaatcctagcctcatcaacttccaccgccacatcaagattaagtttcccatttccctagtcgtgtcctccatctctacacgttcaaaacaatgtttccatctagtgccatatctcatccatggtccatctttattcattttaattaatttaactttttgttcaattatgcacaactttgttcaattagtttaacttacgtctgtcagtgtaaggtgttagatgctttttcctatgccgcattaaatgcatagacagttttttgatcctcgagcaacgtgacttatttcatcagtcctcccgtacccttgtaatgccctgatacttaagcgcattaccgtaattttctaattaacatgctacatttactaatcaaaggatttttctcaaaaatcgtgccatataaattttttttatttaaactattaaactttatgaatatatatatatatatttacataaatcaagatcccgttttttaacttttacaataattatcaaaatacttttacagacatgtcacatggcgacaacaaaatacagcttaagacgtcccaagaccgaacactccaggtcgcaccatctcgacatgtgcaatcatctcttgagctcagaaatcactcatgttcagtcgcctttcctttatctacacacaaaaataatatccgtgagtcgacagattcagtaagaaaaacacataacatacaatatattacacctatccacaaggcttatcagataaataaaaatgttctttactaaggtacgaccactgtaccacatgcaatatgtaccgctactgtacgagtgttgg

SEQ ID NO: 43403 - DNA, 4732 bp, Cannabis sativa
tttctttacttggtatcagagcggtttggctcctgccatgtcgactcctcaagatcaaacatcatcaacaaatcctgaaaaccaggatcaaccagcagccactggacagactcagacagctccgatgacagcctttgtgcaagctgctcatcctactccggttgcgaatcctttcagcaacacgttgagccagccattttctctaaaactcgattgcaataacttccctctttggaagaccatggtgactaccataatccgaggacacaggttagaaggatacctgaacggtgctcgacaagctccacctcagttcctaccatccgaagttgcagcagatggaaccccaggacctgacttcaatgtgaatccagaatatgaaaactggcttgtctatgaccagttgctaatggggtggttgtatggatcaatgacagaaggaatagctgcagaagtaatgggttgtcaatcggctgtagcactatggagtgcacttgaagaactctatggcgcctattctcgtgcaaacatggatgacattcgcaccaagatacagaccacacggaaaggaactcagtcaatggcagactatttgaaacaaaagcgcatgtgggccgactcactcgctttagcaggtgacccctatcccgaaaaacatttggtttctaatgtcttgtctggtcttgatgcagaatacttgtcgattgttgtgttgattgaagcacgtgaacataccacatggcaacagttgcaaaatatgctcctaagttttgatgggagattggagagactaaatgctgtcaataccaacagcaggttgctaaacaatccatcagcaaactatgctcaaaagccctctggatccaacaaccaacaaccatctgggatgccacgcagagggtattctcagcaacacaacaatagaggaaatcacaacaacacagggaacacaagaggaggaagtttcagaggtggtagaggtcgtggaggtagaggaaatggctcaaaacccacttgaaaagtgtgtgggaaatatggacattcggctgctatctgttataacagatatgatgagagtttcatgggccagcaacctaacaatgaagctaaccacgacaagcaactttcagcccttgttgctgcacctgaagtgatcaatgatgacagctggtatgctgacagtggtgccagcaaccacttaacttcagatccagaaaagattcagaacaagtccgaatatgggggtaaggaacaaatcacaatcggtgatggtagtaagcttcctatattacatgttggtactggttttcttagatctaaaaacagtcctctagtgttacataatatgcttcatgtgccttctatttcaaaaaaccttattagtgtctctaaactaacatctgataacaatgtctcaatggaattcttctctgatatttgtgttgtgaaggaacagccaaccgggagagtggttctgcaaggaacacttaaggatggtctttaccaactacatccatcaagatcatcccactcatcaaagtctcagtcgcatcctttagcttttgtatcaagtacacctactactagtcatgtttttccaaattccctaaaagatatttggcataggaaattaggacatccttcaaatgttgttctgaatcaagttttaaagttgtcaaatgtaaaagttcctttaaatgaaaatcaaagtttctgtgatgcttgtcaatatggtaagtctcatgcacttccttttcctaattcatcatctagagccaccaaagttttagaacttatacatacggatttatgggggccagcccccataacatctcatacaaatttcaaatattacattcacttccttgatgactttagtaggtatacttggctatatcctttgaaaaacaaatcggatgcactagaagctttcattcattttaaaaacatggcagaaaatcagttcgaaaccaaaattaaaaagcttcgaaccgattggggaggcgagttccaagccttttccaacctggttcttgacagtggcataatattcgaccattcttgccctcatacatctgaacaaaatggtcgagcggaaagaaagcatcgccatattgttgagatggggcttacactcatggcacaagcggcagtacccctaaagtattggtctgatgcctttagtactgcagtgtacctaattaataggttacctactgcagttttacaaaatcagtcaccctatgctacactcttttcaaaacaacctgattacaaatttttaaagacctttggtgttgcatgtttcccatgtcttaggtcctatcacacacataagttccaatttcactctattaaatgtgtgaatttgggctatagtgagagtcacaaaggctacaaatgccttagtcctcatggtcgaatctacatatcaagacatgttgtctttaatgaacatgaatttccttttaaatcaggttttctcaacaattatgccactgaacaacatgttgttgttcccatgcctcattcatggttccaactgcctttctctgcagccaactcttcatcctcaagccacacttcagctgatgctgatcctgcagaaccactaccccaagctgcctcagacacggatcaggttccttcttctccctctcattctgactcacctatttctgtatcacctcaccatttttcccctgcagcttcttcctcttctccacaaaactctgctacagtcgggcctacctcttctacttccccaacacctactgctgcccctacccgaccccctactgctccttctcaccctatgatcactcgaggaaaggcaggcattttcaagcctcgcgttttccttggccgagccacattctctcttgatcaccatgagcctctttcggttcaggatgcactcaaccatgaggggtggaatgctgctatgggagtcgaaattgtcgctctcaaacgcaacaaaacatggtatttagtgcctccttcacctcactataatgttgttggcaataagtgggtttacaaggtcaagtataatgctgataactctttccaacgctacaaagctaggttggttgcaaaaggcttccaccaaaggcctggaattgactttggggaaacctttagcccagtgatcaaagcatctactgttcgagtagttttgaccatagctgtatccaagaattgggacattcgacaacttgacataaataatgcgtttcttaatggaaacttggaagaagatgtgtatatggtccaaccacagggattcgaagaccccgagaagccacactatgtgtgtaagttgcaaaaatccatttacggacttaaacaagccccaagggcctggtatgagcaacttaaaatgacactacagaaatggaaatttgagaattcaaaggctgactcctctttgtttatgttcaaacatcctaactatgttatcatggtgctaatttatgttgatgatataatagttacaggcagcagctccaagcaccttgatcagttcatcactcaattaaacaagtcgttttctctgaaggaccttggacctctgcactattttctcggtatcgaagtctttagagatgctactggtctttatttgtcacaaagaaagtatattgctgaactcctccaaagaactgatatgtcaaatgtaaaaccaagtccaactcccatggtggctaacaaaccgctgtctatacatgatggagaacctatgacagatccctcacgatatagaagtgtcataggtgctcttcaatatctcagccacacacgaccggacatctcgtttgctgtcaacaaactcagtcaatttctcaaatgtcccactggtgttcactggaatgcaacaaaacgtgtcctaaggtacttgaaaggaactatccaccatggacttcatatagcaccaagtgacagattgagtttaactggcttctcggatgctgattgggcttgttgtcccgacgatagacggtcaatagcaggatactgtgtcttctttggtgactccttgatctcttggtcatcgaagaagcaaacggttgtcgcacgctccagcacagaatcggagtacagagcattggcacacctagctgctgaattgagttggatccaagaattgttgaaggaaatgaaactgaagctgcctgctgcacccgtaatctggtgtgataacatgagtgccaatgcactggctgctaaccccgtatatcatgcccgaacaaagcacatcgaacttgatgttcactttgttcgtgataaagtgctgaagaaagacttggagattcggtatgttccatcaagtgatcagattgctgattgtctaacaaaagggctctcacactcacgctttcagtatctcgtggacaagctaaacgtgactgcatctccctttagcttgaggggtggtgtcacgagaaaaatgcaggggcacttcagtaattcccctgcctccgaagttgttggaaatcagcaatctcagtaaagatttgcaccaactgtcatatctttccgttagcataggattcacaaaatattcctttgccaaaatatcttgctacgtgtatggccctgattgtacaatctgctcttatgtaatgcagcaatacagttataaatacaaagaaaatcatcagcatttattcagctgatttcattcatttctctgtccattttattatttctttacttggtatcagagcgg

SEQ ID NO: 43404 - DNA, 3499 bp, Cannabis sativa
ttataattaaatatagtaatactaatatatgcataatattggtaggggtattgcttcttttccaacagtatatagtctttcttatatgatcatgtatagtatgatattgtgtttttataaaattttaaataatattacactttaaatttaaatcatatattcgataccatagaaaaaaaaaagcacttactggcaagagtgatatgcccttaattaaattttccaatatatatagttgtagagcccctagaatcgtattataatcacaaatgcctacttattttatttcaattaaaataaatatttatatatgaaagtgaacagtgaatttctgacattatataatatctttgaatttaatgagcagctatattagatagacagacaggaaaaaatcaacggtgttggaagagtacaaacgtcattgtcttgagagttgctaattttcatttattaattaattttaagtacagcaattagcaacggtaatacaaaaaaaatttcaattcaattaaataaataaaacagagtaacgttgttattctgtcacggattagtatcacttaaaactctgtaattaaacatgcttaaacttaaaataaccaaataataataaagaaacatgttattgcatgtgataatgttaaagctaatactgtaattagtacattaatctaaggtcattaacgactaaactacttcttcatagtataacactgtaagagctgactgaactgagttactgttatgttttgttatgttatgttatgttctctctttctctttctttctgaaactttgcttttgcataataaagatttttcttctttcaagaagaagaagaagaagagaagaaccgacaccattaatgtgaagactcttatttattctttcacaccgtaaaagcagtaccactaaaatattattttgccttaattagtaattactactctcatctcatgtgtacggcttttcttctccaactaccaccattataataactctctctctcaatattaatattcctatactctaatattactctacgtttactaaaatagaagaagaaagtagacttggactaattccatttcttaagcaacttttcccaaggttcattatcttctctgcatttttttttcttcttcttcttctaagcttggaattttctcttttgcaaattacaataagaaacattcttctgaagcctactgtgttatttggctctgtcccctttgtttttattatataggaacttgttcaaactaatctctctttgtggtcttaattgctaatcatttacattattttcaggagcaactgggttgtactttgttttggagtacatgagctatggagtctgttttggtgaattctaagctataatctttaactgggtcactttagctttgagagtagtcttgttcatcattgtcaaaaactgatctttttttacaatgggattgtttttctggtttattctgttacttctttctgaggttatattccttccttgttcataccaacaacaaacttctcaaacccgagtcttgcttcaactaaggaggcaattggagaatcccaactcattacaagcttgggaaaattactatggtaacttgtgtaacattcctacctctgttcatgtcagtatcttatgccagaacacttcagtcacagagctgaaaataatgggagataaggtttctaatggtgatgagtttaatggctttgcaatccccaatcaaactctttcagaagctttttctattgaatcttttgttactacacttacaaagttaagcagcctgagagttcttagattagtatctttgggaatttggggaccacttcctgataagattcataggctatcttcacttgaactcttggatttgagctcaaatttcatgtatggttctgttcctccaaaaatatctacaatggttaagcttagtactctaacactggatgagaattatttcaatggaactgttcctgattggcttgactcattgtcaaatcttactattttgagcttgaagaacaacttgtttcatggtgagtttcctgattcagtgtctagagtaaaaacacttactgatatttcaatggctgataacaacatatctggtaagctacctgatttgagtggcttaactagtttgcgtgtattagatttaagagagaatcaattagattctgaattgccactactcccaaatcaattgataacagttcttctcagcaacaactcattctcaggacatattccttcaaaatttggtgatcttactcagcttcaacaccttgatctttcatcaaataatctaactgggatacctccttctgccttgttctctatgccaaaaatcagctatttgaacttagcatcaaatatgctaagtgggtcaattccaaacaagctaagttgtggtgcaaaacttggatttgtagatatttcaagcaacagattagtgggtggaattcctccttgtttggctagtaattcagacaaaagatttgttaaatacaatgcaaattgtctatccattgattccaatcatcaacatcatggtccatactgcatggaagacaataaaggaaaaaaaccatcaaaaggaatagttataacagtggttgttgcttccattagtggcactattctttttgctgtgcttatagtatttggtgtactcttcttgagaagaagaaatcatcatcaaaatcatcatcatcatcatccaagaaagcctcttgagcaacaacacacattgcctaaacaacaagagaattcaccatcagtgttttgttctgatcttgttacaaatgctagtaagttgtaaaattttcagtcccttttaccttgtaaactttttctttaatcttttactaatgccttcttatctttttttcttttactttcagggcttatttctcaagcagctaagctagggacacaaggagctccagtgtgtaaaatattttcttatgaagagttgagagaagcaacaaacaactttaacaagtctatatttttgggtgaaggcttcacagggaaggtacccaacaaactcaaatgtgctatagaattagatgtcacacttgaaaatttgcagagggaaaatgtatgtgtataacaaggaaaaaaaatcttgtttcaacttgaaaaaccatgatgaactaacttagaaaaagtccttaactgaaaatactttttattttttttctttcagctttacaagggaaaattggaaaacggaacttatgttactgtaagatctctggctttttcgaagaagtattcgattcagaacctcaaaggccggcttgattttctctcgaaacttcaccatcccaatttagttgcccttttgggctattgtactgaaaatggtggacaagattataatggtgttaacaaagtcttcctagtctatgaatatgttcctaatgggaactacagaacatatctatcaggtacaaaatccactgacct

SEQ ID NO: 43405 - DNA, 3787 bp, Cannabis sativa
  modified_base (1190)..(1191): a, c, t, g, unknown or other
  modified_base (3246)..(3246): a, c, t, g, unknown or other
  modified_base (3731)..(3761): a, c, t, g, unknown or other
taaaaataaaatattattattgaaaataactatatatatatttttgttaaaataagtttgaataattagtatattcttatttgtttatttattgatttacatatgttagtgggatgtatgctgtaaagagacactgttatgaatgcttaagaactggatatatatatatatataatacatatataaatatataggaataagcctcgagcaagaagaagcagaacagaaaagtcctaaaagttgaaatgtataaccagagagattgaatctaattatattctgataagattattaattatatataaataaaaatattatagttttctttttgtagggatataaataatattaaattatactatatattgtttgaaggccacgactctaatgaaaacaccaaccaaataaaccttgattgaagccttcaagtcaccccatgaggcgacaaaaaccccgcgacgacctttgtctcaaccttttcaattttctattcatcactaaatcatcaattcattatatattaaatattatttgcattaattttatgacattgacactcactaacatcaacaattattttatattattctcaattttgttgtcttcttcaaagctagggaacctattctcaattttacagaaatttttgtgtcagaatgattaatcaaatattattctctttaatttccatttacaagaaacctcataattataatggaggtttgcttaatgaaggatagttaattataagatattattattattattaatattgtgttcttgtgattgtatgattttgtttgtcttgatattacgataaagtgatggcggcttttcattaaatgggttgtatttttttttttaaattaattagcaataactaatataactagaagtgatgatattacagaagttaaaaaccttatataaattctaacgataatattacatataacatggcttactacttttgaatagggaatgcatctatatattacatgtatgtctatcagcaatgttagagggtaatttaaggtgtcaaagcaccactacaacaaattttactttcatcttaaaaaaaaaaaaaaaatcctacttttagtctcaaataaatttatgattaaaagtaaaaaattatcattaagtatatattattatttttatactgtgactaaatgtattagtcacannaatcacaatttattgtgactaaatatatttttaaatacaatatttattgtgacaaaaacaaaattaatgacaatttatatctaaatataaagttttagtcacaagtaacttttttttttttactaaaagtcacgtatagtcataaaagattgaggttatgattaaaaatttatcactaaaaataatttttttatagtgtaccataagacgtgacatatcgttattggtgaagtcgaatcttacacattttaatttaactaataatatgagaaagtactaactaattaagtaatatactaaacagagaatattattctcatgagaaatgataaattaatttcttaattctatttagtaaataaaagtttggttgaaaaatattaaatataaacaaaagctgaaaaaaaaaatgaattatatcaattggtgaaaattaaggcacatagtttcatcagttattcattttatatttgattaatataaaaggcgtttggtaatatttttatttttttttaatgttttaatcacaaaaataaaataaaaataaaatttgtgtttttaaaaaataaaattatgtttaataactatttttgttttttaattttaaaaacaaaaaataaaactgtgttttaaaactttcatttttatttttaggttttgatttatttaagtcgggttcacgtttgagtctaggtcgaggctgtgatccgagttcgggacgtggctcgaggccagagtccgagtctcaaggtccagattggggtcggagtccaaagtttgattaagaaaaaaaactattagaaaaaactttgaaagtaatttatttttcatttttaaaattttgactttcaattaaaaaattgaaaagtataaacagttttataaaacatgttttggaaaatatttttacttttctaattaaaaaacagaaaattaattaaaaaaaagtattatcaaacgcacccaaaatatctactattattttcttaatgtgatattagattaaaaaaagtaatttatgtaaaaacataatatctttaagagtaactaattcaaaattatacaagacaacaatcacatatatagttgcatgcaaagggtaatgcatgcaaataactatattttaaattgtgtataaatgtagttagatctatctattcaattagttttattgaaattttgtacatttcaccaaccaaccattgacagattttctttgggaaaaagtttacagtcactcggaatttttttttataaaaataatgtctttttataaaacaatcttaaaacaataaaataaaataattaaaaataacagtagaataactaaaaaaaataataataaaacaatagtaaaaacttaacgtagtataaaaattacttatcaatcaggtgtaaaactcctttaatcttagtgatcggttgtaactgaattcatcaaattttcctttgcaatggtggtaactggcgatactctgggcctccatcatcaacctgcaattatataccatcctcaaaaagagtccaggcttctgttaatgggttgggcccttattatgtatggatgggtttgaacaaggcctgtaaatacattaaattcccttaaattatgtcaaaagattaacttttaaattaattacaccggtattttaatattgaaaatacattattttaagaaagaaaaatatatattttttgtaacctcacagatctaagttatttttttttttttttgcaaaatttacaataatgtatatttttttctatttaatttaaaataataacattactactattatttgcgtaccacgcgcagtcaaatttaatgtttttcatgacttttttttacgtattctgattttttttattttattacatttttaaaagtaattttttggttactaaaagtattggatgattttacaatgcacctattaaaaaaaatgtactgatgcaccccttacttgttttggtctagaaaaatttttaagtctaattttttttttcatattcctgtacgttatagctatttaagatattctacaaaattttganaaattcgaaataatttacaatacagaaaacaatgttcaaatagccgatttgacacgcgtataaaataaaatagtcactcgtgtaacacactgcttgaatgcaattttcagggtgttaaactttttcaaatttcttaaagttttgcaggatgtcttaaataactataatttacatgatcataagaaaaaatttgactaaaaaattatttcggatactaaaacaaatagagatgtattggtatatcacttttaaggggtgcattatagaatttcccaaaagtattttttgtctaattttatttttcatattcatgtacattataactatttaagatatcctgcaaaagtttgggaaattcagaataatttacaatatagaaaataatgtacaaacagtctattttacacgtgtataaaataaaatagtcacgcgtgaaacacactgcttgagcacaattttcgacgtgttaaactttttcgaatttnnnnnnnnnnnnnnnnnnnnnnnnnnnnnnnataatttacatgaccatgagaaaaaa

SEQ ID NO: 43406 - DNA, 3710 bp, Cannabis sativa
atcatatgattgattttgattagtttgttgtcatgaaatttaatgcgatataaaaaatgctacttttttggttttttgattttattgtacaaattttgatctaaaaattttgattatgcagctaagagatgagaagggctttgtgtaattttgaaattattggcctaattatatttggaaattcataaactttattggcatattggaaaagtgtgtacaaactacaaagttgtattgtgtgaattttcctgttttgtaaatttacatgtaatgaaaagacagaatgttcataggtttcttctgtaaatgagggtcagcttcatttgagaccatgaatggtgagtttcctgattcttctgaccaatatttctttcaaggcagaggaaatgttgggtcaggagataaggctgttgttgtgaaccgaaatgccaacaatatttcgattcagactggggaggaattctcagctgagtttatgcaggatccaactacattaagaagattaacacctgttaatactaatgttaatcagcgttcttctaggagagttggttttaatcttaatacaactaatcatgagccagtttatgatgatcgaatgagcattttcgatactaaaagaatggatcccgaatacaattcagaagcctcagattttggttctagtccagggtatattgctgaattggatcataaggtttatcccaacaatttaagcagataccattgggaatatggtggtgctaaggttggtgatgatttgaatcgtggtgatcgaattgttgctgggccaaatactccacactattatggagaatcacctcagtcatatcatcaccatgtgtttgttcctggtttccctgagtgtccaaaatctgggaaggcaaaatttctttgcagtttcgggggaagaattatacaaaggccgaatgaggggaagcttagatatgttggtggagatacaaggattctatcgattaggaagaacataacatgggaagaattggtgaagaagacttcagcaatctgcaaccaacctcacacaatcaagtaccaacttcccggagaagatcttgactctcttatatctgtttgttcagatgaagatcttcataatttgttggaggagtatcaagaactagagagaaatgggggtcctcaaaggctgaggatcatacttgtatctttgaatgaaactgagagcccgggttctgctgaagccaggacaatgcagccaaccagtagtgagtatcatcatcagtatgttgttgctgtcaatggcatgatggacccgagtccacggaagagttcaagcgggcaaagtttgacgagccagtctagccaattcggaaataactcagattatagtccaagtttttgtagaggctctcctacagcagcatatgcaatggagaataaggattgtaacagtccaaactcttcaaacttggtgggatttttcggaagacctgtttctcacttttctactaaacttcctccaagcaagtcctacagtcatctctcttccatgtcacatattccagttcaacatttggagcctgagaatactaatttgcactattatatggatcaaccatataatgttggtaatggggaaggaactaatcctttcgttacaggaaaattctcttgtcaagattccaattatgttgatgctgttgatttctattataccgggccatcacagatgaattaccatgcttataacaaatatatggtggattctgagcagcctagcagaccccaacaaatgggatttcatcaaagaagcagaagtggagattgtgacttttctgcagtgaatcctcaaagtggcatgaaatcttggagaccaatgataaaggaaggagaattctctgaagactctcttggtttgttgccagcaacaaatgccaaagaaggttttaggaacaaaataatgcatgctctttccgattcaaagttgcaggaacttaaccgaacatcctcagaaggagtcttcaccatgcctttattgaatgcttctgcttcttcgaaagattcgccaactcaacaggatcagatagccaacaagttgccccaagtggatgaatatgagattcagtcatcggccaaggcgccacattattatgatggaaaggagatggtgaattggacaaacactaataaagctcttgatgatcactataggagagaattcggagaaaatgctgaagttaatgattcaccacagattaactatgttcaagttcctgaaggactaatgtccacttcattggacaagagaataagcagtcaaccagttcttgatggtactcatgaagttggtggcacagaatcctttttccaaagcactgtaagtaattttttcttgtcatgaagttttttacttgattatgatccaaaatttgtattaatgttagtaacctttttcactttggatcctttgtttcagaaatcaaattcacttttctattcagataatgaagtagtaccttgccttgataaagatcatgacattgaaaactcaagtcttagcaaagaattcaatgagatggctaagtttgatgagtctatctctatgcattcatttgaaacttatcatgacaatgaggcgaaaaaatcaacaacggttattattgaagatgtaactcatgaaatatctcacgaaatcccgtcctcttctaacatgtatgcagaagatgaagctacagatgaatgtaaatctattcaaggagaggaagagagtatggcatccgatcatgaggtaaacataacatgtttcctattaatttttggatgttttacaatcaactctatttgatctttgtcatgcattttataggatgaaaatggcagtgacacagataggaatgactctatgagtgatgctgcaattgctgagattgaagctggtgtctatggtttacaggttagaatcaatcatatacttatggcctaattatcgattagaagattttgcttgtatgaatcagtattggtataactgtataaagaatcttgattgcaacatttttggataatatgcagaccataaagtattctgatcttgaagaacagcgagagttgggatccggtacatttggaactgtttatcatgggaagtggcgaggaacagacgtagctattaagagaatcaaaaagagttgtttctctggaagatcatccgagcaagaacggctggtgagttgtttgcatatctgaatttcctacccttttttcgattccaatcagactgaacatatctgtattttatttgtgttcaatcagattaaggacttctggagagaggcaaggatactatcaactcttcaccatccaaatgtggtagcattctatggagtagttcctgatgggccggggggaacattggcaactgtaaccgagtttatggtgaacggttccttgagacatgttttgctaaagaaggacaggttggttgatcaatccatatcttacatgttcaatctacaaacacatttttagcttgaatacaatgaccaattcttttcttttttttcttaatttttattcagagttcttgatcgtcgaaagaggcttagaattataatggatgcagcttttggtatggaatatcttcatttgaaaaacattgttcattttgatctgaaatgtgacaatttgcttgtcaatttgagggaccccgaaagaccagtatgtaaggtaat

SEQ ID NO: 43407 - DNA, 4508 bp, Cannabis sativa
  modified_base (4473)..(4482): a, c, t, g, unknown or other
gagagaaacaaaaaaccttcttagtctgagaagctcctccatttcctttcccattctcacattcatcatcttcttcgtcatcttcatcgtcgtcctcgtcctcttcgtcttcactgtcctcggtttcttctccatcacagtcatcttcttcacaatccattgcttctgcttcattgttatcgggaggcccatctggatagatctctggatcgtgaacaagcaatgcagagaggccattttcgagcttgataactctgtacaaccggctatcgttgggagactttatgacaatatcgtcagaggagaaggtacagcgacctgtagccattgttgtacggcggggaagagaggtacagagaagagtacttgtctttggagaagtatgagttcgtcgagtgctaaggtaatgaaatttgattattcttttcttcgaggtttgtttgcagaagagtgaagacgacgcttttagcggctttagaagtttggtgaaaacgacgtgtcgtttaatcgtttgtgcccaattaaacgacatgtcgtttccagcacggtgagacgtaaagaaagaagaaagataagaaaagagagacctgttggtctgagtctgagagtgagccatggatgtttcacggtggattctggagtatctcattcgaagccctgacaatgatagattacccacgagagccctctcggttttgcccattcccaaccacgacttgcgttggaagaagattctgctccttcggaccattgagtgcgacgtttcagacgctttggtcaccgaatccattctccaaaatctggaattagtggaggcgttggactccaggcaagaagaaggcgcggccaccgccattgtggagtctatgaaagctgcttattgtgctgtggctttggagtgtacggtgaagtttttggtgagcggtggtggaaagcctggtgagaaatatttgaacgcaattgaccggatttggagagggagagtttgtcaattggagaggtctgggaagaagagtaatttgttaacggtggatttgaagaggtgttgggatgaggttgagaaggcggtttgggacgatggtgtatgtaagaagcttttgggtatgaatactcggaatgaggctgtgagattggttttggagtatttgaaagaggcttgggcgttaatgggtccttcgtttgtggagtgggcagcaaaattgagcacctacgagagaggtctggcgcgttcgggagcggtggagggttcagagaatgaacacgaagtgtatagagtggtcgaaatgcgtgaaccggtggcttcgaagttggccaatcctggtggagggttgagtgttagcggtatgcttgaattggcaagtgagctcagggcccgggaagatgtgatggaaccgggtaatgatcaggtttgcgataaagatgtggattttgctgttactttccatgattctagaccttccacggttgttaaaggtaccatttttctcatttttatcttcaaagagatatggatttgcatgcttgtagagaaacttacaaacaagtgtctgaagaaatgtttgagagaaatcctttgaatgaagataaaattgcttagctatagaaaaaactgagagtagactgagcttccatacattttgagcttttgtattcgtacaactttctcatggaatatacaacgctcttttaactgaaaacctataacaacatagcagacatttccacaaatttaggcaactgtcaaactaacatagcagattccaaaactgaaacagataaactccacttcagcgggatgtttaattttgaccttgttttggtcttctgttgtttcttacaaatctttctatgatagaagctgcatgtgtggagtggaggctttaatgtttttatctttcttgcaaattgttaggatttattcttctatgcttgagattttgtatatcaaatgtaggttttgttttgcaattgtttatggttacattacagaaattcagagggaaaaggtggtgaccagaaacaagcaagttgttttcaataaaaggcgtagaggaccagtcaggattagtgaagttgaggatttagacacaaatgaatccgaaaattgtaactctatcccaacccctgaagtcaatagagtacaagaaacacttaaatctagtactcaggaattacgagcgctcgtgacagacccacttcctgaagcattacaagtggctgaaggtgtagcttcagacttggcaacaaagaatgtgagccatgagcaccctgtagaaagccagaaagaaaccgaagcagatgcagcaacaaatgcatctgttgaacaaagcaccagacatgttcagtctagtgatgctaatcttgataagccatcctgtagtcatcaggataatggtactcaacccagcttgatggctcgcaatagtactgcccacacatacgaggtacttctttcaactcattgtttactatagtgcatactggaaatatggttcaaaccaactaataatgtagtgaatgtgacataaaatcctcttcagattgctttattttgcacaaaaatcttgtttataattttcagtttatcccctcttacagtatattgttttagttgatttatatgtgtcttaagttagaatgaataataccaagcagataacttctatcacgggttatgcgcatgtcaatctctgattgaagtgtatcttaattagtcccccctgttgactctcatatgatggatggtaacagttatgaacagaatgttatgtgctaaatggatctaacaaaaatttgtgttgatgtttctgttgaatttagcttcccttcctttttcacttgtttgttcatatgaacgcaagatcaggtttccttcacaaatttcatataatctcttaaaaccttgtgtcttcttcttgtttgcagtgggatgattcgattgatgatgaccctgatacatcggtcaaaaggagcaaacttcacctacctagcccgaagataaaggttgtttctccactgaagaagtatgcacctacaaaaattttaaagagaagaaaagttaagaggtggtcactgctggaggaagacactctaagggatggcgtgaataagttagtcctttttagatctttcgtatgcattagtataccttttaactgctgcttgttgatacttgtggaaatgtctttccagcctttaccaattttctgcaccaaatttctttgtgaattcataattcatcaaattaaaagcaaaatgtaggttcttccatcaaatttaagtaagaagtaggatgcaatatgttgttttgtatgttaagaatcccaatctttataattgatgttttctcatgaaggtacggtaggggaaattggaaacttatccttaatagctacagtgatatatttgaagagagaacagaggtaaacttgtgaacttgtatattttggtttgtgtgttatatattcctaactaatcaaaggtttgaggattttgtataggtggatttgaaggacaaatggagaaatatgactcgataatgacactactgagggacatggaaacagaggcatatctactgtctaacctccttttcactcatttaatctaatataatatggcaatggtattgacacccctgaacaagccaagtttgatatgttgctttagtagaggcttctcttggatagttagttactttcttatatgattgtaccatgttcaccctatatagatagatagcacagtatatgtagttgtattttattctgcaggtctactttttttaggttcaacttacatttcagcagcagcagccttatacaatgcaatagggttaaatggaagttgattgttacttggactctctcttcaattaatcattgatttaagattttttatttttagtgcagattttgtgtgcttatattttactctaaataaaagtctaaaagttaaattatgtattatttttttctagaaaagattagagaccaatttcatctccaatttagggcttctttcacttgtttttgcactatattttaatttactgtgaattagtaattacatagaaaaaaaaattaattattaaaaatgataatttggtaattgcatacattctattatcatggatattatgagaattttgtaaatatctaattatttaattattatataattatttggacccattgtctatttttttaaaaaaaaaaaaaatatcaaatcatagcacaatctcatctcaaaacttgtagagaaaaaatcattttacactttattatttatattttttaccacataaaaaaaattaatatttttttcatatttttttttcttttagaaatacaagcaaaatcatggtataaactaattttgtaaagaaaaaaattattttaaagctttgtcgatttttttaattttgtatgggttgttgtgggttgttggtatatatctttatctttatatatnnnnnnnnnntatctaacggcatttcttggtttaac

SEQ ID NO: 43408 - DNA, 2141 bp, Cannabis sativa
acccttccctcacctcaccctatttactattgtacatttattaattattgtatcaccatcaaattatatcaactatcgtatcactatcgtacattatttttatattacattgttctcgtacccaccaacatatcctatcgagcattcacaaaaaaatcacaaagaactcataaaaacgtaaatttcacaaaaattcaaatgtttactaaaaaataagcaaaaaatacaaagaaactacaaatatcaaacatataaacaatattagtgaaaagggtctcagtggtttcttcaatttatgggtttcggtcttggtatttttttcttcagcaggttacgatggtggcagttgtctgttgatggtctcttggctaagttgtgggtgggactggttgtgttgcgggaatgggaggagacacaggtttggacagagacgagtagagggatatagagaacacaaaaaaaaaaaagagatgagttttagtgagttttgaaataggatgtgtaatttggggatcaaataaaattaaggattaatttacttcacacttaacaatcaggtatatacggaagttccaaaattataacttaggtattattaccatcaaaaattaaacttatgtatttatttataatcggtagtcaactttaaatatttatgccgtaatttttttttttaataatggaattaataataataataataataaatatttaaaatatttatactagagaaagagtttgagtcttatgatgacaactcatatgagaatttagatagaaaggacaaagacttagatttacttatttagtttaatcactatattcttattaccaactaaacaaattaaataataataataaattttttcttcattggacaatattaatcaatgggctatgacttagaaaacaataaaataagtaaactaattaaacaccttaattttatcatgaatccaaattagttgtttatttttattagttaagggattatgacacataatggaccacaatttcaagtaaattatcacttgcaataaaatatttatattattttatttttaagcttttaacattattcttagtttttatttttgttaattaatacaaacaaggtcgttagattatttcatttgctttaaattatgtatagatgactataaatatcaattttagtattattaagctattatatttttatccattgactaataataaaaaatgaatttgcatgcttaattaatttagttatataattaaaaaaaattatcttttgatactatattaaaaatatattaatataaaaaaaattgataaactaacctaatttatataatttaagaattatatatatatatatttattagttagacaatacaagtaagtataaaacttcaatttttcttaataatactcattattttttacaaacgacataatttaatattaaacttcataaataagactcctctatttgatattataagagaaaaagatcaattaatgaacacaaaaatttataactaatataaaaaaaaaatagtcatatttattttattgtgcccaattcttacaagtggatcataattcatttcatacatgaaaaaagttgcataaataattcaaaagaatttagcctccaaaatatttaatttttctcttcactttctaagttgtgtgtttagactatagcattttttgtggggacattctttatgtgataacaaattacattatataataaaaacaacaacaacaaaataataattaattaattaagaagtttaataaaatggatattattatttggtaacttgttctacataaatatcacaataacaataggccaaagaaagagtatatattatttgggtggtttgagctttcctgtcatacagatcacaatgatatagtctactattatagtatgcacatactataataacataagtgagttatggtatagtctactatctttacaaataaaattatatatacaaaatattttaatataaagaaaatagttatttaaaagtttaataatacaattatattttaaaactttatagatcatatatatatattctattcttatatacatatatatattttttatccatacaatttaaaataaaattaaa

SEQ ID NO: 43409 - DNA, 2354 bp, Cannabis sativa
ttcaagatgttctggaaagctaaggacgatatctaaaacttttatgttgagctccaagtccagttctacctctaaggttgtcctagtttacaattaaatctgcctcgtacaatcgaactttccggcttccactattttctaccaaaatatgctaaaatctttccgaaagactctaaatgcatgaataatctttaaaataacctaacaaatttaaattacactaatcaataacttaaagaattaatataagaatattaatatgcaaattactcatatttataagataaatacgtactcatcaaagattgttagatttaaggatttttgtttaatttcattcattcaatttattttatttactgattatttatgtactaaaccatactccccagactttgttatctactaaatcatgcttctcaaaatttgatatatactaaatcatgtcttgaactttcatctatgttaaatttttttattaaaattagacaaaagtttttaaatttaataatctcaatagtttaaaaaatatttttaacgattttcaaaatttaaaaaatataatttagtacatatcaaaatcgttggtaaaatttttaattaaacttttaatgtagaatattaggctaaccaatcaaaaaaggcaatacacaattcattattatagggtggagtggaggtgggtaaaatgggaaagagaagagaattgataggagtgcagttgaccgttgactgaccgtccctgtcagttaaaagtttcactgctttgttttgggtttccaaagcaaaataatgaaatacccattttaccctcaaatttcttctaatactcctcaaccgaccccacttctcttaataataatatattaactcctccagaaacggaaaacagaagaacaaatctcattttctctttctttacttaatttataactttaaataaaatattcttaatttgcatgtattccgctctctcataaaacccatgagtcagtagagagagaaagggaagaatttagagagagaaggagaaagagaaaaatagagagagagaactgagtaggctaggtttagggttttgagggtttggagaccagagaacacaatgggcagcgaaagattgaacggaacggtcaagtggttcagtgatcagaagggttatggcttcattaccccttctgatggcagcgaggacttgttcgttcaccaatctgccatccgatccgacggtttccgaagcctcgctgacggagaaaccgtagagtttcagatcgagacggaaaataatcgtaccaaggcagtcgatgtcactggccctaacgagggacctgttcagggaacgcgcggtggtggtggtggttctggaggcggtggaagaggaggatctcgcggtggttatggcggaggtggtggatatggtggaggtggaggttacggtggtggtggtggttatggtggaggtggtagaggaggcagaggcggtggtgatggaggatatggaggcggaagtggaggaggcggtggcggttgttttaagtgtggtgaaagtggtcacatggcgagagattgcttccagggtggatcaagcggcggtggcggtggaggtaggtacggtggtggcggcggtggtagcggaggaggtggtggtggtggtggaaactgcttcaactgtggtgggactggacattttgcaagggagtgccctaacaaccctcgttgagtggaaaattttcctccaaaaaggaagaaaaatgcttatttcttagcatttgggagctttttttttttggttatttatttttaaattttaaatatcctggtttggttgactcttttgttgttagggttagggtgtttggaacaatggtttttctcctttttttgtgtttggttttaataggggagtttaatttatgatctaatattttctttgtgggaattattgttggtattttctttgttattgttatccaaactagtagtaagtaatgtatgtcttgggttttcttatggacaacaccgtatatgttcactgagctacctactttaccctttttgctctattttcaagtgtgtatatatacacattattaatatatgccggtgtttatttataagtcaactaatcatttttcttctgctttacatattttaatgcgatattgaaagttactactgttgtttattttgattgtgatttgtttgtatatgagattctcgttaataacaatgggataggatagataggttaaaactaaaagtgaatggtgtgtttttaagtgaagaaggaaaaacaaacacataaatataagagaattctataataatcgatgaaaatggattatttgtgttca

SEQ ID NO: 43410 - DNA, 2831 bp, Cannabis sativa
tagctcaaaggagactgctgagaggattttctacatttatgtagcgatatacatccattggtttatttgaagacgaataaggatgtgtgattttcatgtttaggtgtgggttgatatcttgggtgattttcaatgcaaaatttattctctttcgtacgtcatcagttcaagccctctcctagtttgtgtatattgccttttcctgaccaagttgtactactttgtataagtaactggcctgaagcttgcatcacactacaggctgttgggctctgcacttaagattgtatagtccatatagagcttgatcgttatagaagaaactaatattgaggttgggttagctggcctaacccagatttgtttctttaagtatgtgtttgcttgcgtatgtagttctatttcctatttctatttttactaaatagatggaaggtcaatctcaatggtttccttaaatgttctcagatgttcatgacctagttttcaactcatagaagagtatatcaatgataatgattgcctgtagaggctgggcagtaaaatctgtttttcttggtaactagtagttctttttttttttttttttttttattccagcctggtttttggagcccacttccatttcatctttttttcttaattagattgtttgcaactctaattatgtgaaatgcttaggtggtcaaacaatctaattagaggaaaatattatgcaattgtattttctgtttgaattaggtggacagatttatattactattcacggataagtctctttgcaaatgaacacattatcatcatttatgttcatgatctaattacctgatcacgccataataaatatggctccttttgctttagatctagcttgacatcaattctttgttagtttcgaagcctttatatatgtgtagtaccgccctttttaatgggtgtagttgcttattggtatttttaaaactcatcaaacccctggctatcttgatattagaagtttcgaggacatgattatgattactaggttgttgtggagctttatagccttacatgagaagtgatctataacctttatgtgtgctgatgtggaggcttaaactttgttctctagattcatttctgagccatagagtttgaaataaaagaacttttagctgctgcatgcagttgaaatatatattgattatacttgcgccggtggtttagaaactagatgtttgtaaatctgatcaacatttcttaaaaagtagcaatggactttgcttggtcttgttggaactctagagctaaactcaacttctgcttgtttacttgccctatagttggtgattcttatagcaggttgcttcagagaagcaagaaatattattttgaagggaaaatgtgccttcatagttgctgtgtaaattatagagaggttaagaagtaaggttgagattggcaaataatgactttcacaactttgtggtatggcctttgtagtacattctctagtaatccaagtttatttaaagtttaaacatttgtattgtttgccaatctcaatgactttcatgatagatttgaacttgtttattttaaatttcattgtcggggacactgaaaaaattgggaggcacaataatgcataggtcaagttaaatttcaatgttcaagttatgtttcaatcaaaaagaaaaaaaaaattctttgttcaatgacttttgtgttaatcttgtgattacttactgccattgctcttcagttctttttctggaaaaaagtttaatattgaagttgatgtttactatcttgtttggtgagaaagtaaacattggtttgtgatgtctcattttcatactgtctttaaggcacccttataatggtgaatccattttccttcatttcatataagcttgacatataggcctgtgatgatgtctgaaaacttctttatagatatgtttttcaattcccttgtatgcaacatttcaggtcttctaaagattttccggatatgcatagtctcatcatgcacgcttacaatgcggataatgctgacttgcgtgtggaccatttaggcttgcacaaagctctatgtgttttaatgggttggagctactcaaaacctcctgataactcaaaagcgtaccaatttctttctgctgaagaagcagcagcaaaccgggatgatctggttatttggccaccaatggttataattcataatacattaacaggaaagaacaaagaagggcggatggaaggtttgggaaacaaaagtatggatagcaaaattagaggtacaatgcgcactttaagtttttattattgtattgtcactcttcatgctgttaccagaattgtttctcttcagaaagtctataagaaggcaagtattattgcattttaagtctagtcgagggtcccatggtctagtatatgaggttgatgttaataggttgaagttttgtttatttttttaattctttgaagattttccagtcttaaatgtagcgagatgtgttgataaatgtgctcactatgttgtcagtgtcaccctcttgggtagttgagggtaagaagcattctaaaatcagaaccttctcattattgtcagtattttaaagatgttgatgtcctgtgaagtcggatattcggacagtatagtagagtagtaaaaaggagctgttgtagtgattttaataagtgcctcttatcaactttcactttcttgaaattagttgatatggggctggtaaaaaagttacgagaccaagaaaagtaaggagtgtagtagacattggaggctgaagtaggcaagagaatagcaatgataaataactcttcat

SEQ ID NO: 43411 - DNA, 12290 bp, Cannabis sativa
tgtgtgtgtgtaatatcacccatcaactttaaaacaaaacaacataagccatacatttcgaatgaaagaagcaatgcctaagccaaccttcagcacacaatgcatagagatattcgatacagaatgaatttttcacaaaatgaaattcaacttgaaaatggagttgtaaagttgaatcataagctagtaagagagatgtattgataccaaaacaagaaggcataacacatagtgaccaaccaaaaccaaaatttcacatgaaagttaagcacaagaaagatatgacaatccatctccctatcattgaatgaatgatgagtgtgaattccaactatgatcatgtgagactgactagcagtgggagggaaacagaatcaaaagtgtataaagatatataaaagggagaatatccaaagttttgtactttgttaattcaaatttaatcatcaaaaagttcaatttcatgcaggagaaaataagtttggagattgaaacaaccccttttcaagagataaagctataaatcccatttccaatttgtgtaaataaagaataaaaaagatcaatagagaatattattatgggtaaatattattttaagctctgtgctttgcaaaagttactgaatggactttttgttttgtgattttccacagttgaatcatgtgaggctgatcaacagtggaagtaaaactgaagcaaaagtctatagagaatatcccaagttttggactttcctaatttaaacataataatctaaaagttcaatttcatgcagtaggaaataagtttggagattgaaacaacccttttcaagagataaagctataaatcccatatccaatttgagtaaataaagaaaaaaaaaacatcaacagagaataacaataacatatttggtttcctggcctttcgaaatccatattcatcttcattaagaagagatcttctaatctataaccaaccaccaaaatgaaaatgtaaaccccaatctgtgtgtttgtagtatcacccaacaactttgaaacaaaacaaaacataaaaaaaccgtgcatttgtctaagccaaccttcagcacacactgcatagatatttgatacaaaatgaattcaccaagaaaagaatagatacaaagtgaattgtacaaaccagaaagttcacagaaaagagcagagctgaaaataatctagtaacagagatgttaagaaaaaacacataaaaaaacatttgggagagatgcttagaaagaacaagaaagatttgactatccatctccctattattgaatgatgagtgtgaggaaaactgaagcaaaagtctatagagaatatcccaagttttgtactttgctaattcaaacttaatcatctaaaacttctatttcatgcaagagaaaaataaaccacaatctgcgtgtgtaagccatgcatttcaaataaaagaaacaacacatttaatacaaaatgaatgtttcacacaaaagaaaatctagtggatttgatgaaaacttcaacttgaaaatggagtcgtgaaagttgtatcatcatgaatagatgcaaagtaaattatacaaaccagaaaagagaagagctgagcctgataataagctagtaagagagatgtattgataccaaaacaacaaaaacacataacacatagtgaccaaccaaaaccaacatttcagagggattttaagcacaagaaagatttgagtatccatctccctatcattgaatgaatgatgagtgtgaattcccaccatggaatcatgggaggaaaattgaagcaaaagtctatagagactaccccaagttttgaactttcctaattcaaacttaatcatctaacagttcaatttcatgcaagagaaaaataagttcggagagtgaaacaacacttttcaagagataaaactataaatcccatatccaatttgagcaaataaagaacaaaaaaatcaatagagaataataataatagcatatgcaaatgaaggaatgaatgacctgtggaacaaataggtaagccaaggtaccaaacttaatcatctaatggttcttttagtgcgtcgtattacattttattgtattgtatagtattatattaaattatatcttatgtcgtatttatatgaaaaactatatgtgatattaacttttacaatcatataaatatatattatttcagtataaattaaaatttaacataatattatctaaaaatattgtataaatataataaaatacaatacgacgtattacaacgtacttaatttcatgcaggagagaaagtaagtttataaatgtcatgacatgagaatatcccaagttttgaactttcctaattcaaactcaaatcatctaaaagttcaatttcatgcaagagaaagtaagtttgagattcaaacaacccatatccaatttatgtaaatagagaataataataataatagcatatgcaaatgtgggaatgaatgacctgtggagcaaatacataggccaaggtaccaaacacagcacctccaagaagaaacccagccacaaaatcaccaccaccaccacctctattaccatcatcatccctaaaaaatcaaaaaaagagtaaactttctttaaatccaagactataatttaggggtatagaaaatagattttgaagaaacgaaattgggggtaccggtattctgaacgaacagagaaattgcggttggttgatttggatttagtttgaattattctaaagtttgatgctttagttgggaaaaccttgagattgggatgaagatgagatcttcttcctaaaagcaaatcaatcaaattaatcaataaaataaaatcaatcatatgaacgtaaagaaaaccctaaaaggaataagagagattgttaccagagacggaagagagggacaaaggagcaaagcaagtagccatggatgaatgaagatgaagaaattacagaagaagagatctttgattatttcatttacaccaattatatttatatttatacacaaaaatatattctttttatttttttggaaaaaatatatattttattttttaatttaaagaatgaaataaaatgaatggagtatcgattaatccgcccattttttttcattatttttcaaacttattttgtaatagaatttttattttatttatatgaggatttaaaatgaaaaaaataaagtgttaattataatttattagtcaattttcatgaaatcaaatgtagaaatcttttttttttttcaatttttttatagagatatttattgtagttaaaatatcatctcggtaagattttaaaaaatttcgagtaatttacagtatcaaaaataaacgtttttgatattttaacattgtaaactattaaaaaaattataaatttatatggtgatattttttttataactatttatagggataatgttgtaagtataacgaacaccggcataaaaaaaattaaaagatacatattggcatgtattttcggacacgaacattgactaaaagattataaaagtagattgacgagatcactccaataatatattattaattaaaaaattatggaaaaggactgattttttttttcagagaaaaaaggaaaatgattttgtttgtaaattatatatggtagcacatgaaaatgtatatggtaatgtttttgttaattgagctcaggatcatatttttattattttggaaaatataagatttatttcgtcatttaacaaaagagatagttcaattggtaacttttgcaaaacacacgatccaaaatactatttaccctaatttttatgccacgtaggtgtagataatatttgaaaaagagaattactaaagggcatcattagtgcttagtaccctcgttcatgtcatatcgttattggtgtaattaagtaacgaatctcatatatattattaagaatataatatttaagaaatatcgctaagctgcgtgcccattagcaccttgaacaccactaatcactagtcctcattagcacattcatgtgctaccattaccactagtgattagtggtgttcaagcaccactacaagttgtcatttcgtgtaattaagtgtatcacatattcgacaccactagtacttaatagcaatgttcaatatttttcaaagaagtagggttgaatatttctttcaaaaaaaaaagtatggttgaacatcgagtagattttacaaatttcagattcatgggttttaaggaaaaaaattacacctatactcgctcgtgaaggccacgtgtttcatcagctcatgagtttcgagtcttccctgaaggttgggggagaacaaaggttaaagtccaagagaaagagagagggaaggtgagcgagtattcgcccgttcattagtaacgagttcaactcaacccgcctattttatatgaattttcttcaatgatcaaatcttttcgcaagccaagtttgggccaaatccgacccaaatgttaaccctagaagcaagtgttaacgtgttatgttaaaatcttgaatttactaaaatcttaccaattctaacacaacatgtgacacaaaatatttataaaacacacaactcacatgaattgtgtcgtgtcaaacctacttaatttcactgacacaaagacattgcatcacaaaaaattgataaaacacagactccataaatttgtcttgcatcaaacctacaaatctcatgttgaatttgtgtcaaactaacatatcataacccaaattatggccccctcaatatcatatcattcattgctccaaaaacacaaaatcttaaagcaatcaacaacccccacaacacatcatagtagcttaagtaatcaataatgaaaggtaaaacaaattttaaacccaaaaaagaaagatactcaaaagaacaagaagatgtccattttcctttgttgccatttcatttcctattgtctccaaattatgccggcggctatcacattctctttatatacaaaaaaacagtcaaaaaccaagatatgatcaaacccttttacccacccaaaattaaacactaaaaatattaaaaaaaagaaaagaaagagagaccaaagttgactgatgactaaaaggtaaaaagaaaaattattagtaacttcttgttgttgttgttgttgtgtaatgggatatgaacaaattcctaaaatgccccccaaggccccaaccaccaaagccctctgctgtgctggtatttggattgtgaagtgaactctctctctttctctctctttctcttaagtattattattattaatcataataataataataactatattataataataataataatactaagtaataatataatgtacattctatttttctgggaaacccccaaacaggagcaatgaggtattcacaggaggaggatggttattatgatgatgtctgttgtcccccggttgttccgatttcgctactgctttaactggaacagcttcttctttatccgggaatgggaacgaaagagacaatttaagggatgaagaatcgtcttcctctttaacctctatcggtttatctggaggaggcttctcctgtttgtttttcttatcaaccaaacccacaaagaatggcatagctttgttactctgtagcggcggttttgtctctgctcctaacgcgagctccaaattcggaaacccatcatcgtttccgcccaacaccatattcttccaacctgcagagctgtttccttgacgtgaatccacgggaaagaagcgcctttcggtcgttcctaagtcctcggggatgactttctcatcacaagcttcgacacatctcttctcctctgttgtagataagtagggactcgaattcttcctatttgatccaagagaatctctactacaactatgactaccacaaccgtacacgtcagttggaacagtttttcgcctcttcacgaaaatttcttcatctaacagcagattattaactccattccaaggagtactgttctgacttgtaacatttgaagcttgaggggcctctgaaagatctatgtgaggccgtttcctttccatagaagaacactcaactcctatgctgtccgacgaacactcaacttctatgctgttcaaatccgttactaacgctgttttcttattcacaaacccatcattatctccctgcgctccaccacttctattagttccatctgaagccctacaatcaccgacagtactggcagtggcaccaactcttccatgtaaacttttttcctcgcaatctgtttctgtaagttctacatcgtcatttaaagatggaagaatcttcggtgttgaagatgaggtatccttgatatcgcaatgcattttcgtttcctcacctatgttagagctgtttgctttggtgatagcaacaaaaggtttcggctctgtggtcggcctgttctctagaggacttatttcttgctgcagaaacaaggccaaaaacacgataagcttaacaaaagaaaatgcatgtatattctaaatgatcgaaacatgttgaaagacaaatcaattattaaaatacctattggaaaataaataatttcaaaaactgaggatgacaaaaaagaacattacaaaagttcaatcttccacgtgaaaatcagattagtcaagcctgcaacacgtgtttgcttaaaaatgtttccaccaagataagaaaatgtcaaacacaatcctgactttacatataaaagtcttctcacagaaagggtcttttaaataagacaaatctacccggaatataaaaagcaaacatactaacaagaagagcagattataatgccaaacatgatgtagagaactatgaaggaaacatttttttcttttaaaatatattccgaaagaaaggtcaagtgtctcacctttccgcttggagtggccacattgcctatgtattttaagtcaactatactatcttcaagaattgagttagcttttaatcccgaacacagtggttcagaaactttttggttgttgcaatctccgctaattccagcacatgcctgatcacttacactagaagctaagaccggactacaatatctgccacttgctgaagattcttcatctatacacttgggtaaacagagtgtatccgacactgtcatgacagctttaggtgcatatttgtccatggacatcgtactataattggggagatgtaacttggatgaatcagcggaacgtggcctccttgccctgaacacaccccataagaagaataacatattccaacctggcaatagtagaacaagttgggaaactcaaattaattagtgtttaacctaaatcaaaaggcacatcaataacgagaggcatgattacaccgcaacacgaaaataaaaaaatggttggctgttatattcaactacaggtccatacccatatatacataaaaatacatctttctgtccatataaatccacaatggagtgtttaaatattattatatttttgcatctaatgtataaaagttgagttgcacaaaaatctcatctgtgtgctcgtgccacaaagagtagtaaatgtagatagttggcaaacacagtgattcatatcctttcctgttaaaacttgcagtagccacataaaaacatgctatactatcctatttatattctgtgttttgagtgtaacgaaattgaacggccagcaatcaaatcaaaacaattgtttataaagcatgtagtgaaaaacatatcttcaaaaatattcttacgttgtgaattctctgggagatgattcgaggggaatattagaatttcaacaccctcaagatttcctttaagagctaaatcattcttgatcataccatccaacaagcccttgtaatttctctcatagctgcaaggtagcaatcatacaaaacttcaaactaaggaataaaagttaaaatgtgtgatcagaaccgatcaagactagagaatataaatattaacctctcgagatctttggcaaagaagtagagagcaatgttgtcatctttagcaccgccatcataaaactgtgctggccatgcactcaggcgaggaacttcactcagtaagagtttctgtggaaatttgcttgctacttcaagtaccctgggggatgcacaagttgataaatgtgcttggattccaccacataaatcgagagagctgccacttctattgatctcaaaacaacccctgtacgtgaaaaataacaagaattgaaaaaaatgaaaaaagaacggaaggagaaataaataaactctgcatatgaaaaacacaaataaatggcaataaagagagtcctactgccagatgtattcatattctggaatggctggcgtcttcagaagttgaggcgacgttgccagtgcataacttataaaatccttcaccataggttttacaacagaggggacaactacttccgaatcctctactttacaagagaatttagaatctggtgtaggcacagtatgatgcatcatcttgctcgcagttgtatggatagaatcacaggcggtactcactggaactgcttgccgcatttcatatgttccttcaggaggaataatattttttggcttatttagagacaatgtttggtcttgactggatatttctgaattcaaatctgagtttggtgtcaaaagctcgtcaactcttttccttctatgtattgcaggctttctaagcaaagcagcttgaattgcatctttcaatctactgcccttttgtgtctcctccctagaacttctagcaccagaagaatcaataccagaggcctgtgaacttccacctgtgcaagactctgcagaatggccgatttctttacatttttgacagacagtacttttagaactagttgtaatagtcggccttgggcgaacagcagcgctctcctttagtttctctgtctgttgtgttatatcctgtgatcgagttaacccatcctccataactccatcgacattgttagatggtttatcagaattaaatgaacaggtagataaggcttcatccttgatgatattatgatttgatttcgcttcagtaccagagttattaactccgctagcacaagaaactccgactgcaattcaaaaaataaaaataaaaaatcagtaccaaacacttacattagtcaacaaaatatatattttaaagcaagtcaaaaataatatttgatggtatagaaaagtagcaacgaaactataacaaatgtgattttgaaaaacaaatatagcaactcagacacttccatcaaaatgtcacatcatacctgaagaaactggagtctctacaggtttacgagctaggttaccaattgattttgatgtacttgattttccttcagattgaacttttaaatctcgattattactagcaaaagaaatcagactggattcaacacgagatgcttggtcagccttaggagttgaaacagtagagctagttgttgagcaaacaggggggcgatctagtctggataaatgttttctctcaaatgtaggccgctctctcacttgtttcgatccttttatatcaacagcaggggcaaacctaggtgaaagcatttttactttcgaatcaccggcacttgagcgccccgtgtttgtagatttaaatgacattgatttgcttatcagtcttccaggcctctccttcgtatcatgagacatgtgctctttacttcccttttgcttttcaggaataacttcatctacaagtttaacttttggtttggaatttgaggcgctaaatgattttgacttaaacagtgctcctgtacaaaaataatatattcttggttctcagagagagaagcaacaataaaaatatgtggatgaacaaaacaaataaatttactcttacataaaaaagatggaaagtagaaaaaacaattacaaaaatagatgtgaaatatgtacaagctgcaaaaggctgtttgctcacccttttgaatgtgatgaccaactgcaggagagcgtgaactttcaagcatatcattagcagattgcttgcctaaagatgcctaaaaatggtgaagagataactacggcgctgaaagttaaaatatcaaaattaatctccaaactaacattccccacagaatcaacatcgaagtggtagattcgagttttaaacacaacatgaaaaccaattcatttaccaagttaaacaatttcaccagtttgttctaatgttctaactacagaagaaaaattagtgcttcttattagactcacacatgttattgtcattcatttgtaatttgcattgttgacatttcataccaaattaacaaaacattactaaaagatgttttatcttcaacagatagaacaaattatcaatagggaaataaatacctttggaggtttaaatggataatcactgggaaatgtgatgtcgagaaaatatataccgcttcatatggagtccttgaaacataaacacactgtaaacactgtaatcgaaaattaaaacgctcttacaagttgcgaaaggaaaacgaatgaacaaggtaccaaaacccgaagtaagaagcattacatagaactggaaattcaatattcccagtaacaaaatttcaatccataaagattgtaagcaaaaaaatcataaaccaaagcacaaggcaatggtttctcttgtttataaacctgtattcaaaaagttcatacaagataacaacattcccattactaatataatcagatatgatttcaaaacattagattaccaatgctttatgattactttcttttattgcaaattcaacccagttattatcaaatgagagaaaacaagtcaaacaatttgcttcaagcaagcaaaatcaaaaattaatcgcatcattgtgtgaaattcaagaggagataactacggcgctgaatgcaattgtcgaggcagacgatgacttcttcaaattcacaagcaagtgccgaggcaaccaatctaattgggtcgcgagtactgaggggtgagaaacttttttggtggcattagtttcatcatcaccatcaaacttataatttcataaaaaataataaaaaaattacaattttttaggaaattaagtttactatcgttttaattttaatatttttttatttctttttttttcataaacaataataataaaattacaattttttaggaaattaagtttactatcgtttttattttaatatatattttttttgagttaacgttgatgttaaagtgtatcgttaaatttaatagaataaaaaaaaatattctgttaacctaaaaattatcgttaaataagcacttttaatatataaagatatagatatttatatagatttattacgaaagaatttcacatttgagatttttgtttttgaaaaagaatttattatttgagatttacttattaatttgcactaacataaagcataaaaataagaaactcacgaattgatgagcataaaaataagaaattcaccaattgatgtttcttatgaatcttatcaatcatttcccattcatgtattattattattattattttgttcattatacgtggacgttgattttacgtacaaactaataatctgttttcttttttataaaaaaataataacaaaggggactacactaatgaaaaaaaaaaatagaaaaataatatgttcaattaattatagtcttggtagtaggcaaaaagtttctacactcacaaatctcaaaaatttgattaatatattagctgaacataaaaaaggtgcaagaaaaataatcaaacacaataataaaaccactctacaaaattcattccaaattattagtgtataagggtagttaaagtttgttattttttgttactgttgggacaagttgttctatctgttattttggttatgcttttttctctacccttgtactcaaagttcagtataaataaaggccttgtcaatgccaatcaattaatcattgagcattccattcttcgtttcactcacagttccttctctctctcgctcaatcacactctgtttctacaaagactttcatggtatcagagtcatatctttagtaggctttcaattcacacctatcaaagagttagctggccgcaagcgagcaaaatggtactctcagccacaaacaagaataagcgagcaaatagaactcccaactgcaaaaataaaaaaataggcgagcaaatgacagtatttatgataaggtgataaggtaattcaaggttggtgagcaaaaataggcaccattttaaggggggatattagagaatat

SEQ ID NO: 43412 - DNA, 1357 bp, Cannabis sativa
tttttttttttagaataaaaggtgttgatttgttatatatgggtttactattataaatgaggttgggttttcttttccttttttttaaaggttgaattttgaatattcttgtgaggaggagcggttaatttgggacaaataacattttttaattggaattttagaaaaaggaaaaattatcatttcatacatagaaaatagaatatgacaaaacaattgttactaaaaaacctgaatcaatattaaaagaaaatcttcttatttgagaaatatgacacctccttattccttaatatagtggtgaagggactatatttaaggtttgactcaaatatttataggtgtgatttaagatacatgtaaattaaattatgtaaaaaacaaattcattaatcaaagaggactcaacctaaatttagggccatcaaacaaaggtcttaactaatgtaaagaatagctaaaaattgagcaacactattactactttttggacaaaaaataaaagtaacattataaaaattattaacaaacaacatgaatatcactaagatcacgagataagcatttggcaatctaattcaagtgagacgtgagagtatcccaattaaaatcaaagccgaaaactacgaagaatagtaaaagtctcagctgtaatcgtattgttatttattattagagtattattattatatattagtaatctagcatcatttatatttgatgtcttatgattagttagtaatactctataaaagttattatattaaattatatttttttttagtgtagcgtaattaaaatgttaatatttaattatactaaatataaatattatactttagagaatgctaaatattattggtagctttttacatttcttttattattacttatttgaaataaatcatatatattattgctaatgtgacaagttcgcatgaatttaatccatgcaaactcagcatgtttataggagtttttgtgagtaagtgtctatggaggataagccataattttataataaatgcttgtaattaaatttgggataaggtgagagttattatttttattatatattaattaaatataactgtaaaataattttaattgataaatattctttttatatttaaagtactaaatataatctcacataacttattaaaattagagtctctaactcacatactgagtgtaaattaaagagtaataaaaaaaaaaagtaaaaactaaaataagaaatgaaaagtgggtttagagtataattttctattgtattttggagtttttacaccacatactgaaatttttaatttttttatttttaaactgtggggcagaatttttttcaaaaata

SEQ ID NO: 43413 - DNA, 1987 bp, Cannabis sativa
aaatttacaaataatctcaaataaatataacattcacagtaataaaaaagattaaattaaaaaactctttcaaaaagtatactatatttttccaatagttaaaatgaaataatttccttttaattttaactggcaatgagattaatttgaattatataaatagtatttttttatataaataataattatgccacaaataataataataataattttacaataactaaaataaagataataatgtttaaatgggatgaatatgatatgtcatagtctctttctctctgtattgcccactggaattcccaatttccatctaaggaggcagttcaccctaacctctgagctaacatcatcggcttctttctctcagagaagaagctccccttctcccacaacactttcgccggtggctgtaaccaccttcgcgtccttcataaagataaccctttccccctaacttaccaacgttggtaagccctctctcagatctccttctcacgctggttacaagagcttttgaatttgattcgccttctgctaaaatatcatagtttctataaactatatatttattttcatgatttgattactttataaaaggaaagtttgaatcttgtaatttgtaaatgaccaatgatttttgtaatttgttaatgtatccttgatgactggaattgtttgttacaatgcagttctcgtggaacttgtcatcaggaattggaacgcttctgctttctatttttgttttgccgtccaaacaagaaattgggatattcttttcactcttttaattcacttgtccagttttgggattgagctaaaacaatgtctaaacagacctacagagtctgcttctgcttccggcggcggttccgccttgctgcgacggaggccccgaaggatgttaaggacttgttcgaccagtactcggagaacgggttcatgaccgttgatcattttcataggttcttggtcgaaacccagaaagatgagaaaatcacaaaggaagaagctcaaaccataatcgaacagagtattcgtgacttcaaacacctccctatattccatcgcaaggctttcaatctcgaagctttcttcaagtacatcttttctgacaataatcctccaatcgctcccactcttggggtaaatatatctttttttcttcaattttggtttttgttgtgattactaacatgtatggtggtttttgctatctgggtaattgttctttttttttttttgggtttaggtgtaccaagatatgactgctcctttgtctcattacttcatatatactgggcataattcctatttaactgggaatcagctgagtagtgactgtagtgatgtaccaattataaaagctctccagaaaggagtgagagtgattgaattagatatatggccaaattccaacaaagacaatgtggaagttcttcatggaaggtagtgtctttggcgttcatttctgcgtttgtggagactttattttgtgcatttgtcattagattatggtttctgtttttttgcttttaagatttttgggtgttttcttgtttatttcttcgaccgtacaattttgtttgatacctaaagtcaagttcttacttcttagggtcaaattattgggagtgagagtgtgattgaattgtctctagaatggttctttttcttttttctttcccctttacacttgaatttgattttttattgtttgaataaagatcgatgaaaaaacaaaagatgcgagaactaagtagagataatttggtttaatctggtctcttggtcaactgatgcattaccagctaaagtggaaaatgtagctaaatatgttcactgatgtaaattgagtaaaatactatatatgccagaaaaaaaaaactacaaaatttcaaatatcttcttttgtcttattgaattcccacttaaggatgctattcctaattgacctacttttcttaatgtaggacattgacta

SEQ ID NO: 43414 - DNA, 2785 bp, Cannabis sativa
ttagtaagatgacaaataaatatataatattgagtatggagcattttattaaatttttcgaagcttgttactccatttttgttcatatttccatggtttgtccataatctctcagatatgcaagttcgtgcaaattgcaattgcttcagttacatgacatccatcttatgaactgtcaggttgtagccttgagggaggatgggtgtcctagagtttgggttgcaacatctgatcatgatcagcaacacgcagcacatggagcagtatgcagttttttccccttgtttttactgttttaagattacaagtgataaaggatagtactagtgtcacttagttgttatattttgttaacaggttgttagttagggttgttacttgtaactatatatactctgtaataatctgctaatcaatacattctttcaatacatctctctctctctcttgtccattctctatataagctgttacatgatattagaagcttcctttgttcatccatcgatacttcttctgccctcaatggtgcttcttcttgtctcgatcaaactcaaactccaaaataggttcctctcccaaaatcatatcctgtttctttttaatacttgttatccatcaaactcgacgatcacaatgctgctaacataggtcagtacaagactcaactgagaaacaccaaaatgactggatctttaaattattatttgctcaagattaaaggtttgattgatcttcttgccacgaatggtacaagcatctccataagatcacattgaagcaatcttcaatggtcttcagctcgaatatgatgtttttgatacatttatgacaacaagaaaggatgaatacttagctgcagaaatggaggctcaatttgttcgtattgataagaatgctaaattgctggacattagcaatggtgaagctaatctctctcaaaccaaaccctttgccaatagacctccttttccctaaaatggttcccaacatctttttcttggattaagaattggtccaactcgttgccatggctaggccaacagctctttttgtggtcatgcgccatattctcagccaagaaatggtcccaaccatggtcgtggtccctacagtggtccccatctagtattttgcaatggtccatttagttgtggtcaattcaacattttggaccaaaaagttcagtgtcacctttgtcacaaattgggccatactgtcaagcaatacttcaatcgatttgtcaaccttctctgccctgaatcatttcagtcattttttcccattttctaatgttgctgaaatgtaggctatgtatgcatcacttgagactgtttgtgatgaaagctggtatctagattcaggtgctactcaccatctcacaccagattggctccaatcttggctcaaacatttcttacaatgggcaagcacaaatctttgtaggtaatggaacatgtctgaacattgaaaatattggcaacacctccatcctctctccatttacttctcagcatctatcaatcaaaaattttcttcatgttccctcagttacaaagaacttattaagcgtctctcatattgttatgttttctttgaatttcaccctctttcatgttgtgtttaagaccaagatactcaaaggatcttattggttgggaagcttgatgagggcttatacaaatttgactacactcaacttagtcacccatctcattccaagatgtctccaaagttgtcatctttacctgtaaatcaattcataccacaaaagtagtgttacttttgatatgtctgtacctgtgttttccttatggcatagtaggcttggccaccctactgctcgagttgtaaaaatggctttcatcttgtagtataccattttctaataaaacaactcatgatttgtgtcaagcttgttgtcttggcaaacaccacaagttgccttttcctacttttactactgtttacattgctccatcatagcttctgcactctgatctttggggccctgtcatgctaacttttctaatggctatagatactatataaatttcgttgatgccttttttaggcatacctggctttatttactaagaaccaaaattgaagcattactacttttactaagtttaaaaaccagattgaacttcaattaggagtcgaaattaaagccattcaatctgtctggggaggggagcgtagatcttttcctagctttctttagcaatttggtatcatacacgagcttgcttgtcctcacaaaatggagttgtggtaaggaaacacagacatattgcagacgttggtttaaccttactagctcaagcatccttacctttaaaatattgggatgaggcctatagagcagctgactttcttattaacagaatgcctacctatactcttaataatcttgctccactagagttcatgttctaacactaaactagattacaacttgcttaaagtctttggatgcctatgctatccaaaactatgtccctaccatagaaacaagatgcaatatagatccaaaattattgtcccatgcaatatagagtaactgtctttcttattaacaaaatgcctactagtacttttaataatctttctatattagaggtcatgttcaacactaaactagattacaacttgcttaaagtctttgaatgcctatgctatccaaacctatggccctacaatagaaacaagatgcaatatagatttgtcccatgtgctttcttagggtataatatgtctcataagggttacacgcacctct

SEQ ID NO: 43415 - DNA, 2641 bp, Cannabis sativa
attaattttctcattgagtactgatatatgaacatattatatttatatataaatttgagatatatttatgtagtaaaataacttcaacaattaactttatggatctcactaataaaaaatgacttaccaggtgagtgtgaaggtgtgtgaaagtacatatcattttttcagctatacatatatatcacatgctagtcaactgtcagtcaattgtagtcacgtgggaaaagtagcagatatgatcatcttccaccatatatgcatgatcctatccacaaattttttcttttttctcttctataaattctcttcattcccctctctctctctatatatatattatatttaatcacctactagctaggaatgcttttacatttatatttttgttgagtggtcggtaccactgtgctcttaacactcactcaaagagattaaggtacttgttttagtctatgcttctgatcatttgtttctcttcttaattaatagccatgtagatatatttttgtataatagatggattaatatgattatatgttcactacttttcagatcataggaagagtaaatgctttcgtttttgtttaagaaatgggtgagtggattccatgcttttctcaactaatcagtctttctgcagaatattatttcttaggttcgttgtctgttcgaccttgaaaaccctaatttttatatactgatcttgaacaagtaaataattttttttttctttttttgtaaaattcatgtaaatgagaaataacaagcccccattcaaaataaagaacactacatgaattattttgaaagacaattaactttgcgaataatataatttcaacgcattataagcacacaatttcagcaaggatgatgataattaattattagaaaaattaaaattccagtcaaatatattaataatataaacttggaaacattacattaaaaactaatcaatcttaattaatcattaattgatgacacagaacacggcatgttgtaaggatctttattcagtcaagctataatcctcaaattctctctctctctatatatatacaggtatatatttgaatataattgtgttagagagatgacctctaatgatgaattgatatatgaattgtgttaggaggttgatgacattttgttattttcttcttttttaacttgttagtgaacttttcctttatttttgtcatttagatgcattatagagctataattttatgtacgcaaacatttttattttctttctctacatacatagtcgcatgatatctaaactcttcttaaaattgtttatttatcatcaaaatatacagtctaaatgtatatgtcgacgtgctagctagctagtgtaaaagttatttttttttttcagaaaaaaaatacaaatagatataatgcttatttaagtaccactacatgtatattaataacatcttaaataaaataaactatataaatttatattatataatatttaaatgttccttaaatttaacctttaatctattattaattttctaaaatattaaaatttatatatattatctagtataaatatatatcttttattatcaaatgaatgtaaatttgtcgtatatgcatgaaaacattaatatagaaggtagatctttcaaggtcgaccctacaacgaatccacgatttaagcaagagagactaattatttgacagaactttgcatggatttgacacccaaaggttcgcatgatcatatagattccagcatttccgatcaggtgacttctctcccctctttcttttaacaataatgttagaatttgtgaataagataaatgagagtggtaaaaaagtaaaataaaacagtaaataaaatactatgtttacgtgattggaacgttaataaaccttagtctatcacaaagttttaaaattatgaagattttacaactctgtattgtgtttacatgaactatgaaaaattgaaccctttgcatgaaaaggtagtgtcatatttttaggtacatatgtttagtgggtcggaatgatttggatcccattagagttttgtacaataacgttcactgaagggacaaaatatattatatatttttcattataatttgagttatagggccaggtaggcgaggcccaattctagtgagagctacctgccgcacaagatcgtactattgacagtaacaggtgaggcgtgcgccaccgttgggagagaggaatgtcagaatagtagtgtccactaaaaaaggtaatttggtttttgttgtgtgtgtgtccaagacctgacagatctaggggacaagtcgctagatatcatgggattgtgttagagatgtcccacagaggcgacctccgagattgtgaattgtcccaaacactctttcatattatgtttctagatgacccctctctactataaatatggtgttttttgtcagtttgcagctgatatatatttttttagtgtcggtcgttaaactgacgtatataccgtacacgcaaaacactatattatttagagtcaatttcaacagtcagtacaaaaaattagcgatggttgaaagccaatgcaaatagtatgaaagtcaaattttacagcatcggttttgtacttatacacaaaaaaaaa

SEQ ID NO: 43416 - DNA, 4366 bp, Cannabis sativa
  modified_base (372)..(373): a, c, t, g, unknown or other
  modified_base (476)..(478): a, c, t, g, unknown or other
ccatatttttgtattttttttacaattaacgagctaaatactaaaatatatatgtattttataattttatttatttttatatcttttttaaataataattacatataattatataacaaataattatacttattataattttttttttgaaacattatacttattataatttaaataataattattttaattgataaataaatatttattattgatattatcaaattacaagactttttaatctgtcatgttttttagttaatctattcattgtttatattttttgtttcgtgtagtaattaaacttaaacacatattttttttttcattgaagtcatgttcgtagaagaaattacactctatacttttttnntattgtcctcttttatttttatcctcttttttaaagtcttatcaatttttacctcttttttaaacattgtaccaattttgcctctgtcacttcaagatactcnnnatgtgactctcttatgttagagtaaatttgattaattgattaataaccccattttaatagcacaatactaaaaataccaagaaaaagataacatttagaattttgccattaaaaaaaacagcatttttttttgtaaaaataaaataaaaaaaaaaagagttacaattttcaaatattttagtagcaaatttgccttaaatattattttaagaagaaacggattaaatcaatcaaaactactaaatcataatttgagcttagagtgataatcatatgagtcaaacaagaatttcatattaacaacatttctatccaaaaatgggtttctctgctttgattcgaatcgccaaaagattatcttcatcatcatcttcatcttcattgttctcatcctcagcttcttccaatggcctcaacaccatgcgaggtgccgttttttgggaaaccaacaaacccctaacaatggaaaatttccaaatcccaagacccaaagccaacgaaatcctaatcaaaaccaaaggtttgatttttaacccaattcaactttcaatttctcatttattttttttttttaataataatgatctgatttttctgtgttagcttgtggagtttgccactctgatcttcatgttatgaaaggtgaaattccttttcataatccttgtgttgtgggtcatgaaattactggtgagattctccaacatggaccccaaactgattccaagatcattcgaaggttcaatattattatcttcattttcttttctttttttcttcctttgttggcttattaggatatcaaatcatattctctgaacttgcggttaaaaaattccttggaattattgacattgttgtaataaaggatttctgtccaatttaagtttggaggctcgatttaatatatggaaattgtcaagttaagtggttgttagaaatattggactgaatttgaatttaataattttctctgaattattgacattgttggattcaagagctttggttcaatctaagttcggggcttgatatagtatatggaccatcaccaagttaagcggttgttagtaaaatttaagttcgggggctcgatttattacatgaataattctcaagttaagcattcgttagtaaagttggttggaccgaagttgttgaatctaacaatttcaataatttataaagaattattaacgatctgaaaagtttgggagaaaaaaattctaattagcttttttttttcttctaattgttcttgtttctgtggattgatgtgatggtgtatggattagttatcaattgaatatttttattttttgtttagatttccaattggatctcgtgttgttggagcatttatcatgccttgtggtaattgtcattactgttctaaggtgataatactactaactaattaattaagttcaagattctacatttctactactgcttttgattcgtaatcattgattgttcttcattgaaaatgataataataattaggggcatgatgatttatgtgaagatttctttgcttacaaccgtgcaaaaggaactctttatgatggtgagactaggctgttccttcaagactctggtaagtgtataaactctgcccattcattttatatggaatattacactaaacatattgattggtacaatttaatatcgagttaatatcgagaattatggtcttggacactttaaagattctgaaacacccacttgggtagaattcatttctgaaagctagctaagagaatagggtgcccaaatagttatatactaccaaccaatctcatatatggacttaatcccctttcgcgacgtcggttccacttgagagtgcattgatttgataccactagatacagttacttgggtagaactcactcccgaaagcttgcctaataaagtagggtgccaaagtagttatatactatcaactactcctatacttggttaatgtggaatcctatagcatcgtatcatgtagcaactctcgttcgtattgtcttgaactacagaaataatgcataatatcttatatttgcatacttgttgtctatggtgaaaatgtaggacggccggtgttcatgtacagtatgggaggccttgccgagatgtgtgttgtgccagcccatggattgactatcttacccgaatcattgccctataccgagtctgcaattttagggtgtgctgtgtttactgcttatggcgccatggctcacgctgctgaagtgcgtcctggggattctgttgctgttattggaatggggggtgttggctcaaggtaagtgaaataaacaacaacaaaggaatgcatccaatcctatctgagatgattaactagatcgaacaatacagttgtttgcagatagcaagagcatttggtgcgtctgatataatagccgttgatgttcaagacgaaaagctgcaaaaggcaaaaactttcggtgcaactcatacggtaaatgcaatgaaagaagatgctgttgacaagataagagtaagtatttcgaactctatatgtttgtttgcatagttgagcaatgagcatttttctcggttaatgttatttgatgtcgagtacaggaaatcaccggaggaaagggtgtggacattgccgtggaagcgctgggaaaacctcagacgtttttgcagtgtttcaaaagtgtgaaagacggagggaaggcagtaatgattggattagcacaagccggtgctttcggggaagttgatataaatcatctcgttcgaagaaaggtgagtatgttcaagaatttagtattagtacatacattattatagattataactaactatttgatcgggagcagataaaagtgattggatcatacggagggagggcgagggaggatcttccgaaactggtgagattagcagagacgggagtgttcaatctgaaagatgctgtttcgaaagtgtataaattcgaggatgttgggaaggcctatgaagaattgaacaagggtgccattgttgggagagctgtgattgagattatgtaaaatgtaaactaaattatctaacttttctctactaaggctgtctttgttttataacacactaacactgtttggtgtggtgtgattagggaaatgaataaagatgacagcattgcttactttgctcactttcattgtggagtctctcatggcttatatagaaaattctatgctttaattatgtgtcaaaaagggctatagaatatagattggcaccatctatctctatattcgattgtgcacaaaaagaaaagaaaaaatatacataataaccacaatttaagaatttctgtctacaagttatgtttcaaattgtatttgtgtacaaaatattaagtatagacatgcaatatggaacgaatgaagcatttgaggctgcattaatttgagatacttaagagaaagacttgttttatttacaaatttcatcttaacaagtgtagacttgaaaaagaccaaatttatttttttttttctaaataaaggatgaaaaatattttattttctctatagtccactaaattttctgatgactttaatattatctcactaattttcattattgttgtaaataaactactttgatttatactaggggtggcaatttaagttatgactcacggagttgacatgaaaaagacacgaaaattatgcaggtcgtgttcgtattttatatatttttgtgtcatacatgtcatgctcatgtcaactatttaaaataaatttaagaactacactcgacacgaggatactaaaattaacaatttagcttacaacctaccaacacaacatgaacacaacacaaaattttgcaagttcgacacgacacgaaatttattcgagtcgtgtt

SEQ ID NO: 43417 - DNA, 5462 bp, Cannabis sativa
gaacaatgagagataaacttctttctagtgatttgtgggctgcttgtattgaaaggtaatccttttattttatttgattttcattaaagatttttatcgtgaacattcatttctttatgtgtaattctgaatgtctattctatatactgtctgtcaattttggctcttctttacctagttgtgtcattgattcattgctgtagtttatggaaagaagcgaatggtagctactggtgtcgagtacgttggtatataatccctgaagagaccgcttctggaagacaacctcataatctgaggagagagctttatcgcacgaacgatttggctgatattgaggtgaaaataaattcttgatccctatgctgataacaaaacaatagttgctgctgcctagtaaagtatttaagacagttctgatattttaatggtgcttcagagtgtctccttttgaaatattggacttgcatcctatagacagatgtgtctatgttcagacttttggtacattatatatattttgtataatatttagatatgaatgcatgctacagttcacattgtttattgagtttgcactctttttctgggcatttagatattgttgacgtttaaaacttcttcaacagccaagctatttatacttttaaataggtcaaaacttgaaacatagtataggtacaaataatgcaattccgtgcaccaatttgttttgcatgatgctcctacattgaaatcaggtattgtgttgaaaaagagggaggtgtctcactcctaaattcatgatttgctactgtaaatgcgcagatggaatgtgtgcttcgacattgttctgtcaagaaccctaaagaatatgtgaaggcctgtgatgaaggggatgacgtgtatctatgtgaatatgaatatgacatacgctggcacagtttcaagcggcttgctgaaattgatgacagtgaagaggtaagcacttcagaaattagaagcaggatttaggttataaaattttgaataaggatcatcaatcagttaaagaactttataggttcttattctcatatgctaggatgaagagtcagaaagtgatgaagattggaaagtttgcaaggatgtagactctaacacagatgatgacatgtactatgaagaagagaacgttcaaaatataccagaaaaatcatattcagctcatgtgaaggctgctgtacgtacattatctttcataacaatttttggctttagcttgcttgaatgctttccaaatgaatcaagtccattctttttttctttttttttataaatgtagaactctcgaaaggggcagttctttggacttgaaaagatagggatgaagaaaatcccagaacatgtaagatgtcataaacagactgaccttgaaagagcgaaggcagcacttcttttggcatcaatgccaaagtctcttccttgcaggaataagtatgttgaaattcgatgtgtgtgtgcgtgtgcattttactatgctgcacttactaaagatcacattcttttacatagggaaatggaggagatatcttcctttattaaaggtgccatatgtgatgatcaatgtctgggtcgttgcctctacattcatggtgttcctggaactggcaaggtaaattatttctttaattaatggtgtagagaccaatttaggagggctatagattctgttccagatcctattttttgttgtttgatatttctttgtgaaactgcagacaatgagtgtattggcagtactgcggagtctaagatctgaagtagatgcaggaagcataaaaccttattgctttgtggagattaacggtctaaaattggcatcaccagaaaatatttatagggtgagatatacatactttagctgcgagtttctttgttcaaaagctgtatttcccttgttaaaacgagttatatccccacaggttatatatgaagcattaaccgggcacagggttggttggaaaaaggctctccaattgctaaatgaacgattttcagaagggaaaaggtttggcaaagaggatgaccgaccttgtattcttctgattgatgaacttgatcttcttgtcaccaggaatcagtcggtaattcttttcttttcttcttgccctttgctgagcttagctggtaaccaagtagctcttctagtgatttttttgtactgacttctttagcatatggatattcgctgggagaaaaatgtgaagacctgatgtccgaaagtcttaactttattatatttttgcaggttctttacaacattctagactggcccactaaagcacattccaaattgattgtgataggtatacaattatcttgcgtcttgtctttgtataatctataattggttatttatttgtcctcacctgctctcatgtgacaataaatataggcatagcaaatacaatggatcttccagaaaagttgcttcctcgtatttcaagccgtatgggaattcaaaggctttgttttggtccatataactatcagcaacttcaagaaattattttgagtcgcctgaaaggaattgaggcatttgaaaaacaagctattgaatttgcttcaaggaaggtcagttgttgcgtcctatttatttcatcatattttgttttttttccaaactttttctaaatgtaaatgggaccaagtgctgatcttacgtattgttaatatgtatccaggtagctgctgtttcaggagatgctcgtcgcgctttagaaatttgcaggcgtgcagcagaactcacagattaccatttaaagaaactaagcacaaaccccattaatatttctgaaggtacttattttatgaagtcattatgtgctacatttgtttcacaaatcagtagagataggggatataatgactccatatcattgattagtttcttatgctcagaacgctatttttcatttgcatgcacctggagaaagcttgtgtcttcgttggagtttatcctttctttcactaacactaatctctgaaattcgtatctttccaacagaagctgcatctttttttcctttccattcaatccaagctaatgacttcagtttgttcagctagtggctaaaagttcttttatttatttattttaattatatatcgattttctaggaaaatcacttgttggcatgagagaagttgaagcagccattcaagagatgtttcaggcacctcatattcaagtgagttatattttaactgaataattgatgacaattgatctttggttgaaacttgattcggttaaataataaatgattacacatagaaagtatgttaaaattcttgtatgaggctatcttttgtatctttgttgtagttaagtatcataaagtgcttttatctttgttgtggttaagtatcaagtgctgagcactggaaattgctaattatgtgcacaaacatgattaaatataaatactcggactgctgttcctttatttgaggggagggtttaatgtttgttggtttatattcgtatcaccgagatgttgatgttgttgacatggttcttgtttggcttctgcaggtgatgaaaagttgttccaaattgagtaaaattttcttgactgctatggtgtatgaactttataaaacaggaatgggtgaaaccacctttgaaaaggtcaacatctaatgctttccccttaatatcctggtctcacttcttgctttattaacatgagacatccattgatactttcactcctgtttttagtaaacgcttcttatattactgaagtactgaagttcacaattgagtttatgactttgcagctggcaatggctgtctcgtgtctgtgtacaagcaatggagaagcattccctggacatgacatactcttgagagtcgggtaagcatgtttcacagttatatattcacatcataaagtttgaaactacttaatgatcagaagaccattttatcttcttccaacattgttaaaagtcatattttcttacaatggagaatgtcaatttgctcttcttgaaatagattttgtaaattatatttaaaggcaaatttcatgttaatgtcgttggtaggtgcaagcttggtgaatggaggattgttttatgcgagtctggtactaagcacaagttgcaaaaattgcagctcaactttccaaggtttgtttttacctcttactacactaatgatcactttcctggtttgcatatataaattttgttatttattaactgcctgcacagtattatattgtattatatgacatttttatatgtttgatgctgacttgtatttacatagatatacaatattttaatatttaatacaaatcaataataataaatatcatataaaaatatagtatagaacacaatttaagtatagtatacaattgatataaaaatgcatgtcaaacgtttccaatgagctaaacgtttacattttagaagaattagtagtatatattattaataataattttaaggttcaaggtgataatatctatttgttcgaaagaaaaaaaaaacgataataatatctatatttgtctacttttatggcaacaactactctaatgattttttatctgtcaagaattagaaaactttggctgtattttggtccgattccaaatctgttttttcattattgcagtgatgatgtagcatttgcactcaaggacagtaaggagctaccttggctggctaagtatctttgattcaaatggaaaagaaaaaatctttagattagtagacaaatcaaattactttctcacttggagcaacaattttggagttattatcgttatcagttttaattttactgttgttgttgttgttgttaaacctatgtattttccatacatataaaacactgacattcttaaattttgctattttttttatttatttgaagatacagtcagacaactgttaaagcattataattttatgatcattaagaaatgaatagaaattcagaagaaaaaagcgttaagttagcattttgggttcaaaggggcatttaggtttgttatgtagactttaatttgattttcattatttgaggatcacacaggtgcctttgactttagagctggctgtgatggcatatttttccagaattaatgaaatattttgtttgttataagtgtaacctaaaatgtataaatatattatattatttgtgtattaagatgtaagaggttctatattaaaatttaggctaattaggatttttatctcttgaactttgacatgtactgtataatattctctgaacttttaaggtcattaaaaatactctttaaactattgagattgttagatttaacgacttttgtttaattttagtaaaaaaagtctaacatggatgaaagtgtataatttgtcaaagttcgaggaatataatttggtagatatcaaagtctgtggagcatgatttagtgcataaataatca

SEQ ID NO: 43418 - DNA, 1735 bp, Cannabis sativa
  modified_base (270)..(270): a, c, t, g, unknown or other
  modified_base (299)..(299): a, c, t, g, unknown or other
atttaaaaatattaaaattcagcatactttcgaatcttataaataatatattaataattatatatttaaattaatttaaaattaattaatttaaaataaatagtattaatatttatatattaaatcaatcaatttacaaaatatttttatatctttaaaatattatattaaactaataaaaattattaaatatacacattttgtatataaagatatttaaacattaattcttttaacaaaagttcaaaacataatttagttttttttttnaaaacataatttagttttttttttttttntttttttttgagaaaattattaagtgttttataaattctaaaaattcttattggaagatcaaaatctttggtataatctccatcaataacttctagtacctcagcttttgtattcatatatttttcttaattcatttaccaaaagttctatagaaacataatttagcttttctttaaaaaaatatatattattaagtgttttataaatcctaaaaattcttagaaaaataattgggtttgtgttactgttatcttatgattgatagcatatatgtaccgatttccatcccaaaatacaaaacctaagaaatgaccacacaatttgtaacaaataaatcagaagaaccattcaatttatgtatagataaaataaaaaagcaaaggacaacaacaatgctactcacatcaataaataccaaactaataaataacagaaatctccaaactgaagatatgaatagtaataatgcaataatgatcaccggtttattcactctctcatcgtaagtctgatcaaatataagtaatcctatgtatagatttgaattctcattctctaataaagtaacactgacacaaacaatagcaacagagaagacattcctgtccatactgctctctctgctccattgccatcacctcctggaactcctgtaaagattgattcaaaaacaaatgttcaatttcatgagccaatgtgagatttgaagactaatcttttgaaaaacaatgaagactaatcctttgtttgactgttttgaaatggaacagcaagtgattatatacaagtttttatatacattgttttctaaaactatattagccacataacaatacaacattcaaggaccaaaaagtgtgagcaaagcaaaccacatggctataagtcactgtttacacatgaaaagaccaaacagcatttgagtttgtgtgaattggtacaagggtaaatggttttgggtcaaataaaaacgaaacgaccttcaagtgggaacaagttcacaaaacacgacttttccaagtgagattttttccaaatgcttatcttttgaaaattcctctctcacacatttgatttttatttattcaaagggaagcacaacaagataacatctatattatatatttgaaaatttgtggcaccaactgcttaggtgtttgttcgttttgcagggtaatgaataaaaaaacaagcttaaaacatatattgccccccaacatacacaacagaatagtaaaattgacaataatttaaacataattattccataatgttaatctaagtattgatcaaataagctgaccattgattaagtcctagaaagttatacgagcatacattaaaataagtaattaaataaaggacacaaaaaataaatgctatggtgggtgggagttgggttaggtcaattataacagctaacctgctctaagag

SEQ ID NO: 43419 - DNA, 2912 bp, Cannabis sativa
gataatatagtaatttaagcaaagtaaatttatttctaaaaataattattaattggttagaatcatcataattaagaaaataaatatagtttttttttctaaataaaaattttgttggtcacctactatactactatagcaggtcaccaaattgtcacttcattaatttttttattatccatgaataaatattactcattgacaaatcatccatatatatatatatatttatgaaagcagcatgaatagacaaagaaaattaattaagattagatttgagaagacataatttcaagaaaataaaagatcggattggatttttctttttgttttgtttttaatttgaggctcacgtgaatgttggtttggtccgcaaacattcaagatgactaatattgttggtcatttgtaagaggcagtttttccttggttttagaattagtcgcaactcacaagtcctattacatatataatatacaccaaatcctataattgagtaccataaaataataataattaagggataacaaaattctcaaattatacaaaagttaattaggatttttgtcctctaaattttgatatgtatttaatcatacttttaaatttttctaatcgttaatttttttttttgaactattgaaattgctagatttaaggatttttgtccaattttattcgattttactaattcgatgattgtttatgtataaaatcatgctcctacactttgatatttaataaatcatgtccctcaaatttttagcctcctgaattttcatttatattatacttttttttgttataattggacaaaaatctttaaatctaacaatctcaatagttcaaaaaaaatatttaacggacttaaatgttcttgtagaaaattttgtaaatggaaactatttttcaaagtgattatatttagttaaaagtattggaaaaggtttgttattttgtaaactttatctgttttggtatttagaaaattttagtctaatttttttataattgcgtacgttgtagttatttagaatcacttataaatttttaaaaaattctaaataatttataatgcaaaagtaagatttaaattgatattttattataggtataagaaaaaagtagttgcgcgtataaaaaaatatgaatattattttcgacactataagttattcaaattttcttaaaaaatttacaaatcaccctaaataattataatatatagaatcataagaaaaaaaaaataaaccaaaaaattcctttgaatgtcgatagaaagtctaaatacctatttaaagtgtacaatgtagacaagtattttacttttagtaatcgttatgtataccatagtggaagtcaataatttgtggtgtaaatacttaagtttaactagtggttccaaataaatatttaagtttaattctgaggagtaataatacctaaattataacttttaaacttctgtaggtacctaacggttaagtgttaattaaattgtcatgtggggaatcctgatttggtccaggttattattttttttattttttttaaaaaatttaatttaaatatatcaataaaaaaatgatacatggataataacttgacactaaactaccaaatacctacatagtttcaaaaatataacttaagtattaataatgcaaaaaattaaacttaattatttatttataatcaaaaattaagcttaaatatttttaccacaaattactcaatattttattacaatccttaagctaagtagtaattaatatcacactgttaaagggcaatcaaccgccaccattggttttactcttgggttcttgtattttttttttttttaagataaaactttgttattataaattaaagatagtcatttacaataacagagtaaatagtaggaggaaaattctcccacaaaaaacaagcctcatccaaccctaaggcaaactttgccaaactatctgcaactgaattagcatcacgtttaacatgtgttacagatatattagggaaaaaagaaatgaggcaagaaacatcactaattaaatcatgaaaagctgaaatgcccactgttcttaacttgtagctgttgttgaagtgcccagttgaggccgtgaaacatggctttggcttccatctcgtgtgaggcaaagtgaccaacaagaggcattgaaaaagctgcaataacatatttcaaagagtctcggataaccgcacctaccccaaatttggagctattcttatcaagagcatcatcaatatttagtttaaaagaacctgtaggaggtggctgccaaggagtgcggtcaggggctgatgaagacgactgctgtgaaattattgcagtaggccggtatttgtgttgagcagctcgataatgatccagatattgcagagagaaggcagcaagagatgttgcagattttgcctttttgctgtgaactacctggtttctttcagcccatatgcaccacatattgcatataatttgctccagttcaggtttagtgtggatggaggataaatgcttcaaataatcacctttatacattgaaattgccttatgccagtcaaaagtgtgttgtgaagaacaccatacagctttagcatagggacagccgaaaaatatatgcccaatggattcccacgcctgtctacaaactgagcaagtggcatctgtgatgattttccgtttgacaagggaagttgccacagggagggcatcatgaatgactcgccaagcaaaaatcttgatcttctttggcagctgtaacgaccaaaacgatttccaccaagccgaatctgaagtggagctagaggaatgagattgttcagctagagaagtagccaaatggtagcctgattgcactatataggaaccgttgttgctgtgttgccaaatc

SEQ ID NO: 43420 - DNA, 4122 bp, Cannabis sativa
  modified_base (1299)..(1315): a, c, t, g, unknown or other
  modified_base (3867)..(3872): a, c, t, g, unknown or other
ttttattgcatatattattgatatgattacagtttattttccgcatttcatatcatttgtatatgctatattacatacactatatatatagtctaacacatgggtcatccattgtttggtttgatgaattgaataatggaataacaataatttcaacgtgataacaatattctattattcaatggaaacaagtcatatccaccattggaaaactattttcattgttaaaataattaaacgtaaaataataatattccaatctcatgttttttactcttctatttacttttaaagtgtagggtctataattttttttgtcaatagtattattatttcattctatatatctacaaaatacttttttttccctcagtatttaattccaaagcaaacaaataaaatccttttattattattcatattctaattgacttaattattgactcattatttcttaacacacctgcaaactgtggcctcaaattcaaacccctttacctccaaaacattaatatcatttttaagaatatttttatatgtatatgtatttttgcaagaatttttgtgcactttaattcttaccaatatgaaaaataaattattgtatttttattaataatttttaggtacaaaagtgtaaaagttttacatttctatggaatttttttaaaaaaatacggagtgttatttgttttttctgcataaaaccgttgttttcacattgatgttatgagaaaataacataatttttttacattgttatttttctgttgtttcaaaataatattattttaacatagatgctatagaaaagtaacacaaaaaaaatattttactctgaaaaaaaaaaaataagtgaaaatttattaaaaaaatccattcttagttgaaaatacatttatttgtttttatgtgaaattttaaaaaataaagctataagttgtcatcaaattcttctcaagttataaaaaaatgttatttataactgaaagtgccaaattatgtgctctaattttttcaataatatagtggcgaaatttttttatagggtaaatattattttagactatgtgttttgcaaaaattatcaattagattatttgttttgtcaaatgataaaattgaccttatattttcaaaaatggtaaacatagaatcctgagcttaattttcaacaattttagtttttaatataaccaactttaacacaatttttaagacggacagatacagaaaatataaccaattttatcataacataattagattagattgttattaagttttattttgacaaannnnnnnnnnnnnnnnntatttgtacaattttgaaaaatatagagtctattttatcatttaacaaaatagataatctaattggtaacttttacaaaacacaagtctaaaatgatatttaccttttttttatagttatttatttattaatgacgtttaaaaaaaaaaatattttactaatgatagttttgtatttaattttgagaaaaatatgtgtgaaaagaaagtatttaggttttaagtttgtaagtgttataaactcaatataaactctgttattgtcttaaacagacacagataagatctaaaatttagatcattgaatttaaagagaagcgtgtagtattaattattttcaaatattcttttaataaatccaaaacagaatttgtcccgatgaaatgagaagaaaattacaattttataaacattaagtatttgtacttctaaaaataaacatttagtttatgttatttatccaaattttaaaaatttatgtggactttaattggaaaaagataggataaagagaaaacagagacaagtgtctttaattttatttctactgttttcagtaaacgaaaaccttttgtgagctccctccataattgatgatatatttgggttagaacttagtagcggctgatgctattaaatatctttgaaaaattaaattaaaaatatatattattgctgaattggttttttttatatatatatatataattatttttgaattggtttggggaagagaatagaaaatgtgtattctctcaactcaagttatttgattttgaatggggacagagacaggcacaagagctgtctatttagtccttcataacagatgaaaatgggtttagtagactcattaaatcctaagttaatgcaaagcttatcttcaacaaatatattaactatcttatttttgtttttttttttaattttatcgagtacatgttatttattaccttaaggattttccacgtgagattacagcctcaaccattcctaaagagggaagaattacaagcctgccatacgcccatgagtgctgcaataatgtcataaataaagggtgctgccaacctatggaccactggttcaaacgttattattgcgtggatagtaatgagttacacatatgtatatcagatctgattatatcgtgtgggctaagctaatgtaattttggctttttaaagcatcatcattatatcactaagttttagttccataataaacaaagtaaagcagcagatcaaatcatggcttaggttagaccgttagagaccacttcatattccaaataaagcttggataaacaaaacaaaattgttagccacagaattacaggaatttaatacacccaattcagatgttgttttgttaacccaaatctctttagaccatataattccaagggaaacaacttttgaacctcggatatatggtatatctacaaatgtatacaaacacaccccctactatttctatcaatcaatctaaacaaacttctaatatccttaaattgattttccacctttgtttttgtttctttttttctacttagactttcggactgacttagatttcctcattttcgtagatttatcatcaacacttgtccatgtatatccactaggaatagcaaaagggtcagtatctagtgccattgtagcagaccgttgctgcttggtggctgaactcgactggctgctgttccgcctcagccacgacgaggccgaggacgagggtaacgatgaattgtgactccttgacttttgttcttcctccgattggcttaggccattaccatagacgaagtgtctgggacttgaaagtggtgtgaagaattgctccactggttgaagctcaacaaactttgtaaatgttattacaactctcactgtagggaccactggtattgccacctgtacaaccaccaccgcacacagaaacatcaaacatcaattaataattgagctaatctaatcaaactcaacagtcaacaatataaaaaataacaatatatatatattgttcttggtcatggaagttagccgttaattagcggtttatggacccaccaaacacgtaagaccaaccaaaacatgccacgcaatcaaagtgtttggaggtcaaacaaatctcaaattttgtttggtgggattagattattatggggtggggactctagtcgggatttgggaatcaacaggaacaatacttgggtcccatccccccatgtaacatgccccatcctaagtggaagagaatgtataattgggtcccatttctataacaccgttggatcataatttggacccattaagatccttccacgtcaaatcatcgacaactatggaccccacaaaaagcttcttcgctaatcagaccagaggaaactttcacagttctcattagtctgaaaaacacaatgtcgttcgttgcttctttgcatcaaaagaaccaaaagagaaaagagaagaataacaaagaacctacacaaacgaagactcatgtgggccccttttctccagcactgttattttttattttatttatttnnnnnnttttaaaaaaaaaaagaaaagaagttgagcattaccttgactggaaatgtccccggcgggaacttggtggtgagcaactccctcattctccttacggctttaactttgttagccaagatgtctaacaatggcagaagctcctctgttttcaggggaaactgctctgtcaaccacaccgacggcctaaggctccttacgtactccttctccttcgtctgaggcggcaacgccaccggcggcggagccatag

SEQ ID NO: 43421 - DNA, 2719 bp, Cannabis sativa
  modified_base (2683)..(2691): a, c, t, g, unknown or other
atactattaattttaaatatgttttttaattttcttccccaacgatcgaaataagcctatagtgtgtatactcaaatattaaattgcggcttcttaattattaactttattcccccagctactataatatatatattttcatatttatatatcttgttatgattatagttggcttaaaatgtgttagacccaatatatataattgtattaataacttttttttgtggtacttaatagaactttaaggtgccccttatatatatagcatatatattgcttaaattaattgaagtattatttttgatataaaaaacaacataaaacaatgtatataaggatgtattgtatccaataattaataagaacaatagggaccattttattatttagggatccctattatttaatgatgaaatggacaatcacatcaatatattgatttatatatctttccccttctttttcgtttcactttcaacttattattattattaatgttgagcagaaaaaatagagcattcgaacttatatatgtgtgtatttaatttatatgaattggttaaaaaaggtgtgtgcaataaattacatgcaccaaatatattaaatatgtcatgaaacacgagtcattatattccttaattaatattataaattagggctcttctctctaatagttcattgaaacccctggttcattttagtatcatatattcatactcctccaaattccaatgcttaatttaatttgggcctcatttaatttctggtaatttcaactccccactccaaatcataaattatgggcccggcccatcaacgtattattattattatcataaatcataatcatactcctctaaataaatgtctatctatttcctttatgatattagagctaatgatcatgctatagttctctccaagataatccttatgggcctaacaaattttattgtcacttttgtacatacaaaataataatatagataattaaaggtgaaaacaaaaagataaaaagaagacacaaaatcaattgtgaatagttaatatctaccctggaaggaattttaaaattctttttaatttagaattcattaaacgtattcattgtcaaaaatttgatagggattttcaaaattaattcttagcaatttagagatgtataaatatataaatgtgtgtatatattcattacaaaaattctttggataaataaatcgttttgagtgttataaatagaaatttaaaatataaatgcatgctctaaaattctaattaatattaaacgtttgagtgttacaacttttctttttaaaaaataataataattaagagcacaagcattttttccaaatataaattttcattgttctgtctttcaccctttttattccaattaatcataaattcgtcaaatttaattttggccagtaaatgaaattctcatatttttgtttttaacatgtcgtaaatttatagatgagtttattgattggccttactctctttatcttattaaagatgagtattgctattagacatcttacagtaagttactgatggtccataaaagttcacttttaaaaaaagaattagatttctctgactattttaaataatggggtaaaatattctcgttaatctctaagaccgacgtctatttccaccatcgcaaaattagatagaataggcatcagtagaaaacgttaaaatttttccctaaggttgaaaaatcgtcaccaatattgtgcatcaataccaacaaattgtagtatcagccacggtggaaaaggctatactcttattgtcgataattttgcacagttggctatatcatttcgtagcttttttttctaatttttaattttagcaaaataaataatatatatcaacattatataatttgcaccccaaaaattacaaacttgttttaattttcaaatctttacaatgtgaacaattaaaacaatatacaatacaaatataaaaatctcaaatctatatacacaatagataaaaacataacaataaaataataatggtccttcgtcttcttcggcgaacacttgagatgggagtttcatttggctttaagagccctggagagccaagattcagctgcagctctgccgaaaccacaatctcgagatcttcgatgatctgtaaaatacaaaaatctcaaaaatacataaatcccaaaataaaaataataatgaacaagttattgagattaattatgtcaacccaagatatgtttccgagagggagtgaattggaaatttaaactaatttcaataaattaaaaatttttaacacaaaactatataattaatctcgtaattaaataaaagtaaataatatggcaagtaatatagtactgtatagcaaataatcaaatttataaagtaaagaatttaaggataagaaattgctaactctcgatttttacaaggttcggtaaaactaagccacgtacctacgtccttgatctacaaagttatggacctagctttgagttccactatcgagccaagttaactggcttgactaactcttacaactgagaatttttcaccaaggtgtttccaaacctcttacaatagttttacactctcaaggactatcaatcacttttttggattgttgtagtgatcatagcacatagcacttatccaaggtgcannnnnnnnntgttgtagattgtcatatcagttaaacc

SEQ ID NO: 43422 - DNA, 1428 bp, Cannabis sativa
ttcttatctttacaaaatcttttttgtctttcttcttcacaatcaccttttctacattactttgcaaaaatatcattttgcaaaatcacattattagaaaaacaccaattttcatgcaaaatactaataatttttttcacatgcagagtgagttgcaagaagaagggaggagtaagattcaccataaatggacactcttacttcaatcttgtgctcgtaacaaacgttggcggcgcaggggacgcagtggcggtctcaatcaaaggctcgaaaaccggtggatggcaagccatgtcaagaaactggggtcagaactggcaaagcaactcattccttgatggacaatcactctcttttaaaatcaccactagtgatggaagaactcttgtctctaacaacgttgctcctcccaattggagctttggccaaacctactcaggagctcaattttaatcaaaaggcttcttctttgttttttgttacgtaacataagattattattaattagtatagatatataagagaggaaataatgatgatgggaagtttttttttcttctttcttcatcatcattgtcatcacaagcctcttcttcttatcaattcaaagggtcttggattttagaagaggctttaagaatgaaattatgtataattaatgtgtttgagctttgagactagttgtgaggttaatctctattagtattggtccaagcttttgctttagagaattactctttttgttttgtttgttatattttgattgattgattgttgttgttgctgttgtaagtgtttttgtgtgtgtgacaatatgagttgtttgtgttgttagtttactttatgttattgacaagtgttgttgtaatgaaaaatcatttgagactaacttttgttattatatccatattgcaaacaaaattaaacattaattcccattattatgtcattctgattttttttacacatttctagtgacccaattgaaaatagaaattacttttatgatctaaatgtaaaaaaggttataattacagtgctgaatttgaaatcagataatcaaatccaaatagttgaattattattgatagcaaaaaacaagtgcactatgtaagaactttaacctgtccaaatagcattattcatactgaaattcttaaccaaatcagatattatgtttctgcgttatgggttcaaccacaaaatttaccattttagctgtgaaatggtaaattttgtagtttaccatttttaactaaccacttgtgataacaattgaaaaatattaactaaaaaaaaagttatatgttgagtaaagtaaataaaatcagccacaaaatttaccatgttatatgatagctttttaaccacttgtgacagttaataataatacaggaaaaaaatagaaaaatttaatgttgagagtgg

SEQ ID NO: 43423 - DNA, 1165 bp, Cannabis sativa
  modified_base (63)..(69): a, c, t, g, unknown or other
actacattgaatgttattaattttaaaattatgatattaaaaaaactaaaaattaaaataaannnnnnntacgtgacttggcacgtaacatctgtctagtatacatatatatatttacaccatatattaactttttcttttaaatttacatttatactttgacatgagaataacactttgttaacaaacttccctgaaaaaaatttaatagagaagcattagtaaaaagtgcttaataaaattaatttagagatttagtgagaatgcttactcaaaaagtttgatgacaaagagaataagctaagaagattggatcttggctagcttctacaacccacttgtctgcattgagttgggagtaagtatcagttgtttgctccaacagatcagctacaaatggagccaagtcactgccaaccctgggtcgaagcctctctaaagccactgggcggtcgacaactagaagactagacatggtgtttgagcctttatctgacaactcctctttacatcgagaagcaagcacgttagccctctgtcagattttagcagtttctgcgttgaaccgcttccgaaagatctgagcagtttcctcgagttggatgcaatccacttccgtctgctcgatcggccatactgggaaggacagactggttggaggaagagttgtggggaaagccatccccttagatgacggcggagcattggactcgaagttagacctagagtcccaagacttaggatcaatgatttctttattgttctgggaactcctcctattccttccaatgttacctagctctacctttttctttttagcttccctcatcttggtatcattccttatggcctcctccctttcagccttctgatgctgattcaaatcttggacgacctctaccttggcttttttcccttccctataaatattggaaacatgatttttttggcgaagaccattccttcaccctcttcatcatcatcttcaacgatggggataaattatgtccccaaaagtggaacctgctataatggcaccacctaaagagcgagagatgcagaggcttcttggacactaacttctaaaacagtctttgacacctttgctgtgggagatgtttctttggtccgtagctaggaagatatgttgggaattattttacca

SEQ ID NO: 43424 - DNA, 1491 bp, Cannabis sativa
aatgagcctatgaatatcaataatcaaatctttaacaagacaattgaaaccatcaaagagatttttgagagaacttgccattctaattcttgctcatagttattgcctgcgattgttctcttagcatggctgttggttggtagttggagatgaatctcagcctctggtctaggtggatccaagaatcatgcaagggctcttccattgttggggtttgggttcttttttagattttgctataaattttgtccttgtggatttggtgtattcactatgaattatcgttacttcaatgtgttgtgtatctaattaggagattaaatctgttttacccgagttagttaaccaatagtgaaaaagaattataatatattgtaattgatatgagtggtttgattccattttatataattgatgaaattatattttccttacaaaatgaataaatgaagttatattactactttgagcaatattagatgccctatgatttacctttaacaattctcaacttacttataagaacttattcagccaaactatgctctaaagtgtcttttttggacatccaatattgagtgggtatcagatgccctaccagaagataatttgcaaaaactgacagaaaaattgatggtgggaaagaaaagtagaaactttctgagttgatgcaagttgatacaaggatagcatagttaaaaaaagggtgcctctgatttaatcaccccttattacaacaactaattactaatccaaattaaccaatcgactaatacaagtattgttctagaacttaggaccattacagtttatggaagttagcagtatactaaaaatatcttgtgtcaagtttgaaggacaaggttttgtgtgcaacttgcttccaagtttcaaggacgcactttcaatgactgaaacttagtgatcaagttcaagatcaagacaaaggaaaaaaaaaaccttagataacttcaaaaaataacgtataaacatataagtcaaataaaaaagacaaaaaaatctcatcttgagagtccccacattataatggtgcttctaaatataataataataataactcatccactgcattgggtgactaagaacactgagtatgaagaaaatggaaacagggcagccaacagctcaaagaaacattgctaaaatgagcaaagtggatagcaatgtaactaaaattcatcaaagtaaaagttatgcattgaaggtgctaaacgatagcataaacacctttaagttgtattttaaaggattagaatctcattctatttcaaagttttttctttaagaattcttgtggtttgattggaaagaagaaaacataggaataggaatagtaatgagaatgtaaatagaaatggaattaacattattaaattttttcttatattataccgtctttctttccacttcaaaatgagtcattccaccaaaataattaaaatggcaatctattggaatgacattccaaca

SEQ ID NO: 43425 - DNA, 2772 bp, Cannabis sativa
aagaaaattcataaccaatgttgagttgaactaccatgagatgtccactttggccatgtaagaatcgattcttactaacccttgtgattgaaacattatcattttaagtgtcttttaacagagttttaatgttagtgagtagtggtctcattgaataaccatatttatttccatctcacctgtttttggaaaagataatataaagctagcaaaatcttaaagaacattttcaacaaaattgtttactattttgtttctttcttttttttttttatttaaaaaaaactatgtatctctctcacgtgtgaaaggggttatagatttagaagaaagttaagatcatctttctagaccactcaaccttactggttaccacttaccagtcttaaatgcaactccgtactgattcagcgctttagtttgaatgtatacattttttattttctatttccaactcataaatggaggcagttgagcgttaaatataagtaactataactcactgctatctttttatttacatctcattggtttttgctggctctgatcacttcacaccaatctttctcttattcttttactctcttcctttattggccgtatgggtttgccgcaacaactcttctttgtatcttttcttatttttgctgcagccattgatggaattcagggagatgccatggttactggcacagtcttctgtgatcaatgcaaagatggtcaaagatcctggtttgattatcccatttctggttagagtttaactatgttatttatccattaaatgtgcaatttttgctttgtgctgtacaacttgtatcatgtaccatttgagctttgagtttcttagttagcaatgaagagtttattttgaccatttatataaataaccaacgcaaccaagatgttcattcattgtcctaatactatgtcttttgatcttatagctaatttgaatgagattggagtggactaaattaatctacaaaagtacataacttacttctaattgcaggagttaaagtcaaagtaacctgtacagacagcaatggccaaatcacaatgtcaagggaagagactacaaattggtttgggaactatgcggtgaaatttgatggtgcgccagatctcagtggctgtttttcacaggtgtccgacagtggacaaggctctgaatcaggctgctcggctcctgctggaccagcccagaaactcaggctaatgtttaggttcttcgacatggagatgtatgcaaccgattcattgctctcacagcctgcccagccaatgccaaactgcccaaagtccactaatcctgttcccgcaccagtaacaccagcacagccacctcctgtggcagtaccagtgccaccagcgcagccaccgcctgtggccacaccagctccacctgctcagccacaacctgtggtatcgcctgttacaccagcaattcctcctccatcaccagcttttaggcttccgccaatgcctcctctgcctccattgccaccagctccctttttggaagcctcagcatgcccatctaagtaagctacttattactcacacaattctattgtacatcaatacactatcacctaactaactataaggtcccaactggaatagaggtacaacattcacatggtatgagaatccaataactcaaataagcatacaaacaatagtaagcataaaaataaaaaagttaaaacccactagagattcggtgatttggggctcaaaaagaggtagcactaccattttaagagagcatatgtcacttttgagttgaaacttgatggatcataacaaaaactgctggaaactcatgattttgtcttaaattataaattggcaggagttggacaatgcctgaatacaggtgctactggaggatggtgaatcctgagactaaggtggctgttgtgtttggatcacttgcagctagtcggtatggtacagatttgacaatgatgcaagccttacaagggagaggagacccttacagaactcttctaagagaaggggttacctcatttctcaactcctacaacactcttcgatttccttacaacacaattggtgttgttcaacatttggattgggcattaatgggatctacacgcagtgtacttcttacaggcttgcggtttatgagggccaactcgggttatggcactgtcaactgcagtttcacaccatgcaagtgattattttgcctaatctgagcccacatcatccgatatatatgtaccaatctttatatagttgataattgttgtcccaacagtgattataatgtactagtttatcttcttgaataagagttctagagggaggttaaaattttggtatcgattgatgaaatttaatcctcatctgtgttgatacaaccaaatagatacatattttaatctgtacaagtattctattttaattctataatatttattatttatttatctctgtaaactccatcattagcagccttcttaaacaggtaataattttaactatctatgagaaaaagtgaagatctaaaagaaatataaaacctactttacttgtggacacacaatacacatacatatttctttcttaccaccttttgtagcttttgattcaattcaaggaaacaaaatctgagtaattaacagtggcagcacctactatatttatatggacttcaaattgtcatacaaaagagtgaaaacaaatacctctatttttttggtgagctcatacttgcaggattattgtactgctcaa

SEQ ID NO: 43426 - DNA, 2685 bp, Cannabis sativa
  modified_base (2621)..(2639): a, c, t, g, unknown or other
gagaaagcttacataaacatcatttgtcattcatctttaacaaaaaaatacatatgatacatcagatacaagaagaaatgcgacttagttcatgttccctaaacaccgagcaataataacaattaagagcacaaaatcaagtaccttcaagaagaatatatcagcacattgcatgcaagggtagaaaatttgggctgcggtcaactcgtcttggtcacttcgtcccataatttggctacacctataatcaaaaatcagcaaataatcagcaccatcatagtcatacgatatatcccaaaatacaaatttcatacagatataaacacctgagtatccttggaagtttattcctgcgagcaatatccattacaataggccaatacacatcccctctcgcattaatctcctttgatgaccataagaactccactttgcctccttctagatccataccaacagctttccatatctcaattaagtagcggccaacagtctcgattttcttcaagtcaccccccattttattgttaagctgtgcaaaccaatcagcaatccagattttcactctgcacccagcagaggtaagcttgttcacatttattgccttcagcacaccctgcagaacaggcaatacagcaacccatttgaatctctcaaagtatattatcatgttacagcttacaagtacactccatcggtttcgtactgaaaactattcatcaatcaatgcttaaataagtttatatgaagtttcaaacttcaagttattcctcacagaaatcacagttcaaggatgatgtgaaccaatctccttgagtaccgtttcagcaaccaaaacgatagaacagagcaattgaacaaataacagtagcactaagaacaaatgaactgataatgcagagtaaatagaattacagtgaggaaacctaaggcactatagaggcttaatctccccatgatgcagagagtgtacactcaattcttgcatatcccacactatccccttactcaccactcaatatccaccctccatcactcaattaccatttttagctattatactctagcacattccactcatcctatcaatcttgggatctaacaaacagcaccattgtctttcaatcacgatattagaaagaccgaatctggtaccatggatagctaagataaagaatgacttgatatactagtttgcatttggtcaataaatccataatagagcaaattttcacaaaaattatgcttaaaatttttttatgccttttgagatcatttgatgataaatttttcggttccttcgattgattttttgtattttttttttactgttcaattgcttgattttgagtggtggttaatcaagaaagtaggggaaaaagaaaaatattgatttttaagtagtaaagatatgatttttcaatgattgttgtacttatgattattcttacatcaatggttattatgtttgtactttaagaatctaagttgtctctccaaagtttgtactttattggctatttttctgatactgaatcttttgtaaatggattgtcttgattggttggctactcttttcaactgataacacttaaatcttttaagccttctcagatcaatatgttctaaaatcatttatatgaaaaagtttcaaacttcaagttattcctcacaaaagtcaaagtctaagaataccatttgtctttcaatcacagtattagaaagaccaaatctggtaccatgaatagctaagataaagattgacttggatatcagttagcatttgatcaaatttgcacaaatatttttatacatatacatatatatatatatatatatatatattacctgagcaatgtgcattctaccagatggctcaaacccatcatagcaaataggctcaggcttctttgctaacaaattcctgagctcatcctcttgaatacattcctctccaatacttctaacaattctgtacctctcctccaaagcactaaaaaaaaatccaaattttgtattattattgaaaaaaaaaaaaaaaaacagaacacaacatagataaatataaaggtcattggagataattcttattcttacggatcaatctgattagaagagctagaaggctcctccgatgataccgaaagggattgaagagcttctgctggaacttgaggtggtgcttccgaagccattagacctacaaaactataaatatatatatatataacactagttgaatcagattctagtggaaaacaagaacaattgtgacagagcttcaactaaattcaaaaactgtacatagtttcttgaaagcagattgcttgggaagctaaaaatgggataatttgatgaaatctaaaccattcgataaatgataaatgcaaaattacacaatggcaaacatcatttaatcttttacaaacaaaaaagcatagagatttagagattaccttcagttgagatgcggcagagagagagagaaagagatggtggtgactgaagccgccttttacttgttagggtttatgagagagaagacttcaattaaattttctttttttttggtagaaaaaaatatttgagaaaatacaaactaggggtgttcgcggtgcggnnnnnnnnnnnnnnnnnnnttttttcaaaccaacctgcacatgcggttttttaaatttcccaaac

SEQ ID NO: 43427 - DNA, 1364 bp, Cannabis sativa
cgctcttccgatcttatagagcatattatatgttccacgatatcaatatgctatctcatttaaccattaaggattaaaaccagatttgtgctatttaaatcagtaggaaactgacttgaaacaaagaaattctgcactaaattgacaacatctcctcctacagtattccaacacctttgaaaaaaacccggggccattccatccggccccagtgacttattcgggtgcatttgaaagagtgccttacgaacctcttcttccataacaggactcatcaactcggcattttgtgcagcagtaacccgagcttgaacacagctagttacttccctccaatcattgctagaagtgataaaaagatttgagaagtaatcaaccatgagctggagcaaaccagaattccaatccacccacctccccgaattatctttgagcttagagatcaagttatttcgtcgtcgagaagtagccgaagcatgaaaaaatttgctattgttatccccctcttgcaaccatagttgtttggaccgttgacgcaaaaaaacttcttgctgaatgtatacttcagataattgtttcttagccaatttatagtttgttgtagagttttcatcactccccaacttccacttccgaatttcatctttacaaataacaatacgctttttaaaatctccagtatattctctgccccataagaacaattgttgtccacaaaagctaattttcgattggatatcttcctcactccttagctactaactgtcttttacaacttgcatacataacggttcccgcaaccaagcattctcaaagcggaaacgtcgaactcttggctccacaaaagatgaggtaagctccataaggattggagaatgatcagaggtagaagcctccaaattataaagcttagccgtattaaacatagtaagccaaccttgattaacaagacttctatccaaccgaccctccgtccagtttggagttccctgacccctttcccaagtgtatggatagccacacaactccatatcttgtaacccaatctcattcaaggcttgttgaaatccttgaattaaaaaatcaggataacgacgacccccttttttatcatcatgagacaacacattattcaaatctcccataacacatcatggaaggtttgaactgactgccaaagtgcgtaaaagatcccacatagtccttctgcgagctctatttggctccccataaacaccagtaaacctccactccacctcaccctcaacagtgactttgacatcaatgtaagagttagaaaaatccagtaaagaaacctcatcctcattcctccacaaaagtgccaaaccaccacttctaccttg

SEQ ID NO: 43428 - DNA, 2081 bp, Cannabis sativa
tctaccctctctttctttctcccgatcttccttctcaagccctctctttctataaaatattatctttttataaaataatcgtaaaacaacaaaacagaatagttaaaacaatagtgaaacaactaaaaaataacagtggaacaacaaacttaacacaatacatagtatttctaaaaaaaatacagtatttttgaaaaaaatccactccacagtaaaaaagtaaaaaagttagaaattttaatatatggtgtaaaaacttcaattacttttgtggccgtctttttcaacctcattttatcaaagcatttttaaaatgtgttttgttgtggcaaaatttccctaatatctttctccaaattaatatggatgcaaaaatcaatttagagggcgaattgtgttttatattgatggtttttctttatgttgtttttgcaaatataattgattggttatttaattccaaggaaagcataagttttggccataaccattagagattcttttgtataaattatgcatatattgtatcgatatccttgaacatggcccattactcataagttgaccagtaggtttgtgggctttgcttggttgtgtgggctgggcttggtttggcaggatgaggattttgggctatgggcttggtttggcatgataagtatcttgggctgggctgtgttggagaaatacatatttatgctgctctaatcaagcatatgtttactggtaactagtatctcattagttattagagatatgatgatcaatcatgaccaccacaatacattttaaaataacttatattatattggtaactaattattttaaaatttgatggtatatatcattaaaatgtaaaaaaataaaaagaaaatacacagttgaaaatcctacatttataaaacttatagtaaaaaatacaccttttttcttttgaaaaacaaatgaacaatcaagcaacctctttttttattttttagtaacaatcaagtatatacttaccttacataatagttgaatactcaagctaccagattgaacctgttgcaacagtttgtactgttgtgtcttctgagcggtagatgaaatagaatataggtgtgcttaaagttaactgtgatgctgcaatctttttcatttgattttattttaattttttgttaaacaatctgagaattagaagactgatcatttggttagttttttttaactctaatcatggtcatgtctcaaacgggaagacatttcaattgaattgcaagctatcattttaactaattgctattaataaaattctatttattcaaaaaaaataaaaatgaacggaaatgttaagtcaaaatgatagattcattgtaacaaaagtaaacgctttatatatatagattgagtacatggtatgctcattgatttatttttaactagtggatttgattaatgaaattttttctcttcattaaaaaaaaaactacaaagattgtatattcttcttagattgagagaacattaatttgttttcacttattttaataagtttaaatattgacggggatcacaatcatccaattctactacgatattagtttagtgtgttaagcttgtttattattggtttagttttggttagttatttttgttacacagtcagtttgtctttcttagttagttgggatatcaagaccgttagcttggtctaaactaatcagagttagttttattttttattttggttgaaacaatatacgctcctcttgagctatatatatatattgaccatactctatatttttctcattcattttttcaatacaattacacttttgtttcacctttttatttcgcaatatggtatcagagcggggaagaagagcttcccccaatcttgatctttccttcctcatcgttgtgttttcctctccagcaatgttctttctcgtgtcttggaattctgtctagaactttttcttcttctcctttgttcttccttattgattagttttcccttcctgatcttgtaccgtttcttccatggcaactgataatcaagccgtgacactaggaactaacaacaatggtgtggc

SEQ ID NO: 43429 - DNA, 2734 bp, Cannabis sativa
ctccctctatttattctaatttcctactgctggtgtattacataacctacaccttactacactcaaaaccctcccatttactaacctgctgactgggcatatatatacctttcaggcttcttttggtacagaatggaacttccttaaatctaacaatgagtgtcccaggaaaaaagggtttctatcgttattgttgttgtcaaaataagtgatctttagttcaaattatctatgattggagttaaatttttcctttttaaaataaaaaaataaaataaaataaaaaacaggaaaggaccacttgtcttagactggcccccaaccaaatatataaaaaccctcacttttagaggaggaaaaccgtgggtacacaagctttggcacaaaacaaaatttagagaaaaacatataaaatgcagttacatcagtgttttccactccctaatcagatctaagaatgattggatttaattggtaatgcctatgttggtaaatggtaattaaccttcttgtgatttggaacggcagatttactaaacatcaatcagtattcaaagactaaccataagatgttggagactctatcactacatgctgcattttaaattgtttatctttctcttatgaatctacatttacttgggtgtctcaagacttgtctcttataatcagtgcccaccgggtcacagtttacttttcacatccatatagaaaggggaagatgtagaaaactcaaaacaacataagatataaaaaatgtgcaaaatttggcagtacgagtaaatattatatttagcacaattttttttatcatgctccaatggacaagaacaaattaagatgcaaatttacataaaaagtaattatcattaataataataaatagattaaatatttttaaaaaaagtaatgccgatattgtaattgaaaatgcgtattaagtcacttggcaaaatgctatattttagccaaatttagctcaacttttagcatgtgttaaattttgcacaacttttagcaaactattggagatattttttacaaaaaggctaaaatatgacatcgcatcacatattttgcatttcatttgagacactctaatacatgtataaatacctgttttgcagcaagcatagctgctcgagactctaaattaatcgctgctagctgtccaccctgaaaatcaaggaaatctgataaaaatccagtatcccaagccatttcaattgcaagtataactagatctataaaagcatgaaataaggagttgatagaactacatgttaaacgacagaatgcatacatttttctaaaagcataataaataaataacctcttcaacaaatacttacgatattctttgataaaaaaaaaaccccaatccctgtaaagagccagaaaataaaggaccactaaaagttgtcatttagcctcttccacaacttaatcatattccagttccctataaaatcatcttcgatatctttaagcatatgagcattctttccaatcaactttcccaacacctaacattctaaattaacatgctttacttattagtgagcagatatatgccaaaataaattcctagttctttcaaaagttagctctaaaacctgtttacacaagaagaatgtgttaaaagatactacactgattcacccttatttatgaaaaaacaaactaggagacaatccataatgtaatatctgaattttcaccattaaataaccactcaataaacattaaataaccattcatctgaatttccaacataaatcaacctacaaaaggctgattgctcaagcgaagccatcgatgttcagagttttcctatttctcactaccccttgatgattgtaatggccatgttcttcagcaaaagaattaaatgtttatttttttcccaacaacagaaaaggcatgtagtcctttcttttaatatttcaatgtaactcttcttctcacctgcatgcacaacctttccattttaaccagattttggttgaaacctgatttttttgtttttttttctttttgaaaaagagaaagaggccacttgtcttaggctggctccctgccattatgtattgataatccttacttgtggcagaggaagaccgtggttacataaaagagcttagcaaaagagaaaaaagattaccacaaaggagattctacaactaattacatcaaaattctccattccctagtcttgaacattcaacccctacaaaaattctgttatttctttccaaccaaactgcccagagaatagccataactgtagttctccataaccaaaatccttgactttagaaggacctctacctttccataagatcttagtccagcacaactctctaagattctgattcgcaaggaaccaatagaatgttgatttgcaggagaaaaccctactcaaatctggtttccacactctactatcatcaaacacattaagtagtctaacgtattccaattgatgtagcagatctaaaagactaggtacttccctatccatcaaatttcttctgaatttgaaattccagcttgccaccctatcgtccacctcacctttaatgggaacaaggtctttaatactcgtgttcttggctttggaaatcacagctagatccgagacatgatccttgaaggactctccactccatacatcttcccaaaagcgtatactaacaccatttcccacttgaaatgtaccagctccaagtat

SEQ ID NO: 43430 - DNA, 1536 bp, Cannabis sativa
tttggctttgtgaataaagatgtttgttttcaaaaaaaaaaaaaaaatcatttttgtaatatgattaaaaaggaaaatacaattattaattttaactttatttatagaaaatttctaattaatttaagaaaaaataaaaataaaaataacaattaacttaattattgctgttttggttttggcatccccatttaggagtgttgttttaaatatgtgcttgtaaaagtttgagacaatactttttttttattatttgggagtacgtattatttgcaattctaatgtttaattatttaatattgcatccttttaaaaatctttaaattatgtctctaataaaatctttttgaaattaatagtttctttaatattaatctatgtattaattttgttaatggaaaaaaatattactgagggtataagtaccactaaatgatcgaggacataaatactaatactcaaataataggagattttgctgtaaatatactaaggattgcaataactttttgacggaaaggtgtggcagcacaaataattaatagaaggattttgctactattcttttattggagaggtagtgtgtcactaaataaaagaaaaataagcttcaataaggacaaatttcgtcagtgataattatcaatggcgacttgtcatcagtaaaaaattattagtgataactcatcccttaaagtaagtatcaatgatgacatttaaagtcgtcaataaaattaagtatcaatgacaatgacatcactaataatatgtacatatattttattaaaatgataggctatcaatgatgatttagtcatcatattgattataagtcgtcattaatagcctatatgttacgctcatatttcgagcattaaatacggatacgtcacgtgaatataagtctcgaagattgagaaaaattataaatgtgagggataaaataagtgtctcacctcgggatatgctacaattaaataattgtaatgaccgcatgacttatttaaggattagtagggcaatcgttattaattattgttctttattgattatatatgaatatttatatttattgtgggtcctatcttcagaaatgggctttagagttataatttctcaattccggaaattttattaaactctaaatatcttatttatgttatatgtaaactttacagtttttataatttttgcccaacgacgttgaaaaataagacagatgatcaaattagtcacatgggatagttataatcttattgtttagagggatattcataagtgatatttaaaatatcgggagtaggtagggttataattttggaccattttatccctaagctatttattgaattaagcacttaaataggggcattttggtcattttaatgatagagctaggtgtctacttttcttgagggcagctggccttcaattaaataaaagaataaagcattaacatttagtttctttagctagaaaattcaagagtatacataagaatgaaacctcaatattgtctttctctctctctctctc

SEQ ID NO: 43431 - DNA, 1695 bp, Cannabis sativa
ggtgcaagtaaaaaattataatgtgaacatatatatcctactaattccgtgtgtaaaaaattgtttgaaccataaattattcaaatttttttggaaaaatagaagtgatatatactctcctatatagagatgtatatatgtaaataatattgacctgtaatgtgtagccaatgttgacaacaattgcattaggtagaggatgaactggtaaccattgaccatctttgatgacttgaagaccatccacttgttgaagaagaagagttattaagtttacatcagcatgtttaggtaaccctaaagtcaaggttggatctgggcatggtggataatgactcactgacattacatgaactttgctcacttcactttcatctcccatacatccatcttcaatccctaaccctttacatatcaaatccaaaacatacaaactcaacttcctcacctccgccgcgtatctccccatcacctctcttaaaaaaacaataccaaataaacgaagataaagagattatcctagttcagatcttgagtttaatgctaaactttaaatcgactgcttataaattagttgtgcatactttactaatttgtttgcaatgctcctaatatcaggtgctcataaattagttgtgcatattactgataagaaaattagaaacaatgacataccgatattgaggtggtttttgaggccaaaattggatgtgtttttgtataggatgaccaaggtgtcttaaaacatctctccaataatgaacaatttcatccccataaccaatacttgtataaagtctacaaatttgggttggatcatctgagtacaacacttgtttgtcctcaattggtagctcaaaaaactccttagtcacatccaatacatcttggattaacttctcttcaatcccatgattaatcaactgaattttgttcatcatgcatcatcaaaattataatacaatcaataacaaaacaaaacataataatgaataatgttcaaacctgaaagaatccaaactctttggaagcttgaatgatgtggtgaatgagttgttgttgctgttgtttcaaatcaatgattggaatggtgtgaaatgaattagtactaagtttggttttaccaggtctagaatgaggtggcaatatgtaagaatctggtacaaaatttaagtctgtttttgttgataacaatttctccattgaatatttctttgcttctctccaatttcatcaacaaagtctcaacacctcttagatctagcttagatctaataataatctaatcaagataatattataataaagtttgtgtagcagaagctcagtttttcatacttatctattcacttattatattactatattcttattataaaggacaacttcatctgcaaacttcttaccaccctttttaacttctttctatctcacatatataaataactataaaatatttagttttacgagaaaaattaattttagtgacaatctcttagtcacaatatagattttgtatgattaatgtgacttttagtaataataaaaattatttgtaattaaaacatggtatttaaatacaagttgttactaatttagttttatacacaataaatagtgtgactatgaacatatttagtcacaataaattgtgatttttgtttctaatatttttaactataaatcttttagtca

SEQ ID NO: 43432 - DNA, 6775 bp, Cannabis sativa
attcattctatttttatattatttttgtaaaacaccataaaattataattaaaaatcttaaaattgaaaaaaaaattgtaaaaatatggaaaaaaaattattaaactgtataaatattaaaattttacaaaaaaaaaatgacattttgcataaatttttctttttaattaagtttagtattgtcaatgattttttattttatttataaaaaaaatttacgaaataaattcttaaaataattagatttattacacataaattttagcaatatagtgtagtggtagcctcgagctagcctttagaatgggtggattttagaaaaaaaatatttatctttattaaaacgatataaggtatttttaaaaaactcttacaaaagaaaaataagtttttggcccttggattgagtgggcctaagcgcagacttaatctatcttagctcagagtcccgaccctaagatctctatagctaacaaaaatttactcgtagtcaccaacttatttattttaaatattgtcaataattttttttgagtatttattgtttgcactataaggtggaaggagaacaaaccaaaatgagggggtaatatagaggttatttggcttcataacttaaaaattgttttctgtttttttaaaactgaaaacagttttaaaaaccaataagggtcgcttggcaaaaatttttaaaaatagttttataaaaattgagttttaaaaaactaaaaaacagaaaacatcaaaatgttgtttttaatttttaaaaatatttttttttgtctaacatattatattttatatttttgctcacatactcggattctaaacccggaaccaaacccgaacctagacccgcatgggttcatgtcatggtatggtgttaaaatatatcagattactcatttctgtattgtagtcagttttatccgttattttcgattggcagttaagttagttgtgttcaagtagttagttaatttagttctgttatttgctcttcccctttgtatatatactgttgtatcttccattcttttcaattaatgaattcaattcttctttctctcaatttagttctctctgttgtttttatcgcaacatggtatcaaagcggagaagaaagcttctcccctgatcttctacgcttccgcctctctcctaccaggccgcgtcttcttttccggcaatggtagtgtactgatctgtgttctctttcactagatttactccgtggaatcaaatctttctctcttggaaaccctttccagtgttcttccctaatcaatgatgtctagtgacaatcaagaaattggagttgaaactggagttccaagttctgccatttctgcaaatcaaaacaaccaagtcatgaatccaagaaatcctcttgaggatccttctgatccgtattacctccaccatggcgacaatcccggtaacattcttgtttctcagcctctaatagggcaagacaattacatatcatggagtcgtgcgatgcagcttgcaatctctgtcaaaaacaaattaggattcttggatggttctatacctaaacctcataattctgaatataatctttacaatgcttggattagaaataataacattgttatatcttggattctcaattcagtttctaaagggatttcttctagtttgctttacaatgaatctgcagctgctatttggacagatttgaaagttagatttcatcagcaaaatgggccgcacatattcaatcttaggaaaagtttgatgaatcttcatcaagaaaatcagaccatcaacatgtactatactcgattgaagacgatatgggaagaattgtccaactataggcccaattttacatgcaatggatgcacttatggtggtgtgaagaagctccaagaacaccaccacatggagtacatcatgtcatttttaatggggctttcagaccatttttctcatatacgcagcaacatactcttgatggatccattaccagaagctaatcgtgttttccatcttgttactcaagaagaaaaccagaaaggtaatctttcttctggaaatgattccaacactaacatggcttttgcttgtcagtcagataagaattccaacccaaaacctgacacacaaggaacagacccttttgtacgcactgtaatgtgcgtggccataccattgagaattgctacaagatccatggatatccttcaggattcaagaataacaaatcaaaagatgcttcagcaagccaagttcaaaccagcacaaattctaaaaatttcaatgatgaaggtcatactctgttaccccaactgaatgcacttcagtatcagcaactcttgaactttcttgccaatcaacaaacttgtatgcccaatacatatcctagttcttcctcaagaacaacaggtatcatactatctcactattacattacacctgataatgaatcatggataatagatttaggagcaactcgacatatatgtaacaatataaaaatattttaatgtgtctttcctatattcaaaaccaggttacttcttccaaacattgactctatttttgttcaccaaagtggttccatagctgtcaatagatctctaactctcactgatgtgctttatgttccaagttttaaatacaatattatatctgtcagctgcttgactaacaatggttccactttagtaaaattctatgctaacagtttttctatccaggacaaacacaacaaaaggagattggtagaggtagggccatcaatggcctttatgtgatggatgcttcaaatcataatgcgcatgtcttctctgtaactgttgaactttggcatttaagattgggacatccatctcagaagagacttgcccttctaagtgacaaattgaattgtactgttagctctttacagaaaaataaaccttgttatgtctgtcctttagctaaacaaagaaagcttatctttcctaataacaattctattgctgtcaataaatttgatattgttcattgtgatacatggggtccttatcacatcagctctcattttaactataagtatttgctcactttggttgatgatcacacaagattcacatggatttatctactaaaacataaatatgatgttgttgaaataatacctcaatttttctcttatgtttagacacaattttagtgcacaattaagagatttcgttctaacaatgcacctgaattggtgtttaaaaatgtttttgcaaaacttagaattatgcatgacttcacttgtgtggaaacaccagaacaaaatgctattgctgaaagaaaacatcagcacttattaaatgtggctcgtgcttttttctttcaagcaaaaatgccaataaaattttggtttgaatgtataatgacaactgccgttctaataaatagaaccccaactcctctacttcataataagacaccttttgagctattatttggcactgcagctaactattctaatctaagaaactttagatgccttgcttttgcttgtactcttaatgcaaatcgcaccaaatttgccccaagagcaaaaccttgtgtttttatagggtatccacaaggcatcaaaggttacaaactttatgacttaaatgacaaacaaattttgcctcaagaaatgtgattttccatgaacatatctttccatttcagacacttaacacctctatattggtgttgaccccttctcccatttggtttttccctcttctaatatatctaacacacatgtgagtgattttcctgcagaaaactatactcatatcactaaagatactgctctgcctgagaacactgctgctgccatacccctaaatatgcaggaaccaacatctcagcatcccagcatatctcaggaatcaattgctgctcctgaagctattacagcttcgtccaacagaacaaatactcaaggtgcctcaaatcatgatccaccaagagggacaacaagaacaacaagaccacctgcctatctaagagattatgagtgcaactctaccatacaagatcaatcatctacaccacacccccttcacaaatgtctttcttatgacaagctatcaaaatctcacaaagcttttattcttgcagttaatgctcttttcgaaccaaggaattacaacctggctcgataactcaaggtgtggaatgatgctatggacactgaaatctatacactcctctgaaacaaaacatggactgtgtttaaacttcctcccaacaaaataacaattggctgtcgttgggtctacaagatcaaatacaacaatgatggctttgttgaaagatgcaaggcacggctggtggctcaaggttacagtcaacaagaatgattggacttctttgataccttttcaccagttgccaaaatggttactttcaagttattgctggctatttcctccatcaagcaatggcctactttgcaaatcgacatcaacaatgtcttcctcaacggagatctccaagaaaaagtctacatggcattgcctcctggattcacccctcccaacacagaggacaattctaacctagtttgcaaactacacaaatctatctacgacctcaaacagtcttcaagacaatggaataagaagctctctgatgctcttctcacaacaggcttctcccaatcccaagccaactacactttattcacacgaggatttaatgaccagttcgttgcactcctcgtctatgttgacgacattatcatcacatgtcccaacattcaacttcttcaccagttgcaagagtcccttaatgcccagtttcaactcaaggccttaggaccacttaaatattttttgggcttcgaaattgttagatcagtagaaggtgtatttttgtctcaacaaaaatacaccctacaactccttgaagacactgactacacaggaagtaaacctgcaaaaaccccaatggatcccagaacgaagcttgatgaccaataaggaaatcttttggatgatccctcttcatacctacagcttataggcagacttctttacctcactcttttaaggcctgacataacatccgatgtcaacactttgagtcaattcatgtcatctccacacactacacacatgcaagctgtgcatcatcttcttaaatatttgaaaggtagccctggacaaggtcttctttacagttccaattcgtctttacacctaaaaggcttctccaactcggactggactgcttgccccacaacaagacgatccataactggtttttgtatcttcataggagactgtctaatttcatggaaaacaaagaaacaaactactgtttctaaaagctctgccgaggccaaatatagagcccttgccagcaccagtagtgagataacttagatccagtatctcttgactgatttccaaatcagtcaacatgctcctgctttcatctactatgataaccagtctgccatatatatagcaaataacccaacttttcacgaacgaaccaagcatattgatctcgactgccatttcactcgagaaaagatcaaagcctcaactatttgacttatcctagtgatcactacattacaattggcagacgcttttactaagcctctctcttctactactctttcatctcacattcgcaagatggctgtatacgatatctacagtccatcttaaggggggatatcagattactcatttgtactgtagttagttagttttatccgttattttcggttggtagttcaggtagttgtgttcaagtagttagttaatttagttctcttatttactctttccctctgtatatatactgatgtatcttccattcttttcaattaatgaattcaattcttctttttctcaattttagttttctctattgttcttatcgcaacaaaatattgatttttttagtaagaaaaaaatataaaaatagttttaaaaaatttatgcaaaataccattaaatttttaaagcgataatttttttattctcacttttaaaaacacaattctaaaaactgaaaacacaaccaaataggctcttagtatttcaaacctatgattgtcataatcaataagatggctaaaaatgtttagaaattgtattttggtgggaaagaaaaaggtaagaaagatataaaaaaaaattggaacatcaaaaataatgaagtcttgtatttaatatggaaagaaaaaatgtatgaaaaacgcttgatttaacaaaattttccatatcaaacatgaaaaattaatttatttttaattgttttccacactttgtttcttacattttctttatgagcattactatgagacacatagaacattttaatggtaaaactttagattatgcttagtgagatggatatattatgtggcaaaatattaagatgctatactattggagagaagagaatgtcattccaaaaatttacatggatgctatgttgtagcattgatgctattcattattttttaataaaaaattcattaggatatatattcaatgataataataataatgtatgagatcataattatattatttttaaagagtgctatacattggagtatttttaagagtaaaagtaccaaaaataatgtgaaaaagaaataaaataaaatattatatttttagatgatgtgtaaatattatattatggtgcttaacaccacgataaagtgtcgctttataattggtgttgttgctcctaaaatcgcccaatatacgtggaccagtcaggaagggacacgtggatc

SEQ ID NO: 43433 - DNA, 1988 bp, Cannabis sativa
gaccatcatggatgccacgtcagaatacaaaaattaggataacaagattgatatgagagaaacacagtagggtctaatgtgccaaattagttttttataaagcatataggagagaaagtatgagaattatggtcacaactgaataacaaagaatattttaaggaatatttagcatgactaatagtttagtaatattttttttatatatataaatcacaagaaaaaagtaccaacgagtttatttttataataatttaagttgtattataactagttaattattaatttatattataaaatatataaaaataactataaaaatataaattttttgaatatatataattttcaattgttataatatcgtcccctagtatgttgatactctcacaacattaaaaattaatgaaactaaatgtagatatttaataacgaaacacacatatatatgactaactatggtagggttttttttttcgtgtgtataacaatgaaagaattggaatagtaacttattacacaacatatatttagtgatgtttcattatctctttatgcatagctgcaaagaccaaaagcacaaaagcctccattgctacacttgttgttgcagccaccgcaatgccttttattaaaagagtggttgacacatttgccattgcaacatatctgattgtatttgcatttcttcccacatttgccgcagttatggcggtctctcacaaaatcaacgcacttcttcttgcaacaactcggccctgggctgcccttggctagacaaatccttgggatgttcttgcatgttggccgcctattcgccctcttccttatcggccagaagaatcgctcctcttcatgtttttgattccaaaaagaagaagaggacaattctttattataaactatttctccgttgtttttatgatgatgatcatcatcgtggtcttgttgatgtattgatgctgcactagcaatattaggggacattgccatattggacaagcccattatgagaatgaagaataattttgtaattatgaacttcatcttcattcgatatttaactaatatataaatatctctggagtttcaattatatgtgtatcgaatgaaccaaagtagtaatatgttctatggctttgattgaagaggtggtgatgaaaatagagtttttgtatgtatttatagcgaattaatttgggattggcattggcattgaccattgacacgtacgtgtaagcctacttttttttagtggaggagtccaaatcagtggctgattttattctacctaatgacagacatgtgcttctgttttttgaatcaaaacatattacacaaacattgaaacgaataaagaaacttatgatatcatatagtttaatagagaagtctaactgaacaaaaaaaggttttgttaaattattgagagtagataataaatagtcaaagtgctgttcatattgtacacatgtcccatggactatatttataatgtcatatatattaaggtaattagcggcgacggtttaattttacacggaattttctgatattatttttatactaatactctcttaatttcacttcaatttataaatttgagtgtctgttaaattttgttattaaatgccagctaacttatcctgtgtacacataacatgttttaattaacttttaagttttactattaggtgtatacatgtgtacacaatgataatctcaactgttgttaaaaaaaaaaaatggtaatctcaattgacattcaattgttaaatttaactcatatctcaaatttataatcaaaagtaaagttaattaaaaacaaaaaaagatggagagttttgcctctaaactttgatatgtacaaaatcatgtcccttgaacttttaaggttgttgaaaatgtccctgaactatttagattattgattaatttaaggacttttatctaattttattcaattttattatttcagtaattgttta

SEQ ID NO: 43434 - DNA, 4292 bp, Cannabis sativa
ttcgtttagggggtgggatgttcctactcgcggagagattttgtatttctataaacttgtttcaattcaaaaaaggaagataaaaattgtccagaagctcacctggacaacaaggttttggttccttacggccagaagaacgtcaatgaatggaggaaacgattcttcttttctttaggcttccaggctttcaagcatctagatctcttcattgattgggctaggattggtaagccaatatttatttgtcttgctaattttccttttgagattgtcagtgacttggccacgtagctggtgcacggctctaccaggaggttcatggtgtgcacttccactaaccctatctttcaggatcaatactttagcaaccaattagcttcagtaagacactaactcttcttatctctttattcactttagcggttatcttttttcagactttttagaatgtaggtggcaactaaagtcaactgtttatccaagaacttggtcgatcaaggcaaagttgtggtggttttgggtggtcttctgaggtccaagctcagttgcaacaggccgagaaggaaatggagatcctcaaggatgaagttcttgggagaatgtgcttaaggagcgagttttgaagagagcttctagtttggagagagaattgaagtcaacctgagaccaaaaaagggaaggtcaaacccaactgtctcaatctcaacagcaactcaagcaagctcaggatcatgtgctagcggtcaagtagtcatttattcaaaaagagactgatttgccaaagtccaatttagaggtagagaatcttagacaaaagctggaaaagattgaagaattgcacaatgttgatctaaagactgtcacacctatgtcagttttattaaaagggctttgaagcctttgggatgccaatcaattggttgacgacatcgctgccaagaaacatgctccaggcctaacacttgtcacgtgtcaacactgcgtaaaatgttatgaggacagggtgttcatgccttggaagtcaaaccattttgaaccgcgcctcacctttttgaaggatcctgaggaggttttgaaatgcttctcagagaacaacaaaaagttaaaagctgctctggtgcagaagatgggcggtcccaggttgcctcatctggcttctttaagaaaatgatcatgttcttacaattaagcttctatgattctcccccattttttatggccatgaggtcacttttatttttttgggagacaacttaattagcctttcccgagggcttttccagtttttccctttgtatattcaaaacaatggggtcgggaggcctttatttacttgcactttctttatacacttatcatattttgtgtgttacagttttttgagtttatgacctttgcagaaatttgtatttactaagttcagaatttatttttactcgatttcagtgatgcaggccatctgagtgccctgacatcttccataaacctgagcataaacatcttccaggtttatgaatccttgggctctggataaaaaatcagataaaaatgtgctcttttcctttgaagttctccccataacaagaataaagtgattattcctgatattagagccaccatcttcatatcatcagtaaagcagtatccatcatacgctagatgtatttcttgaggctttcccttagttatttcttgaaattagtcagagaactgacttccaggtcaaaatccttcactgtgaattgtttcttgaacattgtttgcagatctttccaattacaaactgatccaggagataatattttccaccaatcctccatggactttgacaaagttaatgaaaagcagaggcactgtgcgtcatcactagcttttgctacttgcatcatttgactgtgcttggatagatggtccttggggtgcgtcctatcttcatataatttcctctgaggcattctgaaatgctctagcaactgtgcatttataatccttttcacacatggtctcgtgtcctcctcttttgagtcaaacaccattccattttgcttccaagagatcttttctgtgagcttttttaactcttcaatcttatgctccaaacgttgggtcgtatcacttcaactaatggaatcatcataatgatttgtacccttttgggtagtaggattcttggcttatctttctacgcagctttgcctctagaattagtttggtcaccttgctctgaagcatgggttcctttctttttcttttgaggatggctggaacatttatatttcttttgcggttcattttggacagccttctttgaaatttagcctacattcccttctcttttgtctttgtgaggatcgtaagttcttggagttttggggtcagtcctcctagcgatgttatcttttggatttgtttgactggttttgcttgcggcgatcaatgccttgattacgacctctatttttctccattttctcgtgcatcaacaaagagaatttctcttgcaacaataatttgtcctcaactatatttagcttcctgaccatgattgcaagatctgactcatcgggatcgccctcctttttagcctcgtcacccacaggcatatcttgatgatcgtcctcaggcatgttgtgattatcatcctcaggtgtgtcttgatgatcatcttcaggagcatcataatcattctttcatgattcatcatctttagccataagatcttagggataggtttcttgctagtatgatccttcttgtggtgactggtctcctcagtcagatcttttgcatctcttgttttatcattaattaggattagtgttactctttttaggatcagtatagtgaagactagactgggttcaggtgcgtaccgtaattactgaatataatcgtggatggtaatcatggtatcattgctttcttcaactctcaataaaattaccaatatatttaccaagattttttgaaaaataaattatttaatattcgagctaaaaaatgcaattaaaagaatcaaatataaagagaacactcgaaatttttatgtgattgaggtgttgatgagccttagtttacgagtttgtattattatgacataggctgaaaaagcctaaaggattacaatgaatatgaacactttattctcttctcaagcttgtgagttaagaaatttcaaccgtttgcatgaatgattcaatgcgtatttatagagtaatagatgtcatacttagttactctttctctctaatggggtgtacagataatacaccactttgggcttatcaatagtgaagcctatgctgacttggcatattgattgtggtcatatatgttcatactgtttcccttaattatggataattaattcgatattaattatttgatccttaattatgtaatttcctattttagcttgatatttattctctgccagagatctgagaaaagtgatttccttattatgcacgtaacagtaaacgagaaattgcaactggcttcgagacacacgctaaagagttcttccggatacacgaaactaagatcctttcgaatattgactagccttagcggaagcttgcctgagcaagaagcgtaattgctttcctagaaggccaagtcggtattgggctcgacccaattcatgatgtttgggcccactgatgagccttgacttctatttagaatccacgtgtcccttgctggaaacacaaataatagttattaacttcttatattaaattatgtaagatctaatacttaattgtaccaataatgatttgacacatttaggtggggctaggtactactggtgtcttttaacatttttttttaccaaggtagtattttaagaatagttagcgatattttgtaaaaattattacactaatgtgaaatctaatacttaattatatcaatagcaataaaatattttaaatgatattacgcacaactgtactttttaatatttttttttatcatattatttgatcgctaaaacaatttagtgcccctattttagttggcaaagtttagaatttataatcatatattactctttggattatatattcaattatgcgtcatcattcaaaaattattatttttgttgttttttttaattaaataatcagaggatttttttcttcttaaaagttaaaattatctttttttgataactttaaaagttaaaattatcataatgctatataatatttatagggatatgattttgtctcgttattgtactttcacggattgtaatccgtgatgtacggccgctgtcagat

SEQ ID NO: 43435 - DNA, 2702 bp, Cannabis sativa
gcgtttatatattataatgcataacttaagactcgaactcaggacatccaacacacttaccctccctcatgtttggtagttgaataatactatgggccacattccaggcccaggcccatacataggcccatctttccatcctcaaaacactgtagtttcatcattgaagctgaaatgtctggtgtaacgattacttgctgagttagcttttagctttttttagcaatggccaccacacaatgcactagagcactagtacagattctgatataccctttcttgtttctttaacagtagattctgatattatatactttacaaaaggaaaagtactattacatgtggaggaaaccatgactagaattttctgcataccaaaaagtagtaatgataataatattataggacagactagaattttcttctatggtacttaatctcccaaatctcaacttcatttcctctgtcatattctatcacatattgaggaatttttgacatgtcaatgcacttggccacaaagcaaggccttgaacaatcttcaattccttcaaaatctgcaaccaatccattccaaatttaaaacataaaatctggaacgttaactattatctatggcaaaagaattctgaccttcttcgtattgcagatagcttcggaaatgtgcataaccatttgcaacgacattgagatcgtcaaggctgaagttgtagcgcttttccattgctaagtaaagaacctgctaaacaaaatgattcccattaatgatactaatcttactaatatatttgcaggtgtgtgttactatggaccattttaatgttattgtattgtaccttttctgatcctatagacattaatctctctactgtactgaaaaatgcatcggtcagttcatcgctgtatatgacatctgcagctagaagtatagaagctccctgtgcttcttcaacttctgaggaggtccataaatgcctaaacaatccatcaaatgaaacagcacatgtttcccatattaacaataataagaaatagtactaagaatgaaaaacaatgtgtgaaccttagttctaatttctaaagcagggaaaggggaaaacaaaaaagatgtgctaccgattagaagtaggcgagtcttggaggcctatttgaggaggccaggagttcatccaatcaagttcacgaacatgaatgatagctcgacaattaattgattcagtattaaggtcgacattcttagcacagttgttgaggatcttttcaccatggtctgtcaccaatccaagaaaataacattttgcttacaaaatattgtcttactacattggtttccttcattgaaaacacaatcatctgatgaaatcacaaatggatcattgtactcaataaggtttactgatttttgacaaattatttccaaagtaacagccaaatgccttcattgatttatcagccaaaacaagaattagagaagcaaaattactctacctgttaaaaacacagttttagcaacacgagcaagtaatataccagccaaccctgataaagaaatataatggaatctggttattttaagacaaaaagaagtttttaacttaatttgtttattcttagtttaagatttgcattataccagtgccagcaccaagttctaatgaaacaattccctcaaattcagacgatgtaaacatcttatccaacaaaaaatcagacaacaacagttctgctttccacacctgaagagagaaataaagtattatacaacaaatatgcatatatacatatataagaacataaaacagcataaaagcaacagagctaaccaataaacttacttgcaaacccacatttggaattgaagatgttatattatgctggataaccacacgaattttttttgttgatgattctgtatagtgaaaagcattgaagtggaacagtttgtgtttagtcaaaatgttaaaaagtttgaacctgaggacctaaaattaaaggcccaaacttgaatagaaaaatcatgattgagtaattacaagctaaacccacttcgtaaaaagtagaaaaggttaatacttgaaaagagagaagactcactgctgcgtctagtaagaacaagatcgccatcctcatccagcaaaaccgatttttgcgttgaatctgcttcaacttctatctaatgcaaaaatataataatgtattgtaatttgtaatggtagagaccagagagcttagggggaggggggatttgaattaccaggaggaggagcggagaagaagaagtaggaatggtgggagccagaatgagcaggtgggcaacccaagtggacctcgctcatcacatgatctttgaactcttctgccgatgaagatggtaatggcaatgaagaagatacagcagctctgtcttccatggacgctcaagtttgtgactagtgacctgtgagtgaccaaaacccaattcgacttcactgatgattctctttcgatattttcctccgtacgacaatgaattacggatcagaatgtgttcagacaatgtgtcgtttgttattacggtaaataccgaaacttttgaatttatatatagcataagatataaactattcttttttagtagtataagtattaaatatttataaaattgtaatttatttttaataaattcaaaatgaaacatttacttaaaaagcaaaaattattgt

SEQ ID NO: 43436 - DNA, 1899 bp, Cannabis sativa
aaaaatttccgtgtgacagtatttttataaaagttaactcaaattccagtatttttgtaagttttcctttttattattagaatttggtgtagtttttgtttaggactggctttgtgatgggtgaagcccaatatgaaatttggtatttttcttttcttttttataaaatggtaatttttaaaaaaattaggagtcttttttgggtttaacagaagaacctcattaagtgaaggaccaaggtagaggactagtctacttgagcctgtgtgagttgattattcttgtaataataaagggaattttttgtttttaagatcttttttttaatttttaaatattttgtgggaaaaattcaaaaaaagttaaaacaaaaaggaaaaacatggtaactagagtggtgaccagttatcttcttagggtacttgttaccttatactgttttttaccatctcttttaacttttctttttgattttttttccatatttaatttcttttttgaaaaaaatcacattttttgaataaattgtataaaaaaacctataaaatatataattttttttttcactaataataaagtaaaaatatgtataaaagagaatttattttgattgtgacaggcatggtattaggcaacttcaaagtgggtgggccgatgggcctggatatgtgacccaatgcccaatacaaactgggcagagctttgtgtataatttcacagttgtggatcaaagaggcagctttttctggcatgcccacatatcatggctaagagctactctctatggtcccataatcattctcccaaagaaaagtggcccttcttacccatttcctaaaccctacaaacaagttccactcatctttggtaataaatcttcacactaaaatagtttcccataattaattagatagtgaattttctaacaaaaactatacaattcatgatattttttcaggagaatggtggaatgctgatacagaagcagttattgactatgctttgattaatggtggaggcccaaatgtgtcagatgcctataccataaatgggcttccaggcccattgtataatagctcaactgaaggtaagtgatgttatgtataaattatctttataatagtgatttttttgatgaaactaactaaaaatgtactatataagataattttaatttttaaatttttttttacataatattattcattatttttaaatattttagtagtttatttaagtgttaaggtttgtttttatgtgtagatatatgtatgtattaatattatatatttgaaaatgaattaaaaaattgaagaaaattaaattttagtaatgtattttagaaaagtttatgtatagtgtaaattttgattttttttttttttggtgatatcttttcaaaaactattaggagtgttctaaaaagctaaaatagtttgactcacttttttgtataacaatttatatttgtgtagatacattcaagttgaaggtgaagccaggaaaaacctatcttctccgtttgataaatgctgcacttaataatgagctatttttcactatagcaaaccacacaatgaaagtggtcgatgttgatggtgtttatgtcaaaccttttgaaactgatgctgttatcatagcctcaggacaatccacaaatgttattctcaatacaaaatctgagtacccaaatgccacattcctcatgattattaggccattttcaccaggtcacccttttgacaataccacatctgcaggaatcttagaatatgaatttcctaacccaaaccttacaatcccatggcacaaacttcaactcatgaatccatcagtcttgcatgaccaaaatgacacttcattcgcaacaaaatttagcaacaaacttcgtagtttagc

SEQ ID NO: 43437 - DNA, 4802 bp, Cannabis sativa
tccagtagggggtctgtcccttctggtttggaagctattttgttagctgatttgctttaatgaaagttgcaatctttgtttcaaaaaaaataatataatgtcttttaacaattcgtgaattagtatggccgccttattatatagcagcctataaatagggtatcactttaatccaaattttggtttccaagccatatattacactctcgaaattctaagaatctccattgctataaattcactaaaaactctaatgtaataattgatggtcttttttttcttttatctccaatattatttaatttattcttcaatctctataatcatataattaattggaattcgatcacctaacatcaatagttaaataataaaaagttcaaaaaaaaaatatctatttatttaattatgaaacaccatcttcaatttaaattaaattaaattaatcaaacactcaaatgcttcatatgtgaatgaggaactcagtagatcatagatccaaagttcaacatttgccacaatattggttttcaatgtctttgtctgtaattagttaaagctttgttaagaaaagaatcttaaatgataattttgaggttctatgtaaaggagtgagattttcaatttgtcattattattggactattccacttggttgaaagaagtagccaatgtgcttacaatttcaatccatttgaaaaagatctcgtcattcccaatctctcccatttacactagttgtatatcttaagtaaagaatctaaatttggcccctaaatggaaaataagagcttcaatttcgtagttttacaaaatactgtcacatttacacgtttcattactctaatatatagcctcaggcacatcatatgtcaacaaagctgctcttttcataatcaggaccagttgttgattagactttccaaagagatctctctattcgttgaaagtaacagacaagacaaagcttgtggaatggcatctatttgtttttccatcttatttttcctctgttatagttttttctagtccaaaaataaatgggagaaagtgttttctgtacctcattaaattaaaaattgttttgttaaagttgttgatatcatggtgttaatgatattgtcttttttcattattatcattaaaaattgagttttataaacatatataaataaataaataataatggtgattttaacaaataataggggaaaaaaaagcaagatagaaataaatagagttgtccacaaaatccagaacattgggtaagagttagctagagaaatatatttttttagaaaaatgattattcatattaatgaaatataagaggagcatcatcacatgggaatgccaatcatgaaaagatgtgaatgagacaatggcagaggatttggtggagccacataaatgcataactcatttgtctatcccacaacaaccccttctctcttctcttttttaaaatcttatataaacaaaaaggcctagctcccaccagatacatacatacaccattcttttaatatcttctctttgcatttctgtctaccaaaatgtagaatttggccttcatttttatatacaatatatatatatttatcttttttcattagaatattctgagctaaagaatgacagtctggaactttcttgcgttttttagtgtcttacacccacctgtgtattatcaattaccccattataagaagaagagagcatgtggaatttatatttattgatttgttagaatcatatgtaatctaatatgatctcttgtaaacacatgcttatttataagcctagctggttgctcaacttgttttccaataaaattggttaaacaaaggaagcaatcctataatatcattgaaagcccaactttttttaagctacatatccaataaccctactggacttgggtttccattttagaggcctaaatatttaacatgtccattaaagggtttgacctacaaagcaagggggaagaaaaggaaaagatgatgaaaaaatttagaactgctgattgttaatattatttttgctgattctcctattatttcgtcaccttaaaaagtcaactttttgtttaggcagtgatgccagataaggttgataacagccaccgaagttggtcctttacaaattaacatggcaaaaacgtttatgtactgtcttttaaacatgtgaattcttccaagttccaactgatgaatagaataccatctagtttatttgaattaagttttaattcgccatatcaattgggaataatgattattcttatcattattttatatgtccgtgtatatttactcgagttatgtgtgaattgtacatgtaagtgtaggtagtgcttcatgtgaacattgtttcacatgaaataaatagtaaagtcatatataagaacattacctactccactaatcaccaattaattttgagatagaatctcataattctcaacatgtatcagagtcatatctcttgcggacatatgaatactactccagtcatcatttaacattggttttttttaagttgaaagattgctcaggaagaaagttttacacattcttcattacaagttacagtctctgaggttccatttctatccaaaaaggctagctcaaaatgttagtagttctgtatttttagattattgtagagttaagagatacttatgattttgaaaggaaaaaattattagttcttgggcaacaacctttgaccttcaattattctgaatttcataggtaaaccagtagatgattgtattagactatagaaatgtaatagaacccctacaaatgaagggcactaagaatgcaaaagattttttttactctacatgtacatataatttgcagaaaatgaaagtacagcaaaacaaattctatatgaatgagctgtgacaaaaggtttcggtaataaaaagaaaccttttgttgtcattccatccatatcaagccacaatattagttctgactttttatgtttcagctacagaaatctaagtcttattggtgtcttgaagaactgcaacaatccagccataatgaaaatcctggctttatcacaagctatctcacaaaacttgcctggaatggaaggcaattgctcaacgtcatctttcgacgctagggagcaaggtgtagcagccttgtgaaacccagagaagcaccaaaactctcctcatattgggagtttctttacagagcctaattggtataattatggtcctttagaaattcttatgaagcaagatagcatgaaatagcttcctcacaacacacacagtaatctgagttatctgtcataataggtcaaaaaataaatacataagaaataagtagcatgatttcaaacgaattaacttttgcaccccagtatcaacactgcacaacacatcaagatccaaaaggttcagtattatcagtggtttcttagtttataaataaaataaacttaagagaaggtagagcctcattgcaaacctccatgaaatacagcaaaatgatcaaatgtctcttttaagaaaactaatcaatttgtgtgcaaaacatgatgaagatgaagatgatggtttttagtggaaatgtaggacaaaagagtttagttttccaaacaagaagtagtttgggacatggcctttcttgatgcagtacaagacaaaccatactgtgctagtttacaaccaataaatcctaatccacaaacaaaataacacaaataatgtcatacatagctcttcataacaaatttatacatatatattatgaattaaggttttatttaatctcattctttgatctgtctaactcttttttttttctaatatgtaatgaccaaattaattcagctataatatgcatgtgcctctctcttaattaataatactaattaagtagtaaagtatgtataacagcaaaataaaagaattttgtcatggaaatggaacataagatcaaaggaagtgtgcattgaactatttcagttgcaattatttttttaatttcttactgttttatttctcccacctagttttacacactttgcactacaaagagattatatatttctctctttcaaaaattaccaaatagaaaaagatataagaaagtgagaaaatttcaaataaaaaggagccatggtaatgacaagaatctcaaatttcaaaactgtgatgagaatgaagcataatccagatgaaaaaaattagaaattcttcttgcacactcttttacttttgaaaggtgagtttcttcttttgttattataatgtttatatttatgataatttaaagttatctttttaagtttgacaacaaaatagagtaaacaattactaatattatctcatgaggatcactcaaaatagaagacaaaagaatgaagtataattcacaaactgtgatattctctactaacccaactactctattctgaatatattccttacaatttttcatttttaataataattctcatgactcaatatataaagtgattcttgttttatctttttctgtacttatatttatagtgaaggtgattctctataaatatatatccattacaaaacccagagttagaagctttagagaaattccatagagacagaaaatccacttgggagactatccaataacttaatataatcactagctactatagataattattgtagctgccattaaattctcacacctaactaactagcttattgtaattacagcttgatgtttgtattttgtgtaagctatactataatggagttctttaaatagaagaaaatc

SEQ ID NO: 43438 - DNA, 2836 bp, Cannabis sativa
tggatccccgccctagacccaaatccctacccagactctgattccatcctggaccccagaccatgacctcgccccggaattggacttgaacccgacttaaatgaaatcaacaaatgaaaataaaaataaaatttacaaaacacacttttattttttgtctttaaaattaaaaaacaaaagtagttataaaatatatttataaacaaaaaatttacttttcctgattaaatttttttaaaataaatgttacaaatgcaacctaaaattttagtgagactacacattatgaataatttacaaattaatcccaaacccaaaagtttctgctccacaaatttgccgtgttagttgtttagtgaatagacaaggtcataacattcaagacatgaggaccactctcatttgttgtaacaactaattaaaagctttaattagttttattacttttatacccgacaatcatgaattggaggccactatctcaccacaaggactggattactgcagactcactcttttaacatcgcttctcaacattagatttcttcattattgagtttctttctagctttcaaaactcatcaagtacatacaattgaagcaaaactcatgaaatcatgtatatctcaacacaaacactggaattgatgggatatgaatgaaagaacaaaaatatgaaaccccatttctttcttttcttttgggaaaactttatgctaagaatatacacaagacaccatcactcttttccagcaatattttacgacatatatatagctttgttggaaggatactatatattacacgaatttataataagatcctccacttcgttgaaatcacctcaatcattccgtgtctttgcctctgcatttgcctataaacccccagcatccacctcttccatgcctgcatttacatcatcatcatcaagatagcagttaggactagaaagtgagtaaataaataatacagtatatcacatgctcgcagctttataaattcgactttttttcctttttcacgaagaacaactagaacatgaattagatttaaagtcgtctgttaatttcgaatcaatttctaatagtttaccacaaacatttattgtcgtctcaaagttgtggtgctttactagatgactttgaaagttcacctactttgccacgacatttcccatttcatatcaattgttcactgtctttcttaaatcaattatctaagcaacttctcaccaattttataactctttgttttttcttcatcctctttcggttatacaaatctctgtcccttttacctaacaacttcaccaactaaaatacaacggaaaatttatatgccagatattttatctctcgttggttaaaagaagactttactatttttccttttctgggaggaagaattgagaattacaacaaattaatgacgaaaccaaatttatataaaaaaaccatttaaattaaatattatttatatatcaattaatgatggaaacgaaagtgcaaaaaaaaggttagatctaatgaataaaatttaccataaaaaaataaaatttatgcttatgtagaatttaagaataaattacaaagtaacatacctgatgctgctgctgttcctactgctgcaactgctacttctgctgccagaactgcttttcatgctaccactgttaagactcgattggtcaccactttcactctctccagacacagaattcctcttcttccaccactctttgtccacaccactattattacaactactgttactaattccagccttagatccatcagaaacaaaaggttttggagaaactttggaactgttattaaccgaaattgactgatcatttctgttagtgaccattgttttcttcttcttcttagttccaaaagagacgggaaaaaccatctttaaaagaagcccttcattttccattgttccacttcttctgatctcttttcccttattcccaaaatcactgttccttttcttctgactatcgttcctacttatatttgcatccttgtcttcgtttcgccgagcttcggccactaccggctgctctacaagatctcttaaggaaagttcgtaacatgactcgggcatgttctgaaccatctccatcatctccttctgacctctgacgatggcttgggtacgagacgccggcgatagactccggtaatgggctcgctggtgatttgggcttctgggtgggctccaaagacggggtgaaatgaccccagaatcatgatctccatggtttccggttggattcggagcagagcaagcatagttcatcctttcccacctgtcatgtccctgatcagttcttgacccaatcccttcgtggaaacgaaaaggatgttcttgttgtggttttagtccaggagcaagcatgttgaggttgttgttttccgggaaagagttgaggtaaagaaagtggatgagaaaataattgtttgaagcaggtagttgttatggcaatatcttcaccgacccttgggtttttctttttttttttttagctattttaatatttatatatattattgtttctagcttctatctaatttttttttttttttgaatgaagcttctatctaatttttattagtaactagtatttaatgaggttttattatctcataaagtcaaggattctagatgggattgagatagaggtaggcccactccactcaattttcttatacgtgtatgtgtctttagaggagcttaagcttttgtaatttatgtggaccaaaagagactgcctaatgtttcttctttgtcattttattgacttttgatcccaaagtatcaaata

SEQ ID NO: 43439 - DNA, 2108 bp, Cannabis sativa
  modified_base (978)..(987): a, c, t, g, unknown or other
  modified_base (1209)..(1242): a, c, t, g, unknown or other
ggaacacttaatcaaggtctatataacctttcttttccttctttaggctcatggaattttccttctccctcagttcacttagccttaaataaaagtgatgtatctttcaattcaaatcaattttgtaatgtttctacctatcatattagttataaactatgtaaggagtccactcgaatttctgcattgtggcacaatggacttggacatccatctcatgtaattataaataaaattttacattccctgaataaaaaatattcaaaatctaatctatccatttatgacgcatgtcaacatggtaaaaatcatttaatgtatttttcaagtgttcctctaaaaacaacagaatgtctttagctcattcactttgatgtttgggaaccctcgccatatcttacacttgaaggttataagtattacatcttgtttgtagatgatttcaccaaatacagctggatttaccctatgaaaactaaaacaaaagttgtccctgtctttctaaccttcaaaacatttgttgagaatcaatttaacattaaaattaaaggtatgaaaactgattggcgaggagagtatagaaaattacaaccaatcttacaaaaattaagtattctatttagacagccatgcacacatactcatccacaataaggaatatagaaaggaaacaaagacatgtcacatatagtggtttaagtatgctagcttaagccaaaatacctcttaagttttggtgggatgcttttgtttcagctatttttcttactgataggcttcccacaataatgaatcattacaaatcaccatgtatgcttcccatgtttgaattaaaattgagatactaatacaagttcttctcttctaaatcagatagattaatatctgaaagaggttgacaataagttctttcaaaattgacaattcgtccccctgtaagaagtattctagaaatgtttgcgatcgagtaaatagctnnnnnnnnnnatggatcagatcgaattggaaaatagaaagatttttacaagttttaacttttgtcaccattttgtgaaaaattgtaaggtatgaatatgttagacacctttaactcgattggtaaaatagtatctctttccaaaaaaaacatatttttttaccgttgtggaaagaaaatattttgttgcaaacgaacaaggtattgcggaattgtccatacataaaatcatnnnnnnnnnnnnnnnnnnnnnnnnnnnnnnnnnnaaatcctttgttacaatagaagcaaaagtgatgtgtattattgagaaatttaagtctattttctttataaaaagaagatatcaatgagtttttatgaaatggtttcacaagattcaaccaattgtcttgatcgtgggatatcattgagaaataagaattcgtgttatcaaaagatttcctacaattatttctacgatggaatgagtcaatcatcctctttggtatcttattaaaaaaaatggtgatattgttcctccattgatcaagaattttgattttaggaagtataatgatcattcaataagaagggtttccatttttaaatgaatgatttgaagacatattgattctaacaactgatggtagagtggatcattccgacctttcccagacctatgaatggggatattcccgaaactcacaaagaaaaaggaagtgagttagacaaaaagaaaggaaacttggaccaaaaaagaagtaacttgaacaaaaagaaagaaagtgacttagataaatcttttttgtcgataacctcagactaataaattgaatattgattaatacgtaatctgttacaccctaactagcataggcgtgttagcgtgattttaaatgtactgtgcagctcgttgctaatcaatgaggttattgaaaaatcgagaataattaaaatttacttatttaattagaaacttaaaatattacatatataaaattctgggatcccgtttacaaaatactttttaaaagtttgctatacacataaacaaaaatttttcgcccaccgactatacaacaaaagcctagatgtcccaaagatcgtactctccaggcctaaccacctcgacatgtacaatcttcatctg

SEQ ID NO: 43440 - DNA, 2823 bp, Cannabis sativa
  modified_base (27)..(30): a, c, t, g, unknown or other
ttttttcaagtgtaactctatttagtnnnnacctctcaattagaatattattttcttagtcccaagtatattcttggatagaggttctacttgtatatgcttcaaagttcaaactccaaatagtatggtgtgaatctaattatctccaatgtcaaaaagattatctaaaaatattagagcatgtttgatattattttttatttttttttaattgtattttcagaaatgagaacaattttttaatgagaacaatttttttttttttaaaaaaaaaaattcaaaatacaagtcgcgttcagttaatgttttctaaaaatattcttcatttttatttttttttaaaaaaaaatacttcaatactttaagacaccgatatgaacaaaacttgacctcgatctagaccccgacccgagactctgacctggacccgtaatctcaaaatcagacctcagacctaaacccaaccttgatgagagagaaaatggtgagagagaaagtgatgaaagagaaagtggggagagagaaagtgatggtagagaaaatattgtgagaaaatgatgagaaatataatgtgagataaagtggagaaataatattgacaaaaagtgaattattttttaaaaggttaattaggatttttacctcccgaactttgacatgtaccaaatcatgctccctgaatttttaaagtcgttaaaaatttctcttgaactattgagattgtttgatttaaaaacttttgcccaattttattaagaaaagtctaatatgtttgaaagttcacagagcataatttgatacctgtcaaagttcgataggtatgatttagaaggtatcgaaatttggggagtatagtacataaattagacaaaaatccttaaatccaataatctcaataattaagggagaatttttagggaacatgatttggtacatgctaaaatttaagggacaaaaattcttagtaaccgttttaaaataataaaaaaaaaaacaatattttattattctcaaaattcttatttttcgtaattttattttttgaaatatgttttcaaaaaaatagccaaacatgtttaattgttctcaaaaaatagttttttatttttaaaaataaaaaccatttttttaattatgataccaatatgcacttagtgtgttgcgtctcttttttgagttgaaaaaaaaaatatttttagtaatgtgacaagctaaattattacttattttttagttgcaaacaacatacttgactaaaaatttatgagaaactttttttttgtcatgagtaattatattgcctcctatcctaacctaattatctagtacactcactttttattttcatttatgctgacaattcaagctttttacaacaccaaataaattagactaaagttttggatcaattatactttttttttttttaagaaaattaaattcttttggatcaattattcaaagatcacaatatacatatattattttgacaaagacattccaacactatgtggacaaaacaagttgaattaataaagcattatatttatatttatgtcattatccatattttcctagttcataacttatcttagaatgaatcccactttaaaatatatagtcctctaaaatatattaaaaatatttccaatgatgaattatcaccaaagacaaacatgtgtgtagaagatttcaaattcatttgtaggtattcaaactagctaagatgacctagctagttagacaagtaaagtctaattcatgatccacacctttttcactttattatgcctacatgatcttcttcactccttttgttgaaagttttgtgttcccacacaaaaagattatatatacttctacatgtttgaattgtttattgaattcatattcgggtagttattattcgttaaaataaaaataaattgtcgctttcgtaagaatccttaaaatttaactgaaattttgtctctctttgtattgtcactataaaaaaaatattatctttagtgataagctagtttttagtcataacataaattttttgtcactaaaggtgatttttagtcacaacaaaaagttacgtgtgactaaaacatagtatttagatacaagttgtcattatttacttttagtcacaacaagtattgtgactaaaaatatatttagtcataataaattataatttttacgactaatacctttagtcacggactttttaatcacaacataagtattattatttataattagtcacaactttttcgaaactccttaatttggttctttggaagttccatcaacaaaactgataagatcttgtgcttcaataaacgatattatcttaagtttccatagtaggtagttcgtctgtgtcaattttatggataataaatttgcgatggactcactaagtggctgaggagaacaggacaagcgccaaagagaaaacatgtcaatgtcacaaggtattcagaccacacttcacacaaaccaactgaacgttttcccacttttataaaagttaaatttcttgtaaaaaaaatttaaaatttaacacaattatgtacaaagaaaaaataaattaatgataattaagaatctaaataaattgacaaaaaaatttattaaatagttaattaagtgaaaccatacattcataataattacgctcgtgtaaatttaaaattatgattaaatacttaagtgaaattatttgcattacttaggtgtcgtttggtaataattttgttttttaattttttaatcacaaaatgaaagtaaaacttttgtttttaaaaaaattatttttgaaaaacaaaa

SEQ ID NO: 43441 - DNA, 2277 bp, Cannabis sativa
gataaaccattttgtgatcactattagtattttattctcttttgacgaaaagatttcattagtttatcttaccatgtaatttaacgatgcattatttgctcaccaaattggtgaggatcatcaatcaatatattatattgtgtttcataattttaatatgtattttaaaataacaaaaaacaaacaaacttcttaatgaacttttacttctggacaactgaattataaattaattgttagtgaaattaaatctgcatgactcccgtgatgccaactacgaaagatcaaatattttttgactagtttcttagatggcatccagggagccaggcagagattattcttcgttcccttcccttaattggtaaatatgtactctttttggatccataaaatgtaaaatctcattactcatcaatatacaaatatatatatgatgttacattataatgcaataagcaatcatgacaagcaataatttaatttgatgatcaatgtatatctaattaattaattactctaacaaccaagagggtccggagagataatatgatatgacatattcatatttcacaatcaaattagatatacgttcattaaagcagtatggtctttctacgtgtaagaaggatcatgtacgcgttccaaacgttctctcaacttttaaagtaatataaagaaaaaaggttactttgcaaaagttcttagctaaaaaatcaactaattataattttagtttctatgaaaatttgtttttctttctctttttcaaagttattacacttttttttaaagaaaacgacaaaaaatatcaatatcaattcctatcttatgccgttaacaacgtttataaaaacaacaattttttttatttttattctttttttttttttgaaacagttttttttccttttctaataatgaagcattgaaaatatttacaactctagaagataagtatgaactacaattatttgtatagcatatatcattttccaactaatgtaacaaagcatatgtatcagtttcagcaaaaaaactaatgtaattaacaaaaacaaaaatgtatgcttgacaataattgtcgcccaattagatcacttaccattattaatgaggcaattaaaacccatgaaaatgatgtaagagagatgcaatactatattttgtgaaaggaggaattaagttcaacaaaagtggctcctctttctttataatatgctcctgtgtagagaaagagaaagattaaaattccaaagtaagaaatgatcaacgcagtaaagtacagtgtggaaatttataggaaattgagtgatgatttttaactttaggcaaagacagcacaaaatccagccggagaatttgtgatgagatgggactttgtagagacggctgataaattttttctcttattttttttccaatctttttgccacttaccatatcatttcctgctaataataattttagattttgaaggcaaagatgtataaaaacatgtcaatagctgtggctttttatatataataaataatgaaaaaaaaagaacaaactgtgagacgagaaacaatactgtacattagatgtgtgtgtgttgtgtgtccatatatctgataagttggcagctaagcaattttgtgggattattagtttggctgtttcgtgcattggaaaaggcgaccccctatgtgccaaagccactgcataagacaaacttacagccttggattgggtggttcttccggattgtttcatggccgtttttgggctttaattaaatatagatttcaaatataacataaatataatattatacacattgatgcactttggcttggctttctgtttataatataaactgctcctctctaatctccagatatatatatattattcattttgagaaatactgaaaaaggtgtttagctaatgcaccttaattaaatattttatctcgtataatttaatataataatttttataaaatattactagttacaaaatgttacctctaacaagtattaaataccactagtatctaatagctagccatgcttatatattttaacttcatgacaatttatataaatttaaactcatgttaggaatacactacattgaaactaaatgtataacttataaaaatgttaagcaggtgtcaaatgctaaaaaaaaaatgacattttgttattgatatattttaatattaaatcccacatattttaatttaacaaataatatctaaattcgttaattttaagtcaaatagcaatactt

SEQ ID NO: 43442 - DNA, 1899 bp, Cannabis sativa
aaatattatttcaacggtttagattatgccacgtttcgttttaccctcacattattgaaagtcaacatcattggataacaactttcttaaatttttcatatgattaaacggcacggattgttttagatgatctaacctaaccaaccacgtgtaaggtgattaaaacaaacccatgagattttttttaaaaaaaaaaaaaatctctcgtgaattagtatcaatttctcgtaataacgaatcatccggaaagtaaaggctaaaatttatttatcgagagaatatcgcgatattttcattatatctccttcgtcttccccaattaacaccctatataaagaaaataagtcaccattgttaaatcgctcaaaaccagtaacccttttattttcttctctcattaccagaaacttcggaaagaagatttcttttctctaattctactcaacaatggcgtctaagaaatcattagcccagcgtctctttaacatttacaaattctcttccaaaagcgtaaccagttgccggatatcttcatccactgctcaaaatcgcattccccgtagtcctaatcgttctaatctcgctcctgatccaggagacaatgccatcttcagtcgctttattcacaagagggctatgcaggatgcgatgtctcccgagctacgctcagtaccaatgggaggtaacctgattgagaaacttaaggaaattggaatcggccgggaccggattcgcttggacggtcttactccacctccggccacggaaacttcgtcgtcggagaggccagggcttacgattgctgatacgaaaaagttacttcgggttacccaactagaggctgttaaatcgaagctgagagaaattcctcagagcagtatctcttacacggaatttgtacggatctgcgaggagacttgttctgattcagagcaaggacgacaatttgctaaaatgctagatgagagtggaaacgtcgtcgttttcgggaacgttgttcttctccgaccagaacaggtaaaattacattctaacataataaataaaattgataattaattagtttgtattatttttgttcttgttgtgtgtttgaattttttggtgatttcagattcagattgtcatggtcctgaaaggtttaaattcttttcaggagattcattcattcatgcacttcgcgtagtgtttttgattgttttagttcttttttttcaattttggggatctgataaatttttataatgatttattttcttttcaacaggaaaatgaatgaaactttgttgtttcgccagatctaaacacgtttgttgggagaacaaatataaaccctttcggtttcaacaatggctcaagaattttcaccatttttgttttcctccgcctttatggccccataccagtcctctcaaaaaaaatttatttaaattgaggacttgacagaaaattaatgagtcgtgtagaaacatgataacttttacatttggtcccccaaaaaaataaaagaaaaaaagaaaaaaatagagagaatcaactagttgaaaaaggaattatactttttcttcggtgagaacataattatgatcataaaagttcttttggaagaggattctcaactaggagaaaaaacagttttttaaatgaaaaattagaagaacaaaaaattagagtttttcttgaaactaaattagaggttttgtttggtttagttttgtttggtttattatttattttttcaaaaaaaatatatatacataactaccatgctattgtgaattatggataggcattagctagatttctctacctattatcactaaattagcaattagttacttattatgaatttgctgatgataataagtttgttaagagagtctaaataatggactttta

SEQ ID NO: 43443 - DNA, 1999 bp, Cannabis sativa
gtgaaagtgaagaagatgataatagtaagtttgtggtgtattcaaaccaatccttcaaatcgaccagctatgagtcgagttattgaaatgttggaagggagtgttgattgtttggaaattccacccaaaccattcttgtattcacctccaagatcaccacccctagaatcttctcaaacatttgtataattgtaaatatttgtatccacctcatggatctcatcactcatatatattgtaatgcattatataagcaagccatttgtgatcattatcatatcaccttcttgagttaaaagacaggaaagttgaaaatcattcttgaattaattatccacacttgtcactctataattaattaacagtttttcatattcaatattgaaatgacaaataagttacctagaattttccctataatcacatcacatctctcaatcaagagactattagaaatagttctatatttacaaaaataatacagtatataagataatgatgaactattcttctcagagacaattaactttgcgatggaacatgcattttacactttttaaattctaacacggtattagaacaattaaaagcatcaattgtcttcgcctttaacctctatttatttcggcatatgtgtaccattttctaatattgtagtctttgacttattttgaaaaaatccataaattttcggacatgtacactcacaaattctaccaatttagcctgtgtattagaaatagtcccacattattaatatgtagaaaaataatattatatataagatgaatgaattactcatttcattgtcaattaatttttacatgaaactcatacaccttatcataaattcaaacaaaaactcctataaaaaatatacttttaaaaaatacataaaatattttagtaatttttaaaaatatcacatattctcaataataatttatagtcacgaacattttagtcacaacataagaataacaatttataattagtcacaacgtttcacttttagtcacaaattttattgtgactagaggtaaaaaaaaattatagtgtgagtactcctgtagttacctaaatatatatatttggttaggttttcgtatatttttttaactttttgttaaattttttttttataagataatttttttgaaaaataaaagtaaattttttgcagagataatataaaaacataaaatttatagttttctcttatatatatgcctgtaaaataactttctgtcatattatgggacgaaatgttttaattctatttctaaattataacgaatgaatttaaaattagaactaattaaaggatcgtagattaaataaaagggactgaaatttaatttatatattgttgaaggacaaatgtctcaactctcaagcacaccaaatccccattagagtatataaattatattaatagggaaattaaagcatatatacctatacccaacaatatgaatattagcttttaatattaattaattaatcaaaaagttaatttttttaattaattaaagttaatgattcaaaggggttttgttaataattaatattatgtgacgtgtgctaagattagagacatgcatgcatgcacgtgtgtgtgaagcaaaccttgtaagaaagctatataccacaaaagccattcttttctttcttatgttatgttatgttatgattataatcattatgactttcttggctttcaagtttagaatttaattggtctcatatataaactactatcatccatattaattgtcttataattatttgacaaaataaattaaacacacacatatatatatatatataataatcatgtataataataacaataataataatgattcaatatcatctgattctgatattgatcatcatcttcatcgtgatcagattggtccccatacaaaaccagttaggttatatggtcgtggaaggtctcttcatgccacctttggaggaggaaaaggtattaatt

SEQ ID NO: 43444 - DNA, 1721 bp, Cannabis sativa
  modified_base (837)..(842): a, c, t, g, unknown or other
tgtaaagggttttatttagggcacaaaacccaacagtgccaagaggtcaccaaaggttggaaggttaaagcaaaagagccaatgattggcccatctacatccaattcatttcaagttttgaattctagtgctctcacagaagagaatatgacagaaataattgtagattcacaacagaaggaggaaatagagaagacagtaggaggagatcctcctcttttcaatggataaaatcatctgctagaacgtccgaggaatcaacagccaccaaaagcaaaacatggtcaagcaatttattgctaatcaaaaggctggtttggttggtctccttgagacgagagttaaggctccaaagcttgaagccttatacttgaatatgtttcgggttggtgttttactactaatttggcatggcataagagaggaagaattatcttggcttggaaccctaattagttcacagtaagtattcttagatgttcgagtcagtttatccacactctagtagcaacctttgatggtaaatatcaattacgtatatttaacagatacatattttgaaaagctatcataaaaagtcataacttacatttttaacagcttaataaaaaagattaaataatgtcatcgtcatcaaggcattttttatcttctaagattttaaaatctctagtttctcatcttaccttagaatatttcctaaacttaagagtagggatgagcatgaaattcagaaaattaaaaaaaccgttcaaaacgacctaatgaacactgttagaaccgaaatcggggaaagaaaaccaaaaaaaccactaacggttaaaaccgccattaaannnnnnttttttttggtaataaaccgaccaaaaaaattgaaactcaacgttatacatatattttcatttattaatttttttttttttttttgctttatgtatcataattattaataatatgtaataataatatattattattttattaatattaaagataaaaaaaaataaaacaattagtttttaaacaattaatttgtatggttataattgcagaatgataaataatgtgcttatagaataaattgaatcatattttaaagaaaacaaaattcagtttgagcaatttaaatcaaccaaaccgaagttcaaaacaatcaattttaagataagttatggattggccaattagttttcaaattgcactaatctagaccaaaaaccaaattctagatttttatatagtataaaactgaccaaaccgaccgatactcaaccttacttaagagaaggaagaaaggttgcaacctaatacgcatatttaacaaatacgtatttgaaaagctatcatgaaaagtcataacttcaatttttaatgcttacttaactatttccattaaacctaacatttgacacaacaaattctgttaagtataacaaaatgggttagatacacattacataatacgtaagatttatcaatagagagagggatttcattttgtttctttcttttttttcaaatttatacaacacaatcaatgttctcccatctcctccccccaccccaaccctccctttttttttactttccaggagagaacaattatcattatcaagcacagtacttgtgtcatggtttatgcagagatgatcatgccagccagcatgtaaaatggatgtaaaactacataacaaggaattaaaaaaaacatcatttgacag

SEQ ID NO: 43445 - DNA, 2895 bp, Cannabis sativa
aaaagtacatgttgtaaactcaagataacgcagggagtattgctagctaataagctacctggcatacccttttccagacactcaaacagactggtaaatatgggacttaactttcctttctttccaatttttgagttccattcattggaaacacatgaataaagataaaattcccaacctggaattcaatatttctacgctttggaccagcgtaggtcttttgtccaatctataaggtaaacatacgaacttgaatctttccaatggcttcactcgttccttggactaaatctggtcaaaggtacctctgttcaccggcttcatcccaatgaataggtgaacgatatttccttctgtaaagaattttgtacagtgccaccaatagtactcagataactattattgtatgaaaacttaattagagggaaatacttattccaagaaccctaaaaatctaataaacacgcccgtagcatatccttagatacataaatagttctcttaggctgaccatcaatctgagggaaaaaaaagggagatactgaactctaacttggtatccattgttcgttgcaaactctgccagcacttggatgtaaaatttaggtctcgatctgacacgattgactttgaagcaccatggagtcgaactatttccctaacatatagatcagcgtactggtaaaaagtgagcttcactttatatatcgatctacaattaccaagatagaatcatagaaccctattgttcttggtagtctaacaatgaagtccatggttatttcctctcacttccagttaataatcttcaaaatttgaagtaatcccgctggtctttgatgttctaccttgacttgctgacaatctaagcattttgacacatactttacaatgtcaccttttatacttgaccaccaatacaatgatttcacatcctgatacgtctaattgttactggatgaaaggaaaatggtatggaataagacttgtcttgagactccggcctaataccttcgtcaactggtacacaaacccttcctttatatcgtaatagtccatttgatgaaattgagaagtcctttggtgacccggcttcaaactcttcattgtactcttatagttctggattattttattgggttgtcttgattctttctaacaaattagattgtaaatataatattgactagttttccaactacgaactcgatctctgctcttgtcatatccttagcaaaattttgtgagatcctttttaatccatagactcgccctggacccttttcaacttagaaaatatgttaccacatttgcttttccaggaaggtaaaggatctcttagtcataatctttaatcagttccaacaatcgtcgctgccaattccatatcatgtgtaggataccattattcataatccttcaattgcctagatgcataggcaataattttcccatactgcatcaaaacacaacctgccccatgtttagaagcgtcacaatacatcacaaatttctcattagtgactagtaggttaacactggtgcaataattaggctttgtttaaattctagaaaactactttcgcacttgtcaatccaaataaacttacataaatttttttgacttaatttcgttaaggatgcaaagatcttggaaaatccttcaacaaacatcctgtactatccagctaatcctaggaaacttctaacttcagttacaaacttgggtcgaggccaatctcaaacagttccaatctttaccgaatccaccaagatacaatctttgttcaccacgtgccctaagaagcttatttggggtagccaaaactctcatttcttgaattagcgtaaagcttatactcccgaagatgttgcaacaccatccaaaatgtttctcatgtgtctccacttgaacactcagttccttaaatccgtgaatgttgtcgaaacatttgtcaattcgaaggatatcaccaggaattcatagtgtccataccgagtacaaaaagctatcttgggaatatcctcctctcgaattctcaattagtgataactgaatcgaagatcgatcttagagaaaacgatctttccttaaaattgatcaaacagatcatctatccttagtaagggatacttattctttatcgtcaatttgtttaactctcgatagttaatacacatacgtgaggttctatccttcttctttacaagaaaaactagtacacccctaatgtgaggtacttggtgtaaaaaaatctcaagtcccacatcccctgtaactaaacctttaattctttgagctctataggtgctactcaatacggagctttagatacaggctttaccccctgtaccagatcaattcaaaataaattttttgctttggtggtaacccaggtaactcctttggaaaaacatctagaactctcgaactactgtaacgtgttccggtcccattggtttttctttcgtaatatccactacacttgctaggaaactgacacatccatcctaaaaaaaatctcttaccttatgcgtcgagattaatggaattcgagatccttgaaccttgcccacgaacacgaaagggtcctatccttctggttcaaaagttaccatctttctcttacaatcgatggttacataatacttttcaagccagtccattcccagtataacatcaaaatcctttgagttcagttcaattaaatcaactaagaattcccttccctcaacaaacactagaagggacctgacccacctgctggagataacaaattctctagtaggcagtaacgtaccaaaagctcttggtaaagcatctctaggtttaagcatattttcaatcgctatactcgacacatatgaattcattacaccagagtcaattaaaaa

SEQ ID NO: 43446 - DNA, 4803 bp, Cannabis sativa
ccgatctgctcaatttttctgcttcaaggatatcctgagatcgaaccatctctgctatcagatttaacccctcggctgaacgaacttcatcgttgtcctctgtttcttcctctctatcagtgaaaatttcttcaataggaacacgagtgacgggttttctttctacttttttcttcctcgccatggaaggagaaagaagagggaacgaaaactatatttccattatcttcttttcacatttttgttgaaaatggtaaaatgtgtgactatgaaagatgagggtacctagatttagctcggcagtacttaatcttttttacataaatatatggttctaataccagggtatagcagcagcagcaaagtactttacattttggccaaaaatataccctgttattttcttcaaattttaaagaatatcattgtaggccccttattagaatcaatgaattattcaatctcacctcaccaccacacacatctactcaatcccaaagtcaatctaatctcataacgggcatagttcttcttcatttattttgggggaccagacttgctgctactttttctttttctatacttttgctaattttgctctttttggcaataattttatcattttcataagcattaaaatacatgttaatgcgtttatagcctttgaaggatgtgattgaatccaaaattgaatccaaagctcccccagttgttgaacattattttcaggctatcctcagaattggggagaattgagttctgtcaccttaaataaatttggtacgaggaagatgcccgagaaattaaaaggactaataacataactagttgaaacatcagattctaatctggtttgaaagacaaatctcaaagtagtactaaacaacagtcagcatcaaattaccctatccaaatagcttagatactaaaagttcaaagacaaacctgaaaaccaaacgaaaaaataagggggcgaaatataacaagaaattcctcatagttttaaccatactggagttatagtaatatgatcagtccgcaggttgatcaacctcggcataggcagtatcaagttgggcttgctcggcttcctgcacctccttctcggtcttcctacccttctttgacttgtagtacacactcatgaaggttccaacggctccatacttcctcctgcagtgctcgtagaggccagcatcaaacatcctccagaagtttttctcatcaagctcagacactgcatactgtggctggaatccgtgattctcgatcaaccatttctccatcctacgaacggcctctatcccatcaaaaacctcaccccttaaaacaggtcctggggagtagtataccccaacatcagtgtacatttgtgcatactgtgtgtctccctgcctgcggtgtagctcaaagcctggttcggggtacaccatagttttcattggcagcttgtacagtctatgagggcaaagccagatagggtatacctatagacatgacaataaccataaatcatgtcagtgttaaaaacagagatcctacatatgttgaactacatagcaatcacaaacaaaaggattaaaaggtgttacctccatctcgcgatcaacccactctagagcatctccgaccttgtacaaaggcacaagcatatcctgaataacatgcatctcgtgataatagtttctaatggcttcaccttgagtagcctttagcaaagaaaccttgggaggcatcaaccagccaaaaagaaacctaaaccaccattgatctccgaaaggaagaataagctttccctcccaatacaaacacctagtgtgtctgtggtaatactctcttgttggaatatactcaacaaattctcctttctttagtgccttctgggcatgctggtagaaccatggtttaaaccaccatccaacattgttgatcacatttcctttcttcttggcctcttctttcgatgcatatacacctgtcatgcaaacaccctctgttggagaataaatcatggtctcaacaaaatctggaaccttgtcggggttatcctgatcaccgtctcttggtgcaaaagaatccacatatccctgtgccagatcttgaatgttgccaatcacaggtttgtatgtcaacttcatgtattctttgatggggataagtttgatttctgcagacacaagaagtcctagtgttccctgtgaccatggaatagcatagaaaagatcagagtactcattatcctttgtagctctaacaacactgccatcagctagaacaatctcataagccacaacagtgtcggagaagaggccataaatgtgagagcttccttcaatcccatagccattaatgaggccaccaactgtaaggtcatcaagctcagcaaccacagcaagggaaagattcatgggaactgtcaccctagaaatctgtcccatgttaactaatggctcaacttttgcaatcatcctatccctgtcaatttcaaggacattacgaaaagcagacaaatcaacctcaaagtgtcgagcacgtttgtagtcaacatttcgcatcccaacagcaatccagggtttacgtgctgtgcagacaagaccatcctttgatggattcctctgtttgagacgctttacaactttctggacattttcatcatgttccttctggcgctgcttgtaggacttcctctctgatttaacatctcccagatacgtcaagaagtaaagagtgcaggagattgggaggacaataaatataacaataatccaacggaattgaacaaaatagtccacccaaatcttcttcctcttcggacgcaagggggcctcaaggtccgacatattgagagaactaaagcttccctagctgcaatggagacaacaaaaaaatgcaatcaattggctgatctaaaagagctataaaaagtcccacttgatccaatatcaaacacatgtgtgtatgtcaagactaacaaacaggttgaacatcatacagcttaagtattagctaaacattttcaaattgacaaagtactgtgataatattttctattttatttccgcaagttaatacaagcacaaaaactaaaaaataaaatccagtaagttctgcaacttatataaatgagacaaatctaactacaaaataataaatgctagtgaaccctcactttacttttagcaactgcaacctaaaacaaagaaacgaatttaccaagtaatgccagacaacattacttatcaagttcttgtaagaaaaacaacactattaacatagattccaacatatcaatatcaatcaatacaaaatacatttgcatagaatgccagtttccttttagcaactgcaacctcaaaccaagaaaagaatttaccaagtgaattagcaaattctagtaagaaaaacaacacttttaacagagatttcaacagatcaatatcatcaatacaaaatacatttgcatagaatgcatgatatccatgtagagttcccatatgccttgagcaactagatccgtccaacacagaaaaaaaaatacataatacgtaaggccattgacaggtgaagaatttccatacacatacatatatgtatgtgttcatgtgtttgttccccaaccactaaaaatcacaatgattaaaaatacaatatttactatacagctacttactcaactaagacccaaaaagattccaaaatcgcaatcaaggatctaatcatagataaattcccagaaagagcatagtaatactaatatggcatcagcctacaagaaatccaaaataaaaataaaatctttccaagaaaaccaatccactttcagaggaaggaaaacccatacagatctaaataatttgagcagaactactcatgactaaacccacaaaaagcacaatttctcacaaaagggtatcaaagaattccaactacagccataaaggcagctttaaataatatcattctttttaaaaaaaaaaaataaataagtatataacactaaaagcaggagaaaatcgaagtgaaagtaaatcgacagagaagacatttctcaagagtaatccttcaaagatctagttgacaacaccgaagtgaactcagttgctaaaatctgaaaggaaaacccaacaaaaatctgtttggataacaagaaaaaaaaaagtcccaagaaccaatatgagaacagtaaattaaaaaaaaaatgaaactacgaaatgcagacccatctccagattctacatatcgagatccacaacttagccacacaccaaaaaagaaaacgaagattttgactagtgtaattttaagaaaaaggacacaaaaaggacaacatatcaatgttgtctcagtcctatttattaattaattgaaaccaactcaaactcaacaacactgaaaaaacctttctcctttccttcattttctcactaaccaaacagcatggtacatggacactcagtacctctaagaaaaaaaaacagcaggagataatcagaaaataacagtatttcgtttaacgcacatcatattctcgggaaacaaacaaggaaaatggagataggggattaatgtgagaaaaagatgagagtgaaaacccagaagaatgaaaaggaataggtagagtgatagagtgagagaaagtacctgaatatgaggaacggtaaaatgagaaacgttgatgaagcatttaaagagaaagcaaaattcctacgtgtggacactcacaatggtttttctgtcatttcctcccatataaaaatggaaattttatttacaccccaaaaagttctaaaggcaccccatttt

SEQ ID NO: 43447 - DNA, 3465 bp, Cannabis sativa
  modified_base (314)..(316): a, c, t, g, unknown or other
  modified_base (398)..(411): a, c, t, g, unknown or other
cgaggtgattgttcaatagagtctagtacctcccggaactgccttaatatgtccttggcctccgaaagcgtgaagatccttctcatgcctcctccgggaggcaccttatccagctggtcctctcagctccacatgtcatccttatccaggtccacgcattttgggcaaaatcaagggcaacaaatctaatttgtaaagtgcggatatccgcacttgtgtggattggattgaaaaattcaaattctgcacttgtgcagattggatgttgattgacatgtaaaagtaaccgatctaatccacacatatttataaannnaaattaaaaaattatatatacaaacaacattttaatgtaagaaaattgtaatttaaaaatctaatacatataatacaattannnnnnnnnnnnnnatagatcaaatgtatattctatttttattaataatttttttacatacaatttaaaatgaaattaaacatttttttatacatacaatttttttttcttcttttgaatctattatttattattttatttattttattgtgttgttagagatataaaataactataatttattttattttgttagtaaaaaaaatattcataaatattaaataatttaatattaaaaagtaacaaattcaaaataatcgattcaatctgcacttttacggattggattagattggatttgagcttttgtgcggattggattggattcaaaaaataaaatctgcacttagcgcggatcggatgtactatgagaaaaatagtgccgattgaattggatgaacaccctaatacaataatgggtgcaaaagattttttcaacaaaattttgggaatgttgatttgagctgccatgaatcttacattgtcctcccatcttattcaggacaagataaaaaagaatcgttcagtaatattaaagaaaaaaaatatggaaattgttacatgcttagaatgataacttttttctattaggaggaaagaggtcctattgaaagttgcaatgcaattgatactgagatatgtcttgagttgcttccacttatcaaaaactttttgcaatcaactcaaattaattacgacaaatttttggtgggcttctaagaaagatgcctcaaagatttattggaagagatgaaatttgttatataaatcaaaattttaggagatatgggcttttgctcttttatccaattcaatcaggcgttactagggaaacaagagtggatattacttgagatgccaaattcattactgagttaactgttgaagcacaaatatttcttttttagaggctcaccttggacattccccttccttaacatgataaagtatctattcagactgagaatcttataaaaggtcttagatacaagattggaaatagcttcgaatgtgttgcgatattgatttgtggaacttggaatatgtgcatcgaattcataaatttaaacaaggcttatctaaaagattacttcccaattccctagatcgatcagatggtggtacgaacttttgagtttgatggatacttactccgactataattaaattaagacgcatttggcgaatcaataacacaccaatttctaatcggataaggggtttgcagctacattgtaatgtcatttgggttcaaaaatgtcaaagccacatatcaacgtctgataaacaaaatgtttaaatgttttttgagaaagaatatggaagtctatgtggatgatatgctggtcaaattaaagacttccaaggaacataatgatgatctggaacaagcttttttcatcatccggaagtatggaatgaagttgaaccccaaaaaatgcacctttggagtttcctcaggggaattcttgagattcattgtcacctttcgaggaatagaagccactttggagatgattcaagctcttctagatatgcattctccccaaaaacacaaagatgtttagagtctgactggatgaattgtagcgcttagcagatttatttcgaagtcaactgacaaatgtgtttcgttctttaatgttctagcgaaagcaacaagtttgaatggactcctgagtgtgaagacgccttctagaaactaaaagaacatttagcaaaagctgaaattttgtcaaaactggttgagggagaactgttttacatgtatttagccgtgtccaatcatgctatcaacgccgccttagtgcaaagaaaaggtacaacttctggtgtattacgtaagcaagagattcctgggcgtgaagtccaggtatccaataattgagaaactttcctattgcttactaatcgcttcatagaagttaagaccatactttcaagtccatgccatcacaaaccaccctccccgctgagggttacagaagtcggagtcctttggaagattattgaaatgggtcatggagctcagccgattcgacattctttaccaaccaagagtctccatcaagggccaagctctagcagacgtcattgtggaatatacgggagttaacgacaagctagaagagtaaagtccagacttgaagtctggaaggtttatgttgacagagcatcaaatgaaaaagtttctaaaactagaatcattttagtctctccgcagggacaccaacttcaaagtgctttctagtttgaattttcctctaacaataaagcacaacatgaaataatgattgcaggcttgcagttggccaaggaagttggagcccaaaattgatcttcacagtgattctcagttggtagtaaatcaaatatccagagaatatcaaaccaaaagtgaaaaatagttgtttacgtatccaaatctcaatcaaaatttaaaaaaaaaatatattgtcaagcaagtccctcgggacaaaaatgccttggcaaatatgttggcaaaactagcaatggacccagaaattgagcaatacggattagttcccatagctcaccttactgatccaatcacagaactgggggtaaatattattaatcattcaaccttcttgataggccccatacacaagtttttaagttctggggaacttccagacgatagggttgtcgctagaaagattcaaacttaatctaatgaaaaattaatttcatttatttcaaaattaattatgttactaattcaatattaattagattaaactaatataattagcctaatacaattatttaaataaagcaaatgagccttcatcattggggttgttcatgtgaaggagagctgggttcagtatgtcgtacccactactattaccccttaactctcacacaaggcccaaaagaaagaaatttaaccttagttgaacaattattattaattgaataagcccaatactaattgaacctaaataaaactatcaatgtgatattttatttttagcaacttagtccatttatatatttaaaaataaataggcttcttatatgcatctaagcccaatagcaaa

SEQ ID NO: 43448 - DNA, 1513 bp, Cannabis sativa
agcgaggaagcccgattacccacattaatcggtttcttttgcagatcaagcttgtgtgggactaaagctcaaagattcaatgacttgaggtatttcgacccaataggtgtatatgttcgtttattccgcatgttatatacacatacatatattttattttatacatataaatgtctagcaatcacacacaataataaactaatatatatacataaattcttaattaaaaatagtcatgtcgtatagtaaacatgcacgtataaatacaattttttacatataaattatataaacctatatatgtacatgttggcaattgcttgtacagattttacattttgattaacaccctttgagtcgtgtttttaaatttttaaatcatggaatactctgcacttggacacattactctgttttaattgaattattaatatatattattgatgttatatctactacactgcacaatattatctaaaaaaatttatacttaatttatttcatttgtaatataatattataaattatttttggataaaataatacagaatcatattttatttgagttacgtagaaagcattgactgggaccagacaatactgttagcaggtctattattatatatgtatgttaatgtaaatataaaatattataaaaactgaaacatatcactcattttgatggatgtgtttattattattgttattatttatttgaggaaactgatagctattattcgtattttccatgcatgtatataattatataattaaggagagagtgaaagagagagcttctactaactatattatttatggtggaccaagaaaacaaattgaactagagaaaaataaacattatatacaacgttcgtatacatttatactagtcattagtttaagtcacatcaattaattaaatttataaacagtgtaaattactaaaatgtatttgatttgattaattaattctagagtcgtttatttgtattattattaacaagaactttttgtttcggcagtctctttagaaaattagtatcctaataattatgttctataattttattcatagtaatacaaatataattaaaacagttataaataaatataaggatttttctttttttttccaaaaaaaaaaaaaaaaaaacttgtcctcgttaaaaactttaattgggagaaagagtacgaaaaaaatgtcgcatggaaccgttgcctcaagcattgcagcaatcttaggaactgggatatcatccacactccaagagcctacaatttcatagctcataatgttgccaaatgggcaaaaatcacgaatacttttgggaacattaatcctctggatctggggtcaccaattctggatgattatgtggagtggagtggagtcatgagaatagtttaagatagaatggtttctatgtttgtagttgtttgttctgtgttttgttgttgctttagatttctagttgttgttttgttggttcattgttttgtgtgggttggacca

SEQ ID NO: 43449 - DNA, 5649 bp, Cannabis sativa
  modified_base (916)..(932): a, c, t, g, unknown or other
  modified_base (5427)..(5448): a, c, t, g, unknown or other
ttttgttatttttatgtttttgtgaaataattccaagattgtcgattaaaatttgttataaattgaaatacaaaaagaaattaactattaattaatttgttattcaactgatcatctatgataattaattgctatggttgagtaataggacgaagaataaatgagaattacttattaatagatatttaattaatcgaatagataagatttacgcttttatcaaactgcccacatcgtacaaactgcttacagagtactatatcgcacaaaaactatagtttaaaatttattgcattgtggtttgtggtttgcatttttgtaaaactatgtggtgtggtgcggtttgtaattttacatttaataaatacagttcaaattgcaccgtactatgtatacaaactcaacaatttttacaatatatttttgttttgtatttttcatatgaacaatataatatattaaatttttatagtacataaattttttagagactatttaattaggggtggttctaagatttgtggagtctagatacaattaaattttgggacacttaaataaatagtttaattatgggtaaatactattttggatcctatattttgcaaaaattaccaattagaccatctgttttgttaaatgacaaaatagacccgctgttttgttaaatgataaaaataagaccatgagctcaattttcaataattttattttttaatataatcaactttaagacaatttctaacctgaacagatatagaaaatgaaactagttttgtcataacatctctagatcggattattattaagttttattttgacaaaaattaattcaggatcctatttgtacaattttagaaaatacatagtccattttatcatttaacaaaatagagggtccaattaataacttttnnnnnnnnnnnnnnnnnaaatggtatttaccctttaattattatcaaaataaaagttctagtgctttggtgtaatatcttaagagttttagtgttcaatcatttatagttacacattaaatatttttttaaaaaaaaatagaaaaatagagattaagaattgatccctaacctcttaacttaaaaaaaaaaattctctattactacaccaaacaatatttattatatttttttttattatttaatattttatttatatagtaataatttttaataacaattcgagatcatgagtgattagggtcggccctgcatttaatataatgagttatgacattaaattttaacaagatttttttagtattgataaaattttaataaattaaattttgaattattattttcatattttgataataataaggctaattaggatttttgtccctcgaactttgacatgtactaaatcatgtcccctgaactttgaagaccgttaaaattttactctaaactattgagattgttgaatttaaagacttttgtctaattttagtaagaaaagtctaacatagataaaagttcagggggcatgattctgggagcatgatttagttcataaacaatcaccgaattagtaaaattgaataaaattaaacaaaagtctttaaatttaacaatcttaatagttcaacgagaacttttaacgaaaaaaaaatttagggatataatttaataaatgtcaatattaaggcagtaaaaatcctaattacagtgataatagtgtaactgtaaaacacttaaatataccgtattttggtggtgtaatttttttgaaaaaaataataccaaaacccacagtcccaattcggaaaacaccaaacggtcattaattaatatcctctttccctccaaattgaagaaagtgaaactaaacaattgaacggttcatcaaaaacaatttcaggcagataatgttccggaagggcgaagagcctccgcatttggaatcttatcggggattagttcatgtggtttcgtctgtggaactctgtccactcggttcctttccacctcctcaactttccaggttttctttctttttaatccaccattctctttcattctgtttacccttcaaattattgtctgattattcctaatttcaggttgctgcgttggtttcgatagcggcggtggtttatatgagggtttttcttcctgatacgatcatagatgacaatctttccgtaccaattttgtcaaaggtaaagcttggtgtctctgaatcggaccaaggttcgagtaagaaagggaggtttctcaagtcattgccttcgcctaatggcatggttgctcttttgaagaccaggttagtgttagagtttaaacacgctcacgtatggtgatttttgataagagtttaacttagtataccgcgtaattagggcagaattaattgtgtgctttccgtgattttgcagccccacgcttttgcaggctgggattgttgcctttttcagcaacttggcggaagttggtctccatgcttcaatgatggtatgcactaatagaacagttcaggatttagtttgtttcttgtggggtcttttatttttattgtctttttggttaaggaagagttagattgacatttcaaagatttatttaaatgtcaatagaaaacgttgtgaacttttagtaaaagaaccttaactttgttacttctggtttgtgtatttggacatagttaaacctgatatttcttgttcccatattgttacttaattactcttttgtggtgtagtaatgaatctcacttgatcgtctctgatctcataaaaggaaagaactgattttattttttactattcagtacttcttaaaagccgaattccactataacaaggatcaatttgctgatctgatggtgatttccgggattgcagggactatctcgcaggtaattaccttatcttcataccacatatcttggcattcatttgtttcctttcttattatagcctgcataatttttttgacctaaaagttttaagtgacatgcagctccttctcatgcccatattggctcctcttctaggggaggagaggctgctttcaatagggctcctttttagcacttcacatgtaagcacaaatccttctgaatcatctcctagtgatagtattgcattgaattacacatgtgatattgttttaagacatttgtatcttctgtaatgtacttttgtgaaattcaatatgtaaagcaatgaaatttttccacttctaagtcgattatatctattttgttcttgaatgcagatgtttctttatggcgtagcatggtccttctgggtaattttttataccttaacttcataggttttcacattggtttcggtatttgatttgaccaattcgtactaacattataaatgctgggcaggttccctatgctgcagctatgttttccatcatttctgtgtttgcacaaccatgcgtgagtttcttttagtttatttatattttaggctgttttttagctgtctccaggaacccgtaagtgattcttttacaaaatgtgcagatgcgaagtattgtttccaaacaagttgggtcccgtgagcaggtagttttcttgttgagtgaattaataatttgtttgaaacacttctttttgacaatataatgatgtaaggcttggtacatagcaaagagattagttgcaataatcatggtaaagagaacatttactatgatcatgttttcttagttttagaggatgtctgtcatcatcacaaatgctcccatgttcttgttctgacttactgattatataatatatctttatatactaactttctacaggggaaggctcaaggatgcatttcaggcatatgttctttggcaaatgtagtttctccgctggcattttcccctctaacaggtgatgggaaattatacttaaaaatgtcttttacgttgatgttatcatttttaaactaatacatatacatatgtgtctcttttagctctattcctatccgataatgcaccatttgacttccctggttttagtatcatgtgcacgggcttctcttcggtaagaccttcaactttatgatagtaatgggctgccatgtgaaaagtatggcaaccatctgtatcagtaaaataacaatatctagctcatttttttaccactgccgacttcaatataatattttgacattttagcctcaaatgaatgatcatttaatattaaaagatgttttttttaattaacattgataacttggattatcttagataggttttctctttatttgagtttacattatcatttagctgggcatttgaaatgaactcttaactgtgtagatgatagcctttattcaaagcatgatgataagtgcggttcctcccattgcaagtcatcgaatcagcaattgcaatcacatggagccttgattttatagaagtaacttggtttgactaaatagtctatgcaacttctctggccccagtgttggtctttaaaacttcaccactgttgcttaagcacgcggtcaagagaataataggcccaggagccttattttgccattttcaacttatatcgaagatgttgctcttttttctcttttcaaatttagattgagaacgttatgttgttgaagaggaaaacgacgttaataagtaggttactctagcattatgtaagatatgtgtcgttccctctttttgttttcattacttgacttttcttctcctttgctctgtcaaataagagttgttgtgtcaacttgtccactaataaattatgtttactatgagatctagtttttccttctgctagattaaataatgtattactattaaacctataattaagatagatctagacttgcagttgagaatattgaatgtagtcataatttttgactaaagtattacttttaacacttgattgtttatatttagtatagtaacaaacatttaacaagaaatcacatgtgaaatgtcacctgttgtccattccgaggtagcatttctttctagtttatcggatatagtaaccccaactaggcttgcctcaaacacccagtcttggcaggttatgacctcagagtcgatatttttcacttcatgctagttctttttgttcgacttcgaaggtcaaccaaaacttggccttggggttggagcttcagattgctcttttttttttttaatttatttttattattattattattatttctcttgtgatatctaaatggtatgcttcttttgtcttagtttttataagttttttttttttttttaaaaaaaaaaagaggttttagaatttaaaaaaaaaaagagagatgtttatataaaaaaatatgtgggaaaattaaaactaatggtgcagaatcaaatgtgatttatgcatacgatcgcgatgagattcagagttttcacaaagtgtttcaactcttacacttttatctcaaaaccaattggcaannnnnnnnnnnnnnnnnnnnnnttatatatcacaatttatttccatacataaacaatgtgggactaattttatttttaataagaaataaatcatttttcactcaatgcaatgtgctttgtcatacagccaaaaattaaagcttgtttggctgtattttcagtttttagtttttaaaattgtgtttttaaaagtgagaatagaaaacagttttttgtcatttta

SEQ ID NO: 43450 - DNA, 2406 bp, Cannabis sativa
  modified_base (1992)..(1996): a, c, t, g, unknown or other
  modified_base (2369)..(2375): a, c, t, g, unknown or other
cagcgcaatactaatttttgccagtacaaaaatgtactgacaaaagtaatatttcttgtagtgatatagtatttagttacaaattatcactaatttaatttaaaaataaaaatcttattgaaaaaataaaaccaagttctaaatattataagatgcatggaatgcatgcatatgtattgtacaaagtgaatgataatgaattaattaaccatgccagaatatatatatatatatatgattaattaattttaataataatttgtaagtacatatatacataatttatttatttttttgtagcggaagcattgggagtgaaggaacttttgccttcataccatgacaaagagttgcaaatgaaggatcttgaaacaggtttatgttttgcctcaggtggctccggatatgatcctttatcatccaaaattaatgtaaatatatgatattgtaaacctaatataacttttttctttaatttaattatagtttatttaaatattaattaattattggttatgatattgtatatatacagcaagttatccctttgtcagatcaaataaagctcttcaaagattataagagaaagctgaaaagaggtgttggagaaagaagagcaaaaaacataatcgataacagtgtgtttctaatatcatctggtaataatgatatcttattcagctatttctccacaaatcttagacgattccactatgatgttccttcctacactgaccttttggttaactttgcttcacagtttttcagagtacgtaccccatgcatattactataataataattaattataatgtcataattattattatcttttaaattaattaattaattattattatcatatatatacaggaattatacgatttgggtgcaagaaaattcgttgttcttaatacatcaccactgggatgtttgccattttcaagaacaataggtggagacattgtaagagattgtgcgaatgagtacaatgaagcagtgaaaatgttcaaccataaactctcttctcatttaactctactcactcaacaacttcctcattccacaatggtttatatagatttttacaacccttttcttgatatcatcctacaacctatcacatatggtgagtctcatcatcatcactcattaacttaattaaacccttatgtatatatggattaattattttagccagagttatgttttaatttttatacattttttttttttgacaaaacccttttaattttttttttttaaaaaaaatttgaggccatataaatactgtgtacacctatgtatacttaaagctaaaatttcaaaaccaatacagtaataatttaattggtatttaacaataatattcagcttttaccactaaaaaaaaataaaaagaataactgtataaaatcaaaatataatggagtttctaagcaaataacccttacccataacagtttaatttgttggatatatatagtatttttttttttttttgttaacaaatagatgtgtatacttttgaatttttcaggttttgaagtatcaaaaaaagggtgttgtggaactggattactagagacagcgatactttgtaacaagttcagtcctggaaaaacttgtgccgattcatctcaatatgtgttttgggactcacttcatcccacagaattagcttctaaagcaattgtttccaaactcattccacaactctatcattaattaattatgaatttatttcttttcattattattattattattatttatatactagtgaagagtctgtcaagtgttattattaattatgtttggacacaaggtcgcgttagctggtcataataaattatgttcacatgcacaacaagtttgatcgattaaaaatagcacatgtatgttctttgaataaattaaaagatttttaattgattttggttaaacgtcacgcccatcttaatgtgtgcaaataactttatatatatatannnnnatatatatatatatatcttattcgtcattaattgactatgatcacttgatcaggacagatctccaactaattgacttatagtcatgaaaatacaagtgttatcgtagtgtctcatctttgtatgaatagagaaatcaatgcgatgtgatgatatgagagtccaagtttggccacatgttaattaatatctactaataacatgtatgtgatgtgatcatagctatatatataataaacaattaatgaaactttgggggtggtaattacattaatcatataatttgtactcaaacaacatgaacgtataattgttggaaatatatatatataggtgcactcttgggtattacccatgaataggtaaaattagaannnnnnnagtttttatgcttaatttttcaatctaatta

SEQ ID NO: 43451 - DNA, 2441 bp, Cannabis sativa
atagcaaatcatataaccatgattcaaactttgataacttatgatttcatatcaagaacttgttatctaatattctatttttgttttcaattgttaactgtcagttagttggagctccaaagattttcacaaaagatgtgtcaattgtgaactattacaaggatgttcctgatagctgttgggtaagagacattgatttgaccccatcaagcagcattgcccaatcatctgctctatgcttggagattccaactaaccgccgccttcccgattttcgggatggttttgtttactacaaagaagttgaaggccaattctccattgacaaaggctcacctttctcttcttcaagttcaaaacttgttccaattgttgttccaccaattgacttgccatacaagattttgttcaagatcaactcattggttcaacatggatgtcttcccggcgagttacttgatgaaaagttttataagttagttgatccaagtagaatcaagattgactacatagagtctgcacttgacaaactctatcagttaaatggttgctgctacgatccactgagatggcttaaacgccaatacatgaactacaggaatggtgggcaagttcccaaattgcccaccattgctgtagatgatggacttgtgtatgtacacagagtccaaatcacaccttcgagagtttacttctgtggccctgaagtaaatctctcgaatcgtgtgttgagaaattatgccaatgatcttgacaactttcttcgtttgtcttttgttgatgaggattttagtagaatgagctcagtggatttgtgtgttacaagcaaaaagtctagaaatgttggaagaaagacaagagtttatgatagaattctttctgttttgagtgatgggattgttattggtgaaaagaggtttgagtttcttggcttctcatcaagtcagttgcgcgataactcggtttggatgtttgcttcaagagaaggacttgatgctgatgacattaggagatggatgggggacttttcgagcattagaaatgtggcgaaatatgctgcaagacttggccaatcttttggttcttcaagggaaactttgagtgttggttgtgatgaaattgagctgattcctgatattgaaatcaaaacaggtgaaaacaagtactgtttctctgatgggattgggaaaatatctgaagattttgctgatcaagtagccaaaaaatgtggcctcaataggttcactccttcagcatttcaaattcggtttggtgggaataaaggtgttgttgctattgatcctaaatcttcaatgaaactttcactaagaaatagtatgtgcaaatacaaatcagagaacaaaaagttagatgttttggcatggagtaagtaccaaccatgtttcttaaatcgccaactgattacacttctttcaactcttggagtagaagatcatgtctttgacaagaagcaaaaggaggcagtgaggcgccttgattcaattttaacagattctataagagcacaagacgagttggagatggttgcaccaggcgaaatcacaagcattctaaaggaaatgcttatgtgtggttacaaaccagatgaagagccttttctatcaatgatgttgcagactattcatgcttctaaattgctcgaaattcgaaccaaaacaaggatacatatcccgaatggaagagctctcatgggatgtttggatgaaactgggacacttgaatatggtcaagtgtttgtgcagtgttcaacaaggcaagtagtagtcttcaacaacaacaattcctccattgtaactacctttgttgttggaaaaaaggttgttgtggccaagaatccttgccttcatccgggcgatattcgggttcttcaagcagtggatgtgcctgaacttcatcacatggttgattgtgttgttttccctcaaaaaggaaggagaaaggtaaaaaaaaaaaaatgaaaaattctctgttgtgtttttttttatattttttgagtaatttatggatattgattgaattggttatttaggcctcatactgatgaatgttctgggagtgatttggatggagacatttactttgtttgttgggacaatgagcttattcctcctcagcaatttgaagccatggattatactcctgcaccaactatacaattggatcatgatgttacaataaaggtatatattattacatttataattgaggtgatttctatttcaattcagtaaatgcattgagttcagatagagccgactatgtgctaagacaaatcaagtctggtttagggtcctctcagttaaaatttccaaaaaatagttttcttttgcgaaaatgtacataattttgtagtattttttagaagctaccacacacatttttaaatattttttacatacttttttttttttttaaatttt

SEQ ID NO: 43452 - DNA, 2098 bp, Cannabis sativa
atcttcatatgtgtgccacctttcttcattgtttgccctcgatgagctggagtttgcatcttcttctgagcagatggagtgatgactttgatccataaaggccataacttggttgccttcctctgaattctcactcgtcgtggagcttttctcctcatcactgtcactccaggtagcaaccaagactttctctttcttgagagtgttggcacactcagcttgaatatgttcgaatccatcacattcttggcactgaatgcccgcattcttcttatcaccaaactgctgaccttgcttaaagcttccattagggtttcttcgaggaacattttcttttttattcgaatagtttttcttgaatttttttttttcaagaatttagtataatttttggttagcgacactaaagaccaattacctcattgagatccaattcctccacatttttgatttcttcaatagaggttactttagacatgaaccacctaggaaagattccaatgactttacgaatcaatttttcatcagagtatgtttttctcggtgcatatgactcatttgagatgtcccacaatttggcatggagcactgccactgtattttattcctctattgacaaattcttaaatgccttcgccaatgctcgtagacgagatttctttaccgtatcggtcccttcattcttgaatcacaattttttctatgcttcttagcaatttcacagttggcaatgactttgagctagtttgtagacactgcattgaagaaagcatgcattgccttttaattgaaattggccttctccatctcatatgaagtccacagactcattggtttaggcttaacaccttcatcgtcaaccacggttgggcatttgcagtcgtcttcaatgaccacccaaactctttcgtgaacaaccctcaagaatgctcgcatttttgttttccaatagggatagttggcccattccaacatcggtggcattaatgaagaacctcgttctctgaacattttcatcctatagaaaaatatcaactaaccaaaatagtagagtgctctcagagtggagaatcagagaagattagtggtgactggataaaccagaaatcaagaaacgtaattatgcaaaagaaaactcaatcagatctttgaacatagtaaccaagaagagaggatcaaaggaaaagttaccctaaaattctagctctgatacgaattgaaagacttaagttctttcgttactgagttcaattatcgattttttactttgttcattcgcttaattcaattcaaatgtattgactgtaaattgctaaagctaaattagaaaaacacaatcaatttacaagcttcccttgcattggaaatacattccagctgagtagtgcttgggtccttgaactagggtaagtaacttcactacatgatttgcaagtttttaaataccagttctgtacaaattgccaaatcccttatgataagaaattactccatatgccaactcccttggcaaacacaacaagattcaccttgtttcttgtatgttgaaatcccttcaacgaaactctagatctaaacaccttcatatctgcttgcgaagatgtagctgaacttcttttagctcgcacctaatcaactgtaccgaaacttagaatcaccattcacaaagtttcaagctcaaacttgcaagaacacaagaacagtagagaggaaagatagaatgtgatctcaatctccgatcaaaagtgttagccgtaacataatcaagaaactgatatacatacctagttgaattagataataactagataactgacaactgtaacaaactaacataaaataagttgatgtggacaatgtctaaacaataaaactctaatcataaaaatttaaactctaaacaacactggacataatttgtcataacaaaaacgttgtttcttaccgaatactccaatcttgaatcatgaattggttgtatattttagaaagacaagggtatggtaagaagtaagaagtatgtaagaatagagtaattcatatttttataaatggtaataagttttcacacacttttactctaggactccaacattca

SEQ ID NO: 43453 - DNA, 2512 bp, Cannabis sativa
atacaaataataaaaaattaacagtaaattaacaaaaatacaatataaaattcatcaaaagattatattcactataaataaaattgtaaaaatattaataaatcaagttacaattttgccaacaagtttttttttctttctaatttatattgggagaagacaaacaactcattcatttttctttttctttttctaatagcaaactcattcatttttctatatcatacattgtgggcatgtttaatttatgtattgttggtcgacagatatgattgtgaaatatttgtccctttactaataatggggctaattaacaccaattccaaattccttaaatatgtcatttagattatgctttggcttataggtatctaaataaactcatacatataacaagaaaaccggtttaatggagaagaaaataaatgataaaagcaacagattttttcatgtataataggatcttggtaaacaccaatgccaaatcgttatttatacatttcttttggaggagacccacatacacaaacaggctatgttttggctttccctgtcttgattttgctcaaagtctctacaaggtgccattgtcccaccatgagtgtaacaatgaaaatgctctcttaactgggaaaacagacaagatcccctttaggctttaaggtgcattgtcccttgtaaaagaaaattctaaagctcccgctaaaattgatactagctgtgcactactttcagctcaatgaaaccaagcagtacaaataatataataccgaaatgtcacaatagaaaaagaaaaaaaaaatactatgtagtcccacagggtatgttgctaactcgagaaatgtcacactgtcctgtcctgtttgatgtgaaaaaacacaaaaatataatacattgacacactgcgtaaacgctgttatgcacctgcgcaaaaggattctgtccgaatgatcgatcagactccactggaagattttcttggaccctctgatgatgaatcactactccatctgcatcaagagaaaccatactttataacaatctggtaaatccatgaagaaagatataaagaatgatttggcttaaaaaataaagaatctccatcaccgtcaccttttgtcgttttgaatttggagagcttgattcacagtcatcatgtcgacgtgatacccccacagtagagttctcagcctgatgtgatgtcccggcatcagaagccacagcctgcaaaacaaatttttaaaaatttgctttttatacctatagatagatccattatttgatatcatttagccaataagagaaaaaaagagtgaagattcagtatatctttgccaaagggtctctactaataagatacatacaacctccataatgaaccggtggaagaatgcagagcactaaccggctcagaagggctagcctgttctggatggacagtgtctgattctgaaacagcttgtctggatattacaggcatgatttgacgaagaaggttggaaaaaaatattccttcttcactaggacttggttctgcttctggttcaccctgaggaccactagatgttcttgcctgatctggggtagaaccagcacctgcttcctctgaacttccgtcttctacatggatttcacctccaggaaagaggtttcttatgaattgcatgacattgctggggagctgtctatcggaatcatcattattttgcatccccccagcagacagaatgtttatgctaacactgcgtgcattcaatgactcctgttgtcttggattaggtcctgccgagttaaaaaaataataataaaggaccatcacaaagtatggtagaaaacatcatttccaagtgcaaaggtacagacaatcacacacaattaaatttaaagaactgggctagttgtcaactatgcaataagcaacaactaaaccaaacatacaaatctgtgcaagaatatgattttataaaatattaaggttagcaacataccctgtagcatatgattttaaggttagataaaatattaaggaggccaagggccaaatgtataaagtttggagagaatcagaaaaaaatataatatacatatgtaatacacagttccgtccctgggaacgagtccctgaatttcaaagcaagctaagaatggtttctcttaccaccttaagctaatgaatgtatatagtgaagaattacactacgtttggtagagggtagaggaataggaataggaagggagagaagagatggaggaagactctctccctccaaaaatggaagaatctaagaaaagaaaaacaaaaaaaccatatgaaatgtcttttctacccttcaaaaaaataacatataattgtattaaacacgatgagatagtaattttaatatttatgttactctccatccttccaactttaatcctaataacaaacaacacaaaagagaacaactaccttttccatccctcctactccctatcctttctaaattctccatccatcctactctccctcctt

SEQ ID NO: 43454 - DNA, 2845 bp, Cannabis sativa
tcgtgccttgccaaaaaactcgacccaaatttacaacttcaccagtaattctcattaacaatgctctatatatatatatatatgccagctcgtatataatggtacggtgtttaacacctaacagctacgttgtaaacttaatacttatttacttttaaactgaagtaaataataataaagcagtaacgtatctactatatatagtaaacagtagcataattttgtaattattgttttacattaatatatctatatagttcaaattaataagcagtctaaatttatttggtctcacataattatacatgataatgatatcatattatatgtcgttgtagaaatggtgcttgaaaggttccatatgttcaacttgcaaacacaatgcaagaaccagggaaccatcgccactgggactagagatcagaagagagtcgccatcgtaagcatggatcccagggccaacataaatctccttaccccatccgaaatcaagcccatacataggcagccttaaccagctcaccactccaatattaggattcccatagaaaggcccctgctgctcgtgatcatcatcatcatcactacctcctaacaaagcatgaatattctgaagcttcttcaagtccttctcattctttaaatactcaatgcttgaccaaacatactcattcgtaaccatctcaatagcttctcttactctactcgctgcgaagcttaaggatttagataacagctccccggcgctactcttggctatcacatcgaaagtggcgttgccaaagtagcccgtcggcaaaggagggtctattcggctccgcacgtcaacgctgatgcccagaccagtaggttgttccttaacaagcctcctcgctttgcatgcacatctccaaacatgtgcggccatggtctcataacgggtgtacggacgagcagtatcattgacagccgtagtaatttgaagtgttttaacttcttcttttgttatctttaacatggccacagtggttttcttttttctctcttcaacactgtctgactttccaactaaaattgggggttggtcgaattcggaatggtggactaaataaaaagcttgattgttattattattagccgggggatctcctgctctaaggacttttcgatccagaaacggaggagtgtttaatggttcacctctagcaagaccagcccattccgagatgaagtgtaacgaactatttccatcggccacagcatgagaaataaccacgctgagactgattcccccacaagcgaatttagtcacttggacaatcaatagaggaatttcatgaattgggagaccgtagtctactgttggaataaggccatcgtattttgatgaaggagagaaatcatcgccaaagtcatctagtttcaatagtgaatctgattctatgaaacgaactccttcattattgcagttgagttcgagacggcttcctccgtcgctgtgccagcgaaggcggccagcgagtgggtagaaaggcactagggctctactcaatgattgtttgagtgtggcggctatactattaggtgacctaagccagttctcaggtggcctgtagaagtagatggttggtacatgagtaatgataccaacttgatcccattctgagagagataatgtgcctttccatgttggctcagctggctttactatagagcagcctttcattctcacattttggttcatttcaaacttgtttttgctttgctttcttttttctctgtttggtatgagatgggaaaactatgaataccaagttatttataatggcaaaattggtatactctctttgttccaaatcattatgtaataattcatattaacatacgtattattatataagttattttaatttctgtatattggctaaacagttggaaagtgaaaatcgtgtgatcagagtttgttcctcaaaacggtacatacgtacgtaaagtagtttattctgccataaacgggagttctgtttccctgtaatatcaattaatttaaatgaaattaaaaccaggtaatgagagtaaaaattatagatcatttctttttttatatatatatttctttttaacaaaaaaaatcataaatttcttgaaggattaattcctgctgaattatccacactttttttttttttttcgagagaaactggtcccaaaaaactccacagaacaaaaactctaaatagggaaggggacacataattgtattcataaattatttgaatcatggaatgtacgattttgaatacaaagagggtaattaggccctaacatctaccaacaaaggaagaagggttggttgaagggggtcggcacaggtaccctatggtgcagggggttggcataggtcacccttggcacacgggttgattgtgtgactttgtcttagtgttttggccatttttatccatgtacctcaaatctgatgatttaatatgctttgaaaagctaagaaagagatctatgactttcatgtttggtgtcgcactctcatttggcgcgggaggttgtctcacccccttggcatcagggtgtcgatgcagtgcccctagtcgcagggggggttagggtttccccggtggacaatacaagaaaaaaagctctagtggcacgacaaaagtagcgcctacaagcttttttttttttttcatgcctatggtttttttggcacaacaagttgtgccaaaatgttagtgccgaaaaggtgtaaattagcaggacaactaatatggcgtgcctaatgggtccttctagcacgacaacacggcatgcctatcgtcgaagtattgtgccaaatttcaattcttttata

SEQ ID NO: 43455 - DNA, 3836 bp, Cannabis sativa
  modified_base (3381)..(3402): a, c, t, g, unknown or other
  modified_base (3776)..(3776): a, c, t, g, unknown or other
aatcttgatccactagaggcgaagtcacctaggattgaatctgtttatttgtatttcttctcttttctgtaaaattgtaataataagtattacaggggggatctaatttaacagaaacaacaacaacagaataattacaactccaatatcaagtgaaagtaggatacccaccactcaatataactaatattaaagcgttaactttacttggagcaaaaaatcgatgatgaagaatcacttattgtcacaatttaagtaatgatgaagaaatcaaaaatggacaaatgctactgttgaaattttagtttctaaaattgataatattacttataatcttgggagctggaacaggaaggtgttcaattggcataatactagtatcaagaataaacaaaaacaaatgaaaaggttggatgtgtctctctcagcctccaattggaaggagtatgtggatcttgaaaaagagttcgatgtgctatattataaagaaaacaagtattgggttcctcatgctaaacaaaattggctcaaacttgataatcactatacgacttatatattttcataagggtgcctctacccgtaagaaaagaaatttcattttgcttctctatttaatagtactgcaactgaaatctttgacaaagatagtcttgttagtgtgttccaaaactattttcatatctgatttgccttcttgtgaggatatggatccttcctcaattctatagttcctaaggttacttctagtatgaatgatcaattgacaaaggcatccactattgaggaaattaaaaaggccctttcctagctagatgagtcattcgaaaagttctggtaatgatggcatgtctgttggtttctatcagaaatatagggatactattggtctggaggttactgttgttttccttgattttttaaatgacgggagcgtataagggtattaaattgacccttattactcttacccctaaatttgacaaccctaagcatgtttctaatttccgtcttattagtctttttaatgtaatttataagattatttctgtgactatgactaatcagttgcgtgagattttgggttcagttatttcagattaggggtgagcataaattcgaaaaaccgaaaagctgttcaaaccgacctaccgaacactgttggaaccgaaaccgacgaacccaaaaattgaaaaaattgctaacgatttaaaccgccattgaacagtcggttttttttttttggtaataaaccgaccgaaaaaaccgaaaccgaccgttatacatatatattaatttattaaattttttttcatgtattatagttactaataatatataaaaataatatattgtttttttatttatattaaagttaaaagaataagataattagtttttgaacaattaatttatatgtttgtagttgtaaaatgtaaaataaggtatttatagaataaattggattattttttttaaaaaaaaagttcggtttgggcggtttaaaccgaccaaaccgaggttcaaaacggtcggttttaagatatgttctggattggtcggtcggttttcagattgcaccaatccaaacagaaaactgaattttggatttttatatagaaaaaaaaaaactgaccaaaccgactgatgctcagccctatttcagatgagcagtgtgcctttcttcctagatgacttataacaagaatcatgggcatcagtgaggacaaatttcgtgagtgaaatgcccctctttcgttagtaatgcctatcaatggcgacatttcgttagtgaaaagtcgtcagaaaaagttcggcgacaaaaagtattattaataacaacatttaaagtcgttggcaaaatttaatatcaatgacgattttttcgtcattgataatacttaatttttttaaaatattctggtaaatcaacggcgacaatgtcgtcattgattatattatcaatgacgatattgtcgtcattgttaagcttctcaattaaaaaaattaaaattattttgtttttattttaaaattatattaaatatttatatttcttttaattaattaatatatcaaatgatttaattaattaatatatgaaatcatttaattaagagtaaaaataaataaatagttagagtcacaaatattacaataaagagtgagccacaactattacaatactgcttacttaaatatagagtaagtgttcataaaatatcaataaacataaaaccgatagttcgtaaaactaaaataaaaattctaaaagaagtttgtagtagcatcgtcatcatcactagcatctctagcaacacctggcatttgtgggtagtatggcgatatttgcaaacttgtcatcatttgagatgtctactgcgcatgtggtgtcagcatcatttgagatctctgctgcccttattgtgtcggcatcgtctgcgatgtcttctgccatggttgtatgtgtcggtatcgtctgcgatgtcttataatatatttatttgtttgaataatacttaaatctaaataatgtacttcttaaatattaaattaaaaatctaattatttatccattttttataaataaaataatataaaactcttttttagttaaattaattagttttaaaagtaattacattaaatttaatatgtttataattagatattaaattacttaaattatttttaatattaaattatttattatttttttattgtaaggatttattaattattaaattaattatttattcaattattaattgactgacatatataataagatctgatttcagcaatcttgacaatcaaactacttaaaatttatggacaaacctaaaatttatagacaatagcatcttttttttagaatggtagaatttcttagatgagggtatcctttttttggtagaataagagcatttcttgtaatacatcatccaatttattagtggaatgaggacattccttagatgagagcatccattttcattcatggaataacggtatcccataaatgaatagagagacaataagagagatagtaaatatcaaaataaacagagaaagaaatgggaatgagattaaagacttacccttaaagcttgttgatcctttgtagaataaaaatattggagtatttttttcttttctattttctctctttctctcaaaaattttttaagtgtcgatattcttttcctgtcttcaactcttcctatttgtagagcctatttttaatttaatttaatttttttattaacttcatgtaacgtaatgggtgagaaaaaataagagagtggacaattaaaaaagtaaagatagtctcatatttgctctcaatttaacttactatttttattattattattattnnnnnnnnnnnnnnnnnnnnnnttattattattattattactaattatttctttttatcttttaaaagaaatatcgatatttaaataataataattttaaatctcttttttttttcttgttcaacccatttactcatacgaatatttttatacaaatactttttgcgtaaagttttactaaaataccatttattaataaaatatacaattatgttattatgtatcaaaaccagaagctaacatatttcttaaccattcatacatatcataaagcatattcaaactacttaaaaatatgtacaaaatactaaccataattatgtataaatgtatacatcaacatatataaatactaaataattaactcaaaatagcaatgtaacaccctaactaacntaggcgtattacgtgattttaaacatgctgtgcagctcgttgctaatcaacgagatttat

SEQ ID NO: 43456 - DNA, 2748 bp, Cannabis sativa
taagaggctcgtgggattgacgtgagggggtagggatggctatatttctgggagcgaactccaggcgaatatgaagcgcatggatacagattatgccttggaatgaaagacataatttgatttgacttctaatgcaaatcgaataaattaggagcctgcgcaggctcccgacccaaaccaattttatttcttggccatgcctaattgactagggtgagtgttgagaatttcctaaaacagtatattaagagatgtttaaaataaacattttataaaaaattaccaaaataatgcaaagtgactaaaaaaatgataattgcataaaatattattttctgttaaatttttataatttttatgtttaaatatttttattacattttcacgatgttctatgaaaacaataagaaaattttatagaagtaacatgaaaataacttccaaacaacaataaaaaatagtatacaaataatagaaaaataaacaataaattaacaatagtataacataaaaataaatcaaaagatcatattttttgtaaaataaaatcataaaaatatttaaaattatattaaaccgtatttttgtactttttttttgttattttagtgtatttatgaaataatcccaaaaaatgttattttagcgaactccctcgtaataaactatgccttagtgtgagcaattttagcaactaatcttgtatgtgttctaaaaaatcataatagaaaaaggaatttgttcatctttccaaaatctcaactcgaaaacacataagaactcttgaatgaaattattaccagggctcgataagacagcacgaggccttgaaacaaggctagctttaagatttggctttgattccttcacaacacctctcttttgctcaactgtttttttacccaaatatcatattacacaactaaaaggtttgtataaatattacaaatatatatacatataaaaaaaacaaacctttggaagcagaattattcaaatccatggttgagtttagcacataatccttcaaaattctggcaattggcagtaatggtgaaacactgctctgattttccttttctgcaataaaataattttctccatcaaacaaaaactcataataataaatatatatatgtaacaatatatatataattaaggaacaaccttgttgagtttgtggagaaagacattcttcttgttctttaaactcttctactctcaccttcactcttggatacacttcaattaataaaaagtcacataattaaataatttaactaaatatttaaaaagaagaagaacaataagaacaatgaacacttacttttgttttttgttgttttaacaaaaactaagaaaacccagataggaatgaatacaaaagttttgaaatgaagagagattcttatataaaagttttctatgtgttgtctttattattatttattttttggtaaaaccaaagagaaagctaaagtttcgttttttttttttttttgttcttgtttatttatttgaaattcaaatgggaaaaatggttcttttttctgttggtgaagaaagaataataaaggttaaaaaaaaggaagtattgtggtgtgggttagatttagagtctgacagaagtaatagtcacctgatttaacagaaaaattcacaaaaatggctttgaatatagaaatgggtatccatacatatattgatattttcttgacttgaaaaccaagattaatagaaatgaattcaaaccattttcaatttcagagcatggcgcctttttattattaatgccccacgtgaccatcatgtgaccctaccactcaattactattatttattattattagagctacaccaaaccataaatgatgacaataaactcatggatctgaattaggggtgataattcaggtcacgatatgaacccgacttaagatttttttacgggttagaaaagagtcgtgttcgtatcatttaaaatacattattaaaattttaattttctatattatttcaaatttttacattacatcatctatcaattttattatttttttcaatatcttctctatattatttgaataatatagtttttaataacataatacattttaccaagataggaataaaatataatttaaatatttaaaaataagaataatacttctcaacatgtgaagaaacatttcatcattctccaaatgctactctaattactactctaaaatgcatcatctaacagaacatgattttaatattcatatatatttttttaactattttctttaatattttgaggaataacttcatttagagaagatgtaaagagtgctcttgatgcccacatagtaattaaaaatttgtatggtaagtttatagtacaccccttaaaatggttgtttgtaatgaccatgagatctttttttttttgaaaataagcgtagaaatatattaaataaaactagacctcatggtcgttacacaacatgtttttcggtacagaattgatcggaatcgatccatacaactggtaggtgaaaaagtccacttagcgacattgtgtgccgcaaagttacagtgcctactaacattagaaaaattacaacacatgaaaatgaccataaggtctaagtggtatgtttttagttttttcaatccataaacgtcttatttaaaaaaaattataaaaaatggtatttttcaattaaaattattgtaaagttatataataaaaaatagttctaa

SEQ ID NO: 43457 - DNA, 3509 bp, Cannabis sativa
atattaattaatagtcatttcatgttagctagccaagtattttggttaacaaaatagaatggcatttttttttggttaatagtaagagttttgttcggtttgtttagcttcctaaatattaatatatacaagaaaagaagccacaaaattgtaattaattaagtttggtatatacaagatcaatgttggtgtcaatcaatgtgtaatttgtttagcttccctaatattaatatatacaagatcttgtgactaaataacaatggtaatggtgtgcctttaataacttccaactttgagtctcttaaacattaggtttaggttcaatatgccatttgtgattcatccatgctaaataattatcgcaagaatttcatggattattcatattgaaagttgttacttaaaagtgttgtaatttgtgtataaatgagattatgaaactgctagggttggtaccttaggagctaatataaacacaaataactatgtgataaatggaaatgcaattatgttatatttgaatatataattaattccatttaaaataaaaataatatataattgattaagttcatataaatataaaaaaagatctaaattcagaatctcttgcaactacaaataattaagattatatataataaacaaaatagttaatatcatataaaaatatggaatagctaagctaaccaaccggggaaaaggattggggctagatttgggtccgaggccgaggcttgggtttgaggttgggatcaggtccaagtttaaggttaggtttaggtccaggttcagatacgagcctttagtcaggtcaagttagagtacagggtttgagtcgaagttcataaatctgagatctaggtctaagtttaaaatgttgacgattgaaaatacaaatacgaaaaaaattttatttaaataaattttgaaagttgctttgttttcaaaatttttacattttgatttatatttaaaaataataataaaaaaagtgaaaacaatttgatagtgctctttgaaaatatttataatctttcagtaatgacacaaaaactatacaaaatatttataaatatttttgccactccttcacaaacacattatatgatattttccttttgccacaatcaaactcacatgcattcataaaaaagataacaagaaaaagaaaaaaaaaaactaatataaatatataatcactgtacatcattactactctttggttgaatctccaagccttgattatgattttcatgcttaggatctctactaaaaaccatctccatctcttccaaagttcttcccttagtctcaggcaaaaagaaatagaagaacaaccaagccaaaacagctatgcccgaaaacataaagaaagctcctccaatagttatagcttcatagatagaaataaaagtcatagaaattgtagcattcataatcctattcacagctacaccaatactcataccttgggcccttaatctcaaaggaaagatctcagaactataaacccaagtaataggcccaagcccaatagaaaaaaaggccacgaagacataaaccgaggttatactaaggcccaaagcccaaaccaacttctcagtcgaatgttccactacagttaagcaaatcccaaggctagacaaagcaaatatcataccacccacgctagtcagtaacagacgtcttcttccaactttatctagcaaaaacgtcgccgttaaaataaacagagttttggttaacccaacacccacagtggctaataaaagcttgtctttactaacaaccccagctttcttaaaaatcctagggctgtacaaaacgacagcctcaatccccgttgcgtgttcgaagaaatgaataccaacggctgcgattaaaatccatcggacggctggtgatggacgaaggattaaatctctccaaacaccttggccacggctattgtttgggactttagctaaaacgacgtcgttacaatcaggatcaatacccgcggcgatttttatatcacgaaatcgaaaatcggcttcttctctagaattagacacgtgcgataaaatgtctttggcttcacccaaacgaccttgcataaccagccacctcggcgattcaggcattttcagaatccctaatgctaaagcgatggaaggaatcgccgccactccgagcatcaatctccatccgagctccaagctcagctttccgaagaggtaattagagacgtaaccggttagaattcctaagctgatgcagagttcaggtagtgacgtcagaaaccctctcgatgccggagatgaaatctcggcggagtaaactggagcgatcattaaggcgaaacctactccgattccggctatgcatcttccggtgaggagtacggggtagtttggtccgtaacccattagaacagctcctaataggaagattacagaggataaagctattgtgtaacgacgtccgatgtagtcggaagttctaccggcggcgagtgaaccgaagagtgcacagatgttgagaattccggctaggatttctacttctacatcggtaattttgagatcttcttttataaatatcatggctccactcataacaccagtatctgaaaaattattaattaaaattacgttaaaatttaatcatatgtaattaaaattagatatcatagaagcaacaatggcacatgcacatgcatatttgttgaacttttctttggtttctccaaaaccttcttccatatttttactatgtatcaacttattttgtatattgtatatatatgtctatatgtgtatgagtaatggtataagtatattttatatataagactcttttggattagcaaaggtatttatagagtaagatcatatcaggtatggaaggtatttgtatgagtagtatataggttgtgtacagctaagtatcttttgtatccacactgtgtattgtttggttttttttttttgttataataaataaaataaacatgcctaattaaacaacatataaagggtttatatatatggtagaaatgatttatttttaagaaaaaaaagaagataatattcaaaagtaagtgatgacacagctatagtattagttattaaaaagataaatatgtatgaggaatagaaatgggaaacaaaaacaatataagcttaattaggtaaaatgacccgtccttgtagaatttcaatggcacaaacataagatgaggagtttggccaattaactgccacatcttatcttatatatataaatatatttattaataaatatcagttattaactaattaatttgttttgatttatatttatttatttggataaggtgtgatacagtgtgtgtgtgtatatatgtatatcgatccaagcttgtatatttgaatgatcatccgatttatttgccactggccgaggcatagtactctttgaaaagctttgaacattgaattcaatatttttattatgtatttaaataattaataataattatatat

SEQ ID NO: 43458 - DNA, 2577 bp, Cannabis sativa
gtataagagtcatcattccgtggtgtaaggacggagacttgaagcaggaatgttacatctttccaccaaatgtgggataaaataacggtgtcagtagggggtgtggaattattttgtaatagtgggaattcgttagaattcattgggaggctcaagggatcctcgagcttgtatttctgagtttgagtgtcaatagagaaggctgaatagccatttttatgttgaaattcctatcaataaattagtcatttcatatattcaatctgatgcaatggattttaatcagagatagactgacctgaattggaagagtgatcaaaccaccaccacaaactcctgcaaagaaacactcagctgatatcccctgcttacagaaaaaacacatcaatcacaagggatgagaataaatatttgttgtaaaactagataaaaacaagctcgaatgatggtttagtcattgatcactaaccgatgcaccggccaaaaatgctgtaggatttcttactccaatggaaaatcgttcaactgcagaccatataaatgaacaaacatgtttcaatgtctatagtttcttccctttttttatttttgaacttgtgaactttgacaactgaaaacagaacaaaaagcttataaggatgcaaagaactgaaagctcaccaaaaccaatgagattgccatattttttaatggcacgagttatgctcaaagctttctctttgccaatccctaactgcaataaccatcaagattagaatacattattaatgtaagagaatagaagttgaaaccaagcagaacaaacctttgaacaaacatcatcagatgccccagactgtttgaaaagctttccgaaataaaatggtattaagtcactaatgcatactcccctaataactataccaagtcagattgctgtttcaatatgaaatcacttaaagtgtctacagagctacaagtgaagtttcatcaaacatatttaatagaaagaactaatggcattaggaaactaaccagtacacccaaaaaatcgtcgaagttatgtatccagcattcttagagaaggactcagcaagagatttccatgacccatccaaagttagcatccttgctatagataccccaacctaaatcatttaatataaatatatcaattcaggcatacaagggaagaagtatcatgaaacacacaaatttcactaaaaagagcaagacaaatttcttgagctttgtgaaacagaagtaccagaacagaggacagacccagatatttaaagcttcttcactgatgaaaagaccacaagctgcagccataagcagccaaaagtaaatccacctgcaatgagataaaagtgagaataactctatatttcaaaggaatgttaccattttgggcttttgtgtcttggacaaatacatttttgtaccccatgttttgctaaattacattttagatcccgtgttttgcaaaatagatcaaaatagtaccctggacccgattttgttcaaaataatttcaaataaaatctttctactcttcagccacctattctcttatgcgaactcattgcatcattgatgacctaacacttgatcttatattgtaaattatttcaattgaagtaaagttcaagtgctattttgatctaaggtcaaaatcaaaatgtaatttaacaaaacatacagtccaaatgagtgatcatgcaaatcataagagccaaaagcttgaaacttttaacacattttcatttcttgatacataccctggagcatattctggcagaactattctgtatccaaaagctttaaaggtgaatccaacaggtgctgctgcagtggccattactgaagaggatgaactatctgaaagaaactgaaatccaagagaggaaccaatagcaggctgctttgccccaatagagacgagtgtgaatattgcagctatgcccagtgcaatggctatcttagccagaaatgaaaactcaaaatcagtactagcatctgtcatgtctccaaggacctcatcagaaagtatatcatgtatgtctgcattctctttagagactttagcccggtagttttcggcatcatcctgttgatgactccttatcctgagttttcaaaatgaaagttgtatcaaaattttcaagttatgaaatgaatgagcagctgatagctgtagttctctaaatagtacaaaataagtttcaaatgaaatttgttcaatatgttacagtgttctgttcattcaaagcattgtggtgttctgtcccactaatttatgatcacaagaaagagagctaaaatggtggaaaccattgagaaaaactataaaacttatgttttcataagaagattagagttaacccaataaaactcttttggtcgaaaaatgattgaccgaccctgctaagcttatgtctttgtttcaaatatagcttaattattttttctatttggattttttttgagtagacataatcagcaatcggtgcataaacctcttcaaatcagcataatcattgtttatcctaagaatatacttggtcaaaccatgagtctcaatataactattgc

SEQ ID NO: 43459 - DNA, 4171 bp, Cannabis sativa
  modified_base (3353)..(3362): a, c, t, g, unknown or other
gtcaccacctttttatacgtagcgaggttggtgcctccctttatattactgatgccatccttatgattgtgtcttctgacgcagaatagtttctcatcaatgcatgagcaatagtttgtatatccttatctcgcttgagactttacagtcagtgagctataaatatgctctatcgatcccgcatttaataagttattctattttaatatcctttaatataattgccattatgtttgttgattcgtattctctaaggttgacgtgtgtcatcctctgaagtgccagctaaatttcgggtataacaaaggtattatcacctttgtccaaaagcttatttcttcctatccctaagcactaatagaactctctagaaaataactttaggaattatcaagctttgtattttcatgcaagtgcttgttgatagaaaacttcatcatctcaatatgaacaccttacaccaatggcaggccgagaattttagttgagggagggcgtacttttttttagtaaaaaagagttgtactttattttctacatgatataacacgttaaaaattgatacaaacaaatatttttatagtattaaatatagtttaatataaaaaaaataacaataaaatattggcttaaaattttttttagagatctaaaaagtgaacattaaatattaacaaataaaaatgctattattgggattagaattcttaaccttaaagataaatgtaaaatagcttacacaaaagctaataccatgtcagtattgtaactaacaaaatacatgaacaattttctcccttttttagggggcaattgtcctctctcggttctatgtggtgcgtcagtgtcttagacttctttatataatatttaggatatcacaaattgaatttctaactcataatctcctataaatattatggactcaataaaatgagtataaaactcattttccaacaactataactcctataagaattttaaattaaaatatatataacacatttttacacacttaacaagaaactcgatactacaaaatattgactcttagtcataagcaatataaggggctatttggaatgggttaatgctaacaaggaaatggtaatgtaaaatattatcttgtttgttttgagtatttaaccttacaatgttattcctttagtaatataactacctttgaagagggtaatgttgataacttaaaaaattatgggattaaattattcccttctattatattaatttgaatactatttttcaactaataaataaatttaaataccattaatattttgattattataaaaaaaatattatgatatatatttaattaatctgtcagattgattttttatttttaattgagttatttttatgttattagcaataacatatgcatatgcattatacataaattttatgtggatggtgtacataaatgacatagcgaacaaaaataaataacgataaaatatataaaaatttattttaattaataaaaaatacaataaaatgtaatatttactaattaataaatatatttctttaattaataattatcttttatgtataattaacattaaacatatataacaaaaaaatatttttattttaattttttaaaataatatataagattcatgtacttaaccaaacagtgtaattcaattaacatgaatatacttacatattaccctacataaccaaacacagtttactcattattctacaatcatattctccttcataatattctctataagcaaattatttttgaacacttcattccaaatgcctcctaagagaaatgctaaaaaaaggaaccagtggtacctagctagcacccttctatgtgtcaatatcgctattgatcaaattaagtatcaggtctcttataatttaatgtaataatttttagggagtatcactagttaattgcaatgcgacatatctagaggtattaacactactagtgcctaataacaatgatcataatataacatatatgtgatatttctatctagtggtaagtacctatagcctagtaaatataagtatttctatctagtggtaagtaactatagcctagtaaatataagtagttcttttcttttatttaatactttgtcaaattacatagtacttttgtaatctgcatgcacgccctagttattgctatataataaatatgatcacgaattgtagttactcctatttcatttttctctatatcatgatctaccttcttgatcagtgtacggatgattacaaaacaaataaattacatatataattgtattaaattattctgaataattaattgacaaattaaaaaggtaaatgagaataaaaacaaaatcaatgcatatgatgggaatggttatggaaaataagtacctgcatggtccatccaatttactgaactatatttaattttgcggagtgttaggaaactctatgtttattgtattctcattcaatcttcttattttttttattttatttgttcagaatcactgtaactaatcgaaactacagaaggatcatcaagggattcctttacttaaaaaaatttattgtccaaaacaataaaattttaactacggatacaaccttgaaccaaaattcattccacctgtgattcacaaaacctgaaaatatcacaatcaacataatcatgtacaaaataaacttaagtgatataaaagttgcatagcatcaaaattttaaatgatactatgaaaaaatatatactaaaacaacaaaagaaaagagcatcctcatttgatttgatattcaagcactaacatcaacttttctactttatttttattacaatagatcaccacactctactttttattttatctcacacatataaatcgatctaatctaatgacaaccgatcgatccaattacaaccgaccgtcaaacattggatatccaattatgatcagattagattggatgttatttttgaatatccaattagatctaatcggatgttagaatgggtgtccgaaaattcaatacatctaacattcaacatccaatcgaactaattagtattttcatttaatttgaataagtaattagtttttataatgttacacgtaaaatatatatatatgtatatataaaaattgatattaaaattttattctttttttctcggattggatgaatccagtccaatccatacaatattggacctaaaatattgaatggatccaatctaatccaaaaaatacttgatctacaatattgaataaacccaaattaaaccaataaatatatatgaaatacaaccaatgaatagaactgatccaatccaacatccaatggannnnnnnnnnattggatgactgaaattaattggatcagatcgaatggtaaaatttaacatccaatatataattggatcagatctggataggtgtaaaaatattggatgtggtccaatgaatacccctactcccaacagcttctcttttctataatttaagatacaccaccaaaatcttactttattaattttacatcaaacttttacattatattttataaaactcaattctacccctcacatttcaaacacataaccctctctcttcctcccttatctttctctctctaaacttaccccaaggacttgacccacaacccaccacccacaaccttggtcccttctctccacgactaccacgaccacagacccaacgacccacggacccaatgaccaccgcggacccaacgacctatatggacccaacaacttctccatcaaccatggcttcaccatcggcaatgttgtcaaatgaacaaattgtataattaatgtttattatctgtgagtagatatcagatttagtgtcaaaaatggccagatttgagttttgggcaaaaattagttttttgccaggcccaatggtagtctgaaagtggtccaatgccttcctgttgttaagatgagtaaaggttgaagacaaaggtccgatggtggcctaatgatatggtccgatggtattccaatggtgatctgatgttagcctgatgccttcctgacgagcttaatgaatggagcttaatatctatcaacgtagaatatggtctgatggtggtccgatggtggcctgatgctacttttttttatgtacaaaaacat

SEQ ID NO: 43460 - DNA, 2300 bp, Cannabis sativa
tggtagaatgaaaacaaatacaatatctatcacattaaaaaaagagttggaaaattaaaccatatatgatggcaacaagtgcaaacaaagttcataaaaactaagcaaacgtctgaacaaacaacagaccacatatacataaattaagtaaactaataattttatgttcttgctgtctacataaattaaacgaaacaaagcatatatacaataaaaacaaatgaaatctaattacttaatttattaaagtttaagagacaaatcaattcccgaagaaggacccgaacgattattactggtcttgaggggctccttacgccggaagaaatcgacaccgctgctggtactgggacggttgatttcatcaaccttaccggccaaaccaccaaccccagtagcagcagtagtagtagtaatagtattacgagaacgaggagtagtggcatctaagttgagtcgctgatcattcgaacgttgtccagagttcagcattgagggctgccttgaccaaggggccatgtcgccgcctctttcaccgccgctgctgccataatcggtcatcccgaacggtctattgtaccaagggtagggattaggcttatgatgaatcaccgaatccatgatcccaagtggggatctgttattgtaagctccatagtaagatgacgatgaaggatagtatgggtaatagggtgagtaacggtggggcccaaaaggcccatgagcatcaatcccttggcgtcgtttggccatcatacgctcatgtttgtgagcgttctggtgaccacccaaggcttgagacgtggagaattctctcttgcaaaagttgcacgagaaaaccctagccggttgagccaattcctccgccgccgatgagggtttattctcttcttcttggttgtggttggaaagaagagaaggtgcagcgctaacaacaagttgattagaactgaagagattcagttctttccttgaaccggtgcccttgtcggtgccactcccactaccagccgctaagaacgatttatcgttctgggacagtttcagatctagaagaaaacgggatttgttttctgaatctagtactgcagcaggcatgatagacttcatcttggccagtctcttcgtttcgtctacctttgaggtctcagaaggagaagcttcggaagtactgaatttctccatgaatacaataggatggaactagtaaaggagaaagaaatagagagaactcaatacaaaatataatgatgttattgataagtatcaacttttttttgtgaagattaatgagagattggtcttctttttatggagggtttggagttaatgcattgtattcaagcttagaaagatatatccaattcacagtttttatttgaaaatatttggtaatattctcaagttgatgactagacaactcagacaaacaacaggtacgtataatgtgccggagaaaagactgaataatggtcaatggaagagagatttcaattagtgtttgaatatgctgagactaaattaatgagtaaatgcaatagttattgtgaatcaatctaataatggtagcaattacatggtgaaagtataaggaaagtacagttgtcagtgaccaactcatatcatttgtggcaatgaggaaatcctttatttccaaatatatctttctacaattttcagtaactcccttattaattattccaatatatcagcatatatgatatattattaaacggaaaacataaaaaaaggaatatcattgtctgagaaatagccaaaattaattataataacagtcatctttgttattgtctacttcgaattgcttacatataatacgaaactacataccgacgataatgataggggtattaatgataaaaagaacataaaaaactaacaataattataaatagcacgtattgctttttgcatatatatatttacatctatcttgaacttgaactaaaaaaataaaactgtttaatttgatacttaaaacaatttgaagatgaactaggaacattaaaatatagatattctacttacttttttttttttttatagaaaaagtgtgtcattataaaataaaagagtcatttgtaacaacataaaaaataacagaattattattcaacactaaagtttggttagccaaaccatgagcagcttggttagcatcgcgtcgaacatgaaatacacaaacatatgaaagatatgataattgattttgaacatcatttaccaaatcttgaaaagaaaaaagtttcgatgttggatgatttatggcatttgccaaa

SEQ ID NO: 43461 - DNA, 1287 bp, Cannabis sativa
cacctattcttcaagtgtccgcttcacagagggaatttttgtaatggaggctttggtcgttttgataactttttctataactaaaataaacccaccaatttttccacaggctacagtgtgaatatccaaacattggttttagtgaataatcaacatcattattggtgggggcaaataagtctagcaaaaaatgagaggacgctcagtacccaataaagattgaattacagtataaatatggaaagaaagaaagaaccttccattgtggccatcattggccaataaacaaagccaagaacattgagttatcttaccatgtaatatctctttcactatctccaatcttccaagtcctatcatattggatcaacttaaatcacatatccttacccactctctcccgccatacactgcttaagtattctcaacggtcaaaaacttacaaaacataagaaagaaagaaaaaaccaattggctaatgccattatggctgccatgattcagtccaccaccatgttctcttcatctccaaaaactctgcaactcaattttcattgctctccctttctagcctctaaccagaagcttttctcacgtgggttcgtgcagtttaactccaagtcatggagacattccatgtttgttaacgctaaacctgtacttaaagatggagctcttagtattggtggcaaggatgcgttaaccaacgtccctgataacgtagttgtgacccctttcactaattcatctgcatttgttggggctacctcggcggatgaaagtgcccggcatgttttcaagcttggagtcattcggtatgtggtgtagttttgtggttaactgagtataatgctaatgtagttgattcactatgttgattgaactctctgactacgtacaaataaagttggttatttttaatcttatcttggctaagtgaaaatcaatcaaatgccctgtttcttggctatcgtattaggacttggggaatcaaaatagccatgttcactctcatcaaagcgacagagaccccccttcctctttcatatcgtcgtagaccagcatctctttattagtgtagttgtgttgcttttgatatcttcttcttgctataagttggtctaagattgtaaaagaaaacaaaagaaatctgcttcataattggctatggtagatggtagtgccagcatatgcaatttgtgcaattagaccttccatgaataagtactactcaggtaagtttaccagcacttgatttaactattgtttgttttcttttttccttaa

SEQ ID NO: 43462 - DNA, 1675 bp, Cannabis sativa
tagtataccatgtaatttttttttatataattaagtacgttgttggatttggaatttggatagacatgagttacatttgttttgtcttgtacttaatgtacagtatagagtgtatagacaagagtctagtgggaagaaatctacattcaaaatcaaattggattaatcaaccctacccataactttaattgccaaatctttatatatattatcatcgttctttttccttttaattagtctacaaagtagcatataggaataaattatttaattcccttttttcttgatgggtcctcagtaaagaaaacaggaatgtaatatatacattcgttaatttgtctattatcgttattctattaattaaactggaaaacataatttaaatttatatatatatattaatgaaacttatattatatacatagttgccaaaatagactgcgccgtataatatattaaattattaattaatcaagattttgttaatttcactcaaagatattcttagttcttaattgtgtccttttccatcctaagtaacacgatggatatgatttagttcacgtaatttgccacaactgttgaaatgactactattacactacaaagacgagtacatgcaagttggaaagttggggacctaattaatcaattttggttatatatagccaccaagcaaaattaaagggaccaactaaagggctcccaattccaaaaatttcatgcagcaatcaagggaaacaagttgggtatctcttgattggccaattactttcctacatatcacaatatgaagatgatatattttttttatgaaagaagatgagatattattgtcccatttattaaatataaaggatatttactgcaataatacttaatatttacttaatgtagcactcaaaatatttacaaaaaaatttgacggaaaaagagaataagactatttattttcctggtcaccagcctccttttcgtaaagaaaaataaaaatatggaaagatatgtcggcatgcataattggggcgccaccctcagtccctcgtcctcactctcagcccggcggcccacccctggcccatccaaccccatctccaacaaatctttcgttctttatataactttttttgatgaaattattttatattaatttaaaaatatatataataatcgtcccgtgactatatatcttaaaatatctatatctttaattaagcacaatcacatgcggaattgtatttgacaattttacaataatttaatgtggtactttgtattgttagtgacaattattattaccatcccaatgcaatgtgtgtttgtgtataatattatcttacattgtatgtataataatgaccaaagaatagaactctagtgcaattattattaactatagtacaaactacaaagtagtggaaataattataagagtaatttatagtataaatatttaagtttagcttttaattgtaaattaatatttaattaagtttaatttttgcggcaatagtaattaagttatatttttagaattcaataggtatctgattgttaattattaagtaaattattgcaacgtggcaatctttgattggtctaggttatgaattttatttttttaaaaaattaatttagatataccaataaaaaaatgacacgtgtataatgactt

SEQ ID NO: 43463 - DNA, 1214 bp, Cannabis sativa
tgtgggtttggtagttttaccaaactgggtaaattgttttgcttcatttctttatttcgttgcgcttgaaggttatcgtttttccaacaattccaaacacacgagctcgtaggttctttggtgttttgctcgcatattgggccttggggcctataatcgcggttagataattaatagatgcaattaccctgatcacgtatttaggcattcaggcgttgacagcttagaacttgcgagttcctaatgggttgtttaatacattagtctcggactaagcatatgtaaagatgcggtatttatgtgtcacgtgagatatatacttattaatcgcatataatcagtatatgcgcgactaatattaacttttctcaatcctgctttttatcaactatgcagtatagtgtgtgattagacattgtctcggtcacactttctcgcaagtttatgtcatatgaggttagatttattggaaccatctattggcatgtcatcctttttcatcataaattaagtctacatgttaactttctacgagactgtactcatatttagagacaaaaatcacattataacactttcattatatctacaagaatttaggtttcataagcaaacaaccgaaaaatccatgacaatattagcttaaaccaaagaatatttgaattctttgatcaatcactatatttttctattattatcgtactgagataaatcaacttaggtttgatcctttgcaagaaattataatataaaaaacttttctttggtaagaaatatattacaaacttaaaatcaaagataccaaacacaataaatagagataaaaaagagtaggacaaactaagacaataatttaaaaaatcatcacatttcccttacaagatccttgacattgatcttgacatcgttagtctatttttgagttccttccatttaaacttcttcatatggagatcacactactataaaaatgtcttttaatgacccgttttgagagtgtctaaagtattttagtaatattttaatgcgtgtcactaatgcaggtgtcaggaaatatactttttagagttacaaaatgtgtgtcgctatatctttttttttattttatttaattctctatttcatatatatagtaactgaaaatgtgtgtcactatatcattttttattttatttttaatttaattttttatttcatatatgcattaactcaaa

SEQ ID NO: 43464 - DNA, 2023 bp, Cannabis sativa
accccaagtagaatgtcctaacttatttggcctttgtaagttttggtcaaagtcgtaaagttaatttttttgatttttcaaaaatcaagtataacattaatatttacacatattcctatataaaaataaaaattaaaactccaaacaattaataaaataagtttagagcaataaataatatttataaatgtagagcatgaatagtaattttaaagaagctttaaaatagagaatgagtttagaacatttgatgtagcttgtttttagttcagttctttaaatattttagaaaatctttattttaaaacatctgatgtgaatgttctttagctagacaatgaattatactggtttgaagaagtctctgcgtcaattgttgaagtcttataaaaaatgtcttaatgtaattatcatgttataaaaaaatattaaacataaactatacatatgtatttaatttgaagtaaaaattaaactttaagttgccaaaaacaccacttacaaaaataacatttattagagaatactaataaatggtatggagtctataatttaacaaaattgccaaaatttgtcaatagtccaatatttgacaaataagagtatcgtattgcaaaggactaaaaagtagaaaatttgaaatcactacgacagttttataatttctcaaaagaatagagacgtgtttagtgcaaacacataagtcgaaagggtcttttcgtaatttgaccatactctttccctaaactaaaaacaaaaccaaaggggaagagagagagagaaacgccgaagaagggtttgggttttggtttcgaaaggaaaaaaaaaagaacgattatagagagtggctcgagtcaagactcacactcggtagtgtgtgttagtttttgttattgcaaagcacagattaaaactccatttttaaatagccgttaagtgggttttcttctcccgccatggctcagctcgagacccagtcccagagccagagccagagccagagcccacagcaacccccattagacctcatccaccagaccaagtctttgatttccgctctcaacttcgtctcccggaatctccctctccctgctgacctccttgacaccgtttcctccatctattatgacgccgaacgagatgcccaactcgcaagatctgaccagagtgactcggtatgtttttcttcgcatacccttcttctgtttttggtttctgactaatggggtttcgggtttttgacgatttttaaatgttggggttgaattttgattgtgggtacttttcaatttgggattttgtttggattcgtgaatctgtgttcttgtttgaaaggatgtttggttacagcatgtttgatttcggacttgtatctgttctttttctttaattgtacttgttctgataaatgtttacatatagctacatggagacctttaaggccacgcttaggctcaggcttttgtttgtttgttgttttttatttcgagtttttaaatagaacttgttgtttttgataaatttgtaatgaatgttcttccgtgcttttgaaaataatcacatccacacatacaatatgataaagctaggcaattttgatggtaatgaacctcctgcagtcagcgaggattggaaaaggaaaacaaaaaaccattctttatgtgaagttcatggtcccatttaaaaccaactaattttattcatttctgatcatcaacgttcgttgttcattggtttaaagttttgtgaagaaaaataatgtaaatgtttttttttcctgtctcttacgagcagtttaaatcaaatatttggctcttttagcaccatcccaaaggtaaagcactggtagaatcaatgaattaatttctgatgcaggacaagaaagttttggattatattagatatgatcattttgaagacttgaccttgtataacctttttgagagtaacagtgctttattagcacctaagctgcatttgttgggtgtttttttcttacagtgttggtatttgatatctgtga

SEQ ID NO: 43465 - DNA, 3221 bp, Cannabis sativa
ttctaaaattttacaaataggaccatctagagatgttatgacaaaactggttactttttttatctgttcgtgttagaaattgtctaaaatttggttatattaaaaaatatataaacttgttgaaaattgagtttagagtcctatttttatcattttagaaaatataggttctattttgtcatttaacaaaatagaggattcaattgataatttttataaaacatagagtctaaaatggtatttactatattttatgattttatataatttatttatatttttttaaataaaattttggtgtgaccaataaatttttgacatgtgttaatttttagaacaagaaatggaattgttgccattttttgagattggttcatctaactcaatttttgagagacttatggcgtaattttgttttctcattttttttgtttttttcttttacacttagtagtttgtagaattgtctcgctcaaacacatttgtaagcacagcttgtttaatagttatttttatttatttatttgtaaggttttaaattgtaagttggttttaaattgaaaatttgaatatactgttacgacgaattctaagttttatttttattttttcacataaaaataggaattcataacaaatccacattctttaagaacaaactagcagccaatttacactctcactacacttctacgttcaatttcattcatatccaaatatgtcaggaggttgtagttgctttcctgtaactcttgatcgttctcgtaaaagtagtttcaaatcatccaagtcgtctaagagtggtaatcatattaaatttactttgtacagtattaatataatgaaatgattacataagctataatactaaaagtgttttggcattcaggttcgcctaaagtgaattcatatgaggcaagaatagagatcaaaaccaaaaccaaaaccattgaaagttcattggttgtttgttttggtgagatgttgattgattttgtgccaacggtttctggagtttctcttgcagaagccgaagctttcaagaacgctcctggtggagctcctgctaatgttgctgttgggatttccagactaggagcctcatcagctttcattggcaaggtcttttgaaaatattttacttcttttttcttttgtccaatccattatggcaatattacattactaacaatccattttctaattgttaggttggtgatgatgaatttggacacatgcttgctaatattttggaagagaacaaagtggacaattcaggcgtagtgtttgactcaaatgccaggactgcattggcatttgttaccctgactcatgagggtgaaagagaattcttgtttttcaggaatccaagtgctgatatgcttctgaccgaagcagaactcaatgtaaatttaataaaaaaggtactcgtgtaatgatgttctgtttaattgggatgtgtttctttttattttcatgtcttttatcaaaaaaatttcatttgaatctctgcaggcaggtatatttcactatggatcaataagtttgattgatgagccctgtagatcagctcactatgctgctatgaaaatggctaaagcttcaggttgtctcctctcttatgacccaaatttgagattacccctatggccatctgcagagtctgctagagaaggcattaagagcatttgggaccaagctgacataattaaggtaaattctatgggggatttttccctgaaattatcacttaattatatctacaactgacatataattgatggaaactgcagattaataaggaagaaattgaattcttgactgaaggtgatgatccttgtgatgatactatggtgagggagaaactatttcaccctaatcttaagcttttgattgtaactgaaggcacacaagggtgcagatattacacgaaggttagtatttaatgagtgccttaatttgtctgcttggtagttaatggctctatatgttaatcaatttctttcatttataaccagtccagaatagcctaatttttctgcaccaatatttgcaggagtttaatgggcatgttcctggagttaaagttactccagttgataccactggtgctggtgatggttttgtagctggagtactgagcattttggcttctgacttgaatctgtacaaggtacatcacttctcttttttcatttaaagtactataacatagcttatatttgtgtttttcttctattatagcaacatgttatctttagttttagcattaaacattacaaaaaattcatttcatatcatcaatggtaagttagaaagcattacttaaattccagaaaaataagattctagttattaagtccatatatagacctatctgtatacatcagacattaattgtcctacacaaattatccttaaatcactaagaaaacagaaaataaattaaagtatgatttggattggaaaacaatgcttgatcctaattatgtgtagtatcatcattgattagtttaattaaacttcatttccagtacaagctaaagtttgcattgtttttttcatgtgcaggatgaaaagaagttaagggaagctctcctatttgggaatgcctgtggtgcgctgactgtgacagacagaggagccatacctgcactgcccacaagagaggctgtcctccaaattcttgaaaaaaattaatgcatgtggatgagctatatgattgagtaacttatcttggagagctttgttctttttctctttcttttttgtttaggaacaaactaggatttttgagagaattattgctaatctctcactaaataaatctgtctcatgtgcaacagatattatatttagcttctgaacaaattagtgtttacttttttcatgtttattgagattactttccatagttcaatcttgccagtcttatagatatgttttgtgcaaagtttgtgaaatttagaataagtactaaatactagtaacacaataataactattttcacaacatcatatagcaattcatttatcatacttacttgctttgactgaattaacaagaaaacatgttcaataaacaactatctgaatttctgattttctactgaaaatgaaaaaaaaaatggctgccgttaaataccccacctccagttaccagcccaaattaaggataatcatacagagatgcattattgggatactccgatcgatttaca

SEQ ID NO: 43466 - DNA, 7336 bp, Cannabis sativa
  modified_base (26)..(38): a, c, t, g, unknown or other
ttttctaactttatatgtgtttattnnnnnnnnnnnnnaattcatattaggatgttaatccaacatacttgtcagtaaatctagatcctggtaaaataatttcaaacacctgcatgctgggttatcaggagttgttttgggttgtatctattgtatattttggttttatatttttaaggcatcatcttatatagttcttttgttaaacgttttataacagggatccctagaacacactttttatgtcgttataatgtccgtttttagtattttatattcgtcaagtttttaatattatcacaatctttgataattaattcttccattagtattaaactagtttataaaattacacacatggcgtccctatagattagggcgttacacttttcttcctgagctagtgtgaggggagataacagtagacatatcagaagtagtaacatcagaagaattaggcaaacagaatcagaagaagattgagagatacgtgctatgtgtgaatcattgaattctgtaatgtgaggagatgcagaaaaaaaaaacattaatgtgtagggggaatacctccactattaacaaaaggaaaaatgtgttcataaaagtatacatcacgagaaatgaatgtcacatttgtgtttaaatcaagcaacttatatgctttcatggagggtatccaagaaaaattcatggaacagacctaggtgaaaacttagacttggattggctcaaagtaggatgcataggcaagacatctaaaatcttttagatgttcataggcaggagctttagaatgaagaatatcaaatggtgatttgttttgaaggttgggtgtaggtgttctgttgattagatatgctgcagtagcaacacattctccccagtacactaaaggaatgtaagactgaaatagcaaagccctagtaacattgagtaaatgttggtgctttctcttaacaacagagttttgttgaggtctttgcacacaggaatggtaatgcataatcctaagttcattgaacaagtccttgaattgcaactcttttgcattatcagacctcactcccttaatggttttaccaaagtggttttgaacaagcttaaagaactgaggtatggcattttgagcattagttttttgcttgatgagtttgatccaagtgtacgtggagcagtcatcaacaatggtaatgaaatacctatacccttcagttgtcatggtgttataagggcccaaatgttaacatggatcaaatcaaaacacttttcagcaatgttatggtttgaaatgaaaggtaattttctttgttttgcaaagtgacaaatggaacagtgaaatagggaattagaatcaacatgaaatttcaaagctttattcaaaggatgaacttttacacaagatggatggcccaatctatagtgccatacagtgtcattagaaatttttgaatcagaaatagataaagaaacataaacaaattttttgtcactatttttataacaattcaagtaatacaagttgccaaactttctacccatcccaatcaccttggtcttcaatgtgtcctagataacacaatttccatgagaaaataagaaagtgcagttagttgtggtcgttaaagaactaacagacaacaaattgcacttgaaagtaggcacatataaaacattctcaagaataaggtgagaagttaagacaattgttcctatgcaagaaatttcagtatgtaatccattaggcaagagaacaatttatagattgggatcagcataggtatttgtgaataaagaaagattaggacacatgatgtgtggctcctatgtcaatgatccaattcgtattatgaacaaaaaatttcttactagagaagtgagaaagtacaggttgatctttagaagcattaggagtattgttctgagtagttttctgtgcaagtagggccatgagcttctgacattggacacttgatagactagaaatgagatctctctccattggtgattcctctggttttccttcatctgttcgtgaaaatttcacactagcagacttccctgtagttcctttggcatcacaattgggaaacgttccatgatatttatgacaagggggatatccattaagtttgtaccacctctcaattgagtgaccattcataccacaatgagtacaattatactttaatctgaaaggttggacaactctagcaaactgtccattgttgcttgatgcttctttatcaacatcagatgaggcattacctccaccagttaagcctctttgtctttcttcttgaacaatagcagcatatgctttgttcacactggaagaggatcacacatcaagatcagagacctaacaaatttgtaggaatcattcaatccaacaaaaaatttgagtaatcgatcctcttcctgatactcttgaatcaccttcattgcaccacatgtacaaacaggttgtggtctatactctttaatttgatcccataaggccttcgatcgagtatagtatgtggtcacagttgagatccttgagtaaggctctgtatcgtcttctttgcttcaaatatacgaggtgcatttttctcattaaaccgttcatgtaactctatccagatttctgcagcattgtcatgatacatgatgcgattggcaatttcatcagaaatcacatgtaagatccaagaaatgacagtgctattgcatctacaccagctatcatagtcttcgtgatcatcatctagttgtggaagctttccattcacaaatttcactttgtttctagcaaccaaagcaatcaacattgatcttctctaggtgttgtaattctcactgcctttgagaattttcggaacaagaacaatacctggattatcaccattcgaaagaaaataaggattcaagagattgtttgcattttcgatcgtgaattttcaccaagaacagagaacatattcgaatcacgagatttgttctctgtttcacgatttcctcgagttcgagctccaccacctcgagccatgaatacaaaccagatcctggaagaagaaagaagaagaagaagagctcacgaagctggctctgataacatattagctcgaaagagaaagaacatgagagagagagagagagatcaaaacagaattgtattgaatgaataataattctcttacaacaagaccaatctctgctacttataccagtagctaaagtcagcaaacaactaacatacaaggacaccaaactaactaacttcctaactaaccaactaattgcaaagcttgtgttgatatggacatctatatataatatttgataacattaactttgtttatggtattttggggttcccatttttttagtttttcttttccactaaacttacatattttgtttaataagttttatggccataaaagtgtaacctaattttttccctgtattttttgtaaattccccgtgagtttggtgacacacaccttttgtaatttgttttatgtctcctgcatgtttcgattaacgggtatatatgttttaaatttatcactaaagccttaaagaacaatgttattaagatctaccattaaagttgttctctctttttttttttcctttagtactttattatttctaaaatctaatcaatacatattccttattattgtgttgttgctggcttatccaaactcaataaagagagaagaacactaaaatctcagtctataatgtattgccattaatggcattccactctctcaacaacagaagaaagagctagaaataccacccacaaggacaccaatcacaccacacaataaagagaatcccacctatcctactatggatgctttgccaaaaaaaaaaagttttaataatcttctaccctatagattctcgtttgccacttttatgatcattactatttttattacacacccactttattctcttcttcatttaagcctcctcctatattatttataacctcatcacaccttcttcattcccatatacacaactttttagcttatgatattttccgaacttatggcaaaaacaacatacaaaaagcctctctccttcatgactacaaacgtcctattttttcttcttagtctcataatcatcacaacttcttcccaaaaaacatgcccaccttgtggctccatacaaattccataccctctaagcacaaactccaattgtggtgacacaagatataactctcttcgttgtgacacaaactctcaaaagctttacttccaagcccttaatgggacatcttatgtagttttgagaataatgagtgagctccaaagacttgtggtaagaacatccccatggctacctagtaaatgtgttactcaagatatggagttgagtgaaggcctttggctcaaccaatctcttcctttcaacgtaacatcttcaaacacaatcttcctcttcaactgttcacctaggcttttagtatctcctctcaactgtactccttctagtctctgccaccgttacttggagagctccggccatgtggacaaaaacagagcttttcaatgtgccggagaactcgacccttgttgtaccttcatcgccggaggtatgccttcggcttacaagattaggcttcatagctctggttgtaaagctttcagaagtattcttcatttggatatggaaaaacctccaagtcaatgggaagaagggttggaaatccagtgggctcctccacaggaacctctctgtagaacccaactcgattgtcatggaccttctaagtgttcttcttattctaatggtgtcaacagatgtttttgccaaaagggtcatcaatgggacccttctgttggagtttgcaaaagagtaattaagggaagaagctcaaaacccagccaaactttaaaagtctcagttggggtagctttgtttttcattgtagctctagttatgacagtttttacagttagaaggtcttggagaatatcatctttttcaactacttcttcgaaaagggcaaagcttgttaaggacagagaagaaagattgaagagtcatggagctgggaaatctgctaagatgtttaacttgaaagaagtgaagagagcaacaaataatttctctagagagaggattttgggaagtgggggttttggagaagtctataaaggtgagcttcaagatggaactattgtggctattaagtctgctaaagtggggaacatcaaaagcacagaacaagtactaaacgaggttggaattctctcccaagtcaaccataaaaacctggtcaaactcctaggttgttgtgttgactcagaccaaccattgatgatctatgaatacatatccaatggaacactacatgctcatcttcatggtaagtttacaacttttttggactggaaaacaaggcttaaaatagctttacaaacagctgaggctttggcttatttacattcatctgcatatactccaatctaccacagagatgttaagtcaactaacatactcctagaccaagatttgaatgtaaaagtagctgattttggactctctagattggcttcaccagggctaagtcatatctcaacatgtgctcaaggaacactcggttacttagaccctgaatactatagaaactaccagttaactgataagagtgatgtttatagctacggtgtcgttttgcttgaacttctcacatcacaaaacgccattgacttctctcgtgaccaagatgatgtgaacttggccatttatgttaaacaaagagctaataaaaatggtgatggagtcatagaaattatggatcatcgactgttggagactgagccttcttcatcagtaacatcagctgatgatgtgttgaatagtgtaaagctctttctggagcttgctctttcatgtttaggggaaaagaaggaagacaggcctgccatgagagatgttgttcaagtactccagtgtataatacaagttgtaaatcactaagtgttgtttagtatagctaagatagtattttattaacttattagactaaataaattcctatattgtgaagttcttcttttgataagtagtgtataaccttcaagtatactaagagtacaacatttgtaactggtccggaaatgttctaatatcttctttcttgtatcaataataatatgatatttcatgtgatgtgtccagtgatgcttggcaaggccggttctaaggtatatggagtctaaggtaaaattaaattttgaggtccctatatataatttaattattattaaaatgatagtttaatattttagtgtaatggtaaaattttaaataactcttaagagttataaggttcaatcttccatagttacacaataaatatttttttctataaaaaaaataaagattaagaattgatctcttacttcttggcttaaaataaaatattttaccactaaactaaataatatttgttatattttttttatttaatattttatctatatattaataattttttttacaatttcgaaagcctgaacagttgggggtccgagacgcacgcctaactcgcctactctcaaaaccggtcctgatgcttggggtggggttcacatattgcccataagaaagtacttggacgagtgtgaaatggtgaaataaaagaaacttctttgaaaaaagtatattggttgaccgctaaatgagctttttatatggtttctttgaatattcatgtgtaggaataggagtggatatgagaggatggtgctgttaatgatgccaacaaggactgattttgaagtagtagtgactaatgaaccaaaatgattctaagggtggacatgagtgggcctaagaacacctctaaagaaaagaaagaaactaggatcagatgcttctctaggcttggaccctttgtgaatggaaggttgaatacataaaatatcctaaaggcaatgatttccaaacgtggatttatcttggaatctcattgggatttaccatggatttgcttttcccaagaaaagtaaataacctttgagaaatggaagaaagtggggtaaccatttggcttattaaaaaaactaaaagcactggtcaaatttggaaatcattacttgaaaagtattggcatcattatttgcacattaggaaaacactaatcaaaagctacttttagatattaagtgtatattttgagttaaatttgttagagattttataaaaatggaagaaaatcaagatttattataactctattgtaaaataatacaaggactaaaataagagattgattaaatatatgttacagtacatatatatacactatatatat

SEQ ID NO: 43467 - DNA, 2031 bp, Cannabis sativa
gaaagttgtctaggatgttgataaactccataggaactttttgtggggtgcgaaaggcaatactagtaagatgcacctagcctcgtgggatcttgttagcaagcctaagaagtatggaggcttgagtttttgagaaggagccaagtggaactaaactttgattgctcgatacatttgggttctttctatgaagcaaggtgttctttaggttaaatggatcaatgtcatctacttcaaaaactaagttttttgggtaattgataagaaaggggatgtgagttggtattggcgtaaacttctcaatattttaacacgggagacaatcctgaatgctgggaagggggtagattttcgctcagattttactttacaattcctttcttgttctttatgctaaagttgataattgtaaaataatttggtgtaaattatccataccaaaacatacatttatcatttggcaagcctctcataataactttataacaaaaatcacctactgtcaagaggtacatttctcccaatgtgtgatgttggtgatgggtgtcatactcatcttttctttgagtgctttttttccaagcaagcaacttctgtatgtaattaagtcttggcttggtaagacaatttggttagtgtcatgaccgattggctaatgtggctgaatattaaatgagatcacaacctgtttcataatattgttgcggctacctatgcgacaacaatatattttatttggtggaaccaaaatacttgtatttttgaacaaaatatgtttatgattttttatgtgaataatttgattagagtattgaaattataacttattgttaggaggaaaatttttaaaagagatcaacaaattttttattttatttgtaatatgtaagtgagtatatctattgttgtcttattatggatgctgatttgtgtatcattttttttattaataaaattctatcatttaattaaaaaaaaaaaaaattgtactgctattcaaagcgcaccgatcgtttgctatctgatgaaaagcaatagctaaataaattaatataaaccgcgttaatttgacttttatcaatcattcaagtttaaaaaaccagttgaaatttataacaatgtcaactcttatatatatttatagggaagggtctctttcaaaaatatataatctaaacatatctaaatggaaaaaaaacgcgtagcattaaactataaaaattttgatcgacaaatggcaagtttatgtattgtcttgaagaatcagaagtctgaaattacggtactgatatcgtgagagcatccattaaataaatgaaaatgaagcagttgatcatatatgatatatatatatatgttcataacaaactttagtttaatataagtagaacataccatgtgtatagaaacgtatactaatataaatgggaattatttcaatttccataatactgtattgaataaacttgatctcttgactctttttatgtatataaaaaaaaatacgtgagataggattctacatttctttcttgattttctttatttttttgattattttgaacaatataacaaaggattccacattattaattagacttaaaaagtcaaaatgtgagtgactgtaccactaccacccaccacagagtgttcgatgagaaattgagacctgggccaggcttattacatggaatgatggaaagggccacaccagccgaccctacgacaagtttgggctttaaaaaacaaaatatatgagataatgatattttgaagacaattttgataaaaatgggatgtttgtgttgggcctgccccctcccctcccccttccatatggcttatcttgcttaattcatgacgccttgagacaatgtagaattaattgggttcagatctgggagtaatgggctaaaaatttctaaattctttgttcaggatagtttcattttactaaattttaccaaagaggaaggtcatgatgagtgcattaagtttgagttttataaaacattgatgaatgtaggggta

SEQ ID NO: 43468 - DNA, 3339 bp, Cannabis sativa
aaccgactagaaatgtgtttttctcgtgacaaaggagactcaataggagatggcttgttcacgtccgaaggagcagaaatactttttaaagtacgcgccctttccaatccaaaatccttagctcggctagttcccaagtctagctgaaagttatcgagcgactctgaaacaggcccaagcaaagatactggatctgggatgtaactaggatcttcaaaaagctctgactcctctggtttatgttcacgaggcccttctccaacacgagggaatatgggttcaattgcaggtgaaaaccccagactactgctagttggtacgtttggatacgtaggaagagtaaaaggtgacccaaaatttattggattatcaaatgattgtgttgttggtggctggccatataactgtgggctttgaacttctacttggaacttggaattcggtctgcttatgacatttgaatttgaaggaggagcaggcgaacgagtaaataattgctgccaagatttcttaggagcggtacctggttgtaattcagtgtgaacctgcaatggaaagctcagtattgtaacactgtcatctgataaatgagccgacaccatagaattttactgtgtgtcactatgtctcactcgaaaagtatagtaaaataaaataggtaccccactgccaattgccacaattcatttctactttaaacatcctaactaattaatctagcaaagctagagctcaatcctatgaatcatgataataaatacctttaaagcataaaatggcataacagtaagattggaagtagatgacaaaatatatttcaatacaaaatatacatatgtgattgcagcagggggtgacaaaaacctaacacaataacattcaaaacaaacaaatcgaaagctacccttagaaaaagtgacatagggaaaaaatggaaaagcacagacagtacaaaagtatattaaaactcagtgtggttgcaagagaacgtaccagacggttagtattcttatcatctagattcgtacaagatctcaaagccacacgctcgggtggacatacatccttcctgtgaacagcaatatggccctgatctgtaaaactattaggtttactttccttggccgtagtagcagcattgctagttccccttccaaagaagctacccccaccaaatgctttagaagacgacaaaaaggtacctctcatacgatctaggtatctagttcctgaattaaaccgagtaaagttacttgaagtatgtctcatcccaggaccccccatgtccatattctggcccctaataggatcaatccctgatttatgatgttcccttcgatcattctcatttttcctatcgaagtctttctttctttcactttccttaccggttttcttttccagctcttctacatctgagttgctcttgctagaacccttgtctttctcttttcttctctcttgacgcttcctttccgcttctttcttactatctttctccttgacgggagttggcattttctcacgatctttttcagtctccattttctcatcccgcaatcttcttcgctcctccaccaatctcgcaacctcctctctctgctttctctcttcttcctccaacatttctctctctaacctagcttgtcttttctcttcagcttttcttcgtgctttttctcctctactctcataactcccgccattttcgcaactctttgccaacatccccttatgctctgcatcagaagaatcatcttccgtggatgaactaattctaaaaatctttctccaaagccatctaacgctcaagaaaaaagacgttaaaagcttgcaggcaaaaataacaacacccgaataagacttctcagccaaacaattttcatcccctccaaaaagaccactcccattcctcctccaatgagtattctttccagcaaccggactaccaccaccaacccaatttccattctccaaccaatcttggccacacatccatccattatcagaccaaacttttccattcaatatcttcccactcttaccaaccaaatccttaagaataccagcattcgaaatcccagttggcacaggcaaatccaagactggtcttttcgaaatgtgcccacaatacgaacacataaaccgacccccaccaggattctgttctctataaggagttaagcaatttcgacatcgcctagttgctgtctttctaagcttctgcaattctatagcttcagacctctttctctccctaagacgagcactccttctaacccgccaagctgacagctgaggcatcaaaatctcataccaaaaaagggtaatcaaaagtacaaaaacacatgccaacctaggcgaagtaatctcaaatcgataagccggtggtagtagctgagaaagtgcccacaaacctatcagtggaataactaaccaaggaagcattgtagcaacccggcgagaccacttctgaataacacaaagtatacacattatcctccctaaccccacacctatcaacaaaccctagaaatgtaacaaaacaaaatcttcttcttcttcttcttcttcccccccaaacacaacaacaatggcttcaaatccccaaaaaccctactgcccccaaaatacccacctgcctccaattcctcaatttgcgaagaacacaaacagcattaaaatcccaagatccttcaacaagtaaacaaaaataaacacccccaccattaatattattccaagaaaacattataaatgaagctcaaagactcaaactttagggtttccattaaacaaatgctcgtattccaagttgcaccgtccaaacaaataggtttaaaaattaaaaaaaaaaaattaaaattaaaattacttacagattcagactccatgaaagcaagacaagaaacagaaatggggggcaacccccaattaatcttctccggtaacgaatcgaagccgtttgattatccgggtatggatttgtgagtcgggtcaaaatcgggttttggccgtgaaaaaaggttttttttttttttaacgttgtcgtaacacagcaaaggtgactctgagaaaagataagaaagattggacaagaaaatatatatatatatatatatatgaattagagaatgtaaggaaaacaaattataaaagcaatcattttttattttatttttatattttatatatttatttattgttataattttaaaaaatatatattaattttatttaaataaactggtaactgggtagttgaactggttgtctttttattttctttatttattttttatttttatttttatttttattttatggttacttagctag

SEQ ID NO: 43469 - DNA, 1650 bp, Cannabis sativa
ccttaatatatatatttttctaaaagtagaaataaataaaaaatacatcaacacactcctttgaggagagttcattgaaaaatcacctaaatattatgatacgaattttttttgtaatagctagtattgtttttttttttttttgaaacaataatagctaagtattgtagaatcaaccaaattgtaattttacacataaaaaacaaatgaagtgaaatttcaaaggacaaaaaggtaatttgaggtcaccttcttcctcacactccttttctagctatcaaaccaccaaaaaagcagactcaatattttctcaacggtttcttcgtatcaatttatttatttattttaataaagaatttaattcttcattttcttctcattattcacctatatatatacatacaatacagacaatttagggcataaaactgttccagtcagccatggaagaatccatggagctccgagctatgaagaagaagaagaagaagaacacgacaacaacaacaacaaccgaagaaagcttgaccaacttctttgattttctctccgaagaacttgttgtcttaatccttgacttccttaatcaaaacccatttgaccgtaaatcattctctctcgtctgtaagtatttctactccgtcgaagccaaacaccgcaagacccttaaacccctgcgatccaattccaaacatctcggctctgttctcacccggtacccgaacttgacccgaattgatctcacgctctgtcctagagtcgctgataattcgttagccgaaatctccaatgcatgcaaggcgaatctcaggtccatcgatctttcgaggtcgaggtttttctcgggagctgggttgttgaatttggctttgagttgtgagaatttggttgagattgatctttctaatgcgacggagctgatggattctggtgcagcggcggttgctcaggctaagaatttggagagattgtggttggcgaggtgtaagatgattacggatttgggggttgggtgtattgctgttggttgtaggaagcttaagctgattagcttgaaatggtgtgttggggttggggattttggggtgggattgattgctgttaaatgcaaagaaattcgtagtttggatctctccttcttgccggtaaaagttttatttttattggtgaattgattatgtttcaatgtggcttttagaattgtaatgatatttggaagaaaatggtgagttgattaatgattttttttacagatcactgatgaatgcttaccatctatcttgagattacaatatcttgaggatttggttctagaaggatgttttggtattgatgacagcagtcttgaggttctcaaatgttgctgcaagtcattaaaggtatgcttgggttgatgattagctagtttttatgataaaactttgttttgtaagatgttaattggaatagctgattcataatatttaacaatattttattgggttgggtcatagccttggaaagtagtttgacttttttgctagttatattcatcaatttctggaatacacaattgacaattcaatacaccttgcaagttgggatgatttatactttgtttgtttgtgtttggattttgataaacagagatagaattgagctttgtggctt

SEQ ID NO: 43470 - DNA, 4403 bp, Cannabis sativa
tagaaaatcaaatttcccttttgaaatcactatataaaaataaaatatacatttaagttttgaaatatatttatattatatgtattatattttaaaattattatttttaattatatataatttttttaaaaaaaaatattttaaaatatggtgtagaattgaattagattagttacttttacatatcaaataacattccattcgcactagtgcgaattttgaattttttaaaccaatccaatccgtgcagatatccgcactttacaaattaaattacattgactattttacgaatacaattacactgttggggagaaggcgtgaggtaagagtgtttttttataagtaagacttatattaaacaaaacgaaaacacaaccgaaacagagttcaaatagcaatcacaaaggggattgcttccctaacaacagaccgcctgcaaacacgataaactctggcaagataagctagcttatcagcaactaagttctctgcatgaggtagaaacttgaaagaaacacaactataaattaattgacaaagacaagcaatctttaaaaataggataagacccccaagcaaaaggtaactctcctgaggaagagccttgactgcaactgcagaatctgacttgatcaaaatagagctgcaattttcctcaaaagccagtgccaaagccctgtggatggccaccagttctgctttcaaaacactacccacaacatactgagattggttcataacagcgacatcatcaacaaaaccatattgaaccagaccaatcctaacatcttcatccaaaatagaggcatcaactctcaaccacaaatcccaaacttcagtatctgaaagctgatgaagagcaacatcaccttgaatcactgaggggacttcagtattcaaactagcactaaattcattcaccctcttcaaaatacagttgagagttcccatcacactcagacttatgccacgaaagagaatgtcaatccttcataaccagattgcttcgaataaacatgctacaaacaccataagcttattatctttcacactgtaaagccaagcaaaaaagtcttcaaaagtcgaaatagaaagattttttttgtctttaaaccccaaaggttgaggaaccataagctacagacaaaggaacaaccacaaaaaaaaaatatatatgaaactcagactccatgtctgaaccacaaaactgcaaagcatctcttgattagaaagaaaagtcagacgtattttcagaggaaaacggtccttaattatgtcccttatttggtacaactatgcttgcatggaaggatctgttgctgttgctgaagagacttgattgactggccctccttggggggctgcaagcttgaatgtgccagggtctggctggccatactctaagagagtgtatggtggaggtcagccagacttgtattgtgttgtaggccttggctagccactcctaagtagggatgttgaatctggtcgaccaagcctatactgggtagctatccatgtcggtctgccctgtcccaggcaaggcttagtcgcccatgactccttggttggttgatgtttctagtgtgttgaaaggaggtagatcacaccagttgttggagttaggtggacctagatacctgaagtgattagtctcacttctcaaattgttgttttgggtgtttccacctattcacagtcctagttggttgaagattggcctttgggtggctcgctcccctcaaggagggaatgcagtcccctggctagcctgaggtgcaccaataggtggctggccaaccaaaggttggtcgatggggctgttattgagcctgagatccctggtcggccccctagattgctagttgctgagatatggctattcttgccattagaccttcgtggcaagacctgttctcctttgggtaggggaaggtgtgtcctggttcctgaagaaccttgtaggtcagcatgctgataaaccctccccgatctgttaactagtcttccttggagtggatctttgatgagattctagtctcttctagtggttctttaattgaactgccttatcatatcattttcttctccattgcgatgatccagctccgccaggtgagatcagaggatgtcctcttggtcatccatctatcttaggaattcacgtctctattgagagaatacatcataatcagcaacacatggttcttcagttaggctggcttggcaggcaacctctctaagtttggctaactcaagatcttctcctaagtccacatggggcttgctaatagcaagctcaccaattcttggtcctgtctctctagcatagtaccaggacgaggtcaggttgttattcctaggggttgttccccaagggtccttccttcagtgggaggcaccagtggagggtcctccgtcagaggcaagggccgattattcagatccaccgagatgtttgtgtcactctggccagctgtagtgactagatttaaagtgcctgctaaaatggcaggattgaccacatttgcaatcactactacaaaatagacttttggtgtcagttcgagtgatgttttcttttaaaaaactgacactaaagactaccccaactctttggtctcgatttataactgacacttataatgacttttagtgtcagttaataaaccgacactaaaagtataaccgtgaccaaaaataatttttttaaaaaaatatatatacagaatgagtatatgtctcggtttataaccgagaccaaaaacactaaaatgttctttggtctcggttataaacgagacttataggattttttttttaaaaaaatagaataatgaaaaaaataaggataaatacaatatattatgaaaacctaatattaaccctctctcttcccttctctctctctctcgatacgctctctctctctctctctgcttcatataccctctcttcttcttctttgtgcggcgccgatggacccaaccccagaaacctaaccccgaccgagaacccataaatagtccctcaaaattgcgagggtttcttagcaatggggctttaatggattagaagaatttagcatttaagggaactgtgaagctcttaaaaaatcttcatcttcatcttctccgccttcaccttcttcaactacagctccagaaccagacccagaaccggcctcgccttacttcttagacacacttggtacaggtcggttcttgaccaatgaagagcttgatatgctcaaattccttgatgggttctcgtattctcaagaattggaatctggggttttttgtgttcgggttattagagtagaggaaatggatatgaccatttatttgctcgctgagtcctttgttgagtccatggatatgccttcggcttatgatactctgcttaagtttttcataaagcaacacttgatggaaagaaggtctctaatgcctcatgctgtaaccctcgttgggtttttcagaaagaaaaaacagcaagaagaagatgatgatgatgatgaagaagaggaattagcggaaccgtagaagttagttttgacaagagaggtgctaatacttctacttctcccccaacgcctactcatcccaagaagaagaccaatggggcttcattatcacctcagcttcactcacaggtatcattttgaggaacaatattggtttcttgtagctttaatccatttctacaaagatttaatttttccatttcataatttttgatttctctctgtttctttatttatttatttttttttctatggtgtaattttatttatgaattaatacctgtgtttttgttatgattagtgaaaaagtattagtttagctattatgtcctatttttcaagctaatacatcactgcaattcgataatctagatcttctttttatcttagctgattttgaaatattttatgttatgttagtgtctatgaaactgattgccagggctgtttgcatttgctgtgagcgctgagtatgagcagacgccatagttgatccgtttctgcgaatcgtagaggccttttatggctgcaaggaactcattgcctctctccttttcgtcatttcaggcaaattttctttcatttttatacatttatatatatgtatattgtttagttggaattccccagatgattgaagctgattatactgagagcactattattctccctgagagaatcaagccaattttctgatccatacattcacatatatatatatacatatttttgtttcttttattattaagttcaacctaacttatatttcaagatgactatttccccaaatgatcgaagctaataatattgagcgcactaatgttcatgggaattctagccgtggctggaacatggacataaggatttgcaa

SEQ ID NO: 43471 - DNA, 3747 bp, Cannabis sativa
  modified_base (1803)..(1803): a, c, t, g, unknown or other
tctcaaacttgcactagatatacacttaaaatgtagtgtttctatctcatgtgggactcctactcacacacttcacttttctatttttacatatttcctacaaagttccaacagtaattaattacccgaataaggctagaaaaagattaaacacaaaataataaaatgaaagaggatatatatataatagtgattggatttccttgtttaggaccctttgaggcatgatttttcctctctaactctctccattgattaattatatactttgttataattaacccacttaatttgactctgaaacaaatattcttaacatcgatcagccttaaatattagccacatcgagtttaactaaatatattataactcttcacaaattaaagcatgcactttaattatttgaaatttattataactatttgaacgaataaagtattattaacaacccattttgaaacagttttgtagatctttacaaagactcattggctaaattaattcttccattttttttttattattatttatctacatttgaaatagacaatcaaatatccaagttcaaaattttaaggcaaacactatatatatagtatagcctcatttttattcattaatctataacacatagtcatcattatgtcctttatttcaaagataagtattattattcaaattattatcaccattaatattttttgatcaatttagtaatatttgtactttatatgtatgagctaaaatttaaaccaaattcttgttggaattcgaccaatttttttatatatatatatatatagatttctatgtacagttttttatagtacgtaagcttattatatttttattattactataatataaccgaatttcatgatcatcatgattctctctcattaatttattatttggaatttttttacttactttttttagataaattattcaaacaatctatacacagaaatggtaaaaattctccaagagagaaacatgtatattatatgtgtaaacactaatatataatatttttttttaaaaaaaaaatcactacaaactgtaaaaaccagttgtatatatatatagagagagatcaaataccatgagagttgtatccacgtaaccctacacataatcctagaaaaaatttgcttgattctcgagaaaattttaaactaatttttttattattattattagcttcgtcaaaataatgatcatgagcacacattaataataaattataataatttttgttaaaattttcacacattggattcctcaaaactctagggttgactgagctgtttttcttggtcaaacaaaatctatacatattcgtaccaaaaaataagcatgagatatatagataataagaataattaagtttattatattaaatatatatagagagaatctaatatatatataaagaataaaataaaatttgacagccaataaaacattggttatatatataaatttatagatatatgatcacatggtatttctcagttagtgtgcccaaaatgtttttgatgtaaaaataaaaataaataaataaataaaactaataataataataataattaataagaaaacattcgtctatttattattggttatattggtcggtttataagccaacttgctttatatatttttgtttttgaggctttttattaaccacgtactcgacatgcactactttaaattcttcatcaatttccaagtttttttctattattattattaattaaatatctctatttttcttaaaaataaataattaaataaatnaataaataaataaataaatcaaagtgatgttattattatatattattattatatgtgtgattacgtactacaagaatagttaaaagggtaagtaattttttttattattacaggttaatttgtgaaaaccaactaattctatttatgctcaaattaatgtaccaacaagatattaaaacatcaagatattctgttggttcttagaatattaattgaaaataccaattattttgtaatttttcttttgatgtgaaaaaaaatcacccacatcctttctctactccttcagttattctgataatttttgcgatcacgtgtcaactatagagaattttatacttcagactattttaattgggtcatcgatagtcacctcaaagattctcattacacaaatgtcaccatctctaataagaaccgagcctttatttaatctctttcaagaaaaactaaagtaagtttcgaatccttgactcaaataagaaaatgccaataaatataattcttaccactacaccacacaacacttaatatatttttaccaatcttgctataattgtcaaagcaattctagcaaagcaacatttgatatctgattgtcaacttttattttcctctttacacaatgctatatgttagataatcaacaaattaagtatatagtatatattattattagatattctcaatttttctctgatggtaataacattttcaagcataatatttaaactgatatacaagctcttaatttgtattttagaatgttaaaattttaataaaattactaattattaattaatttattattatttagaaaaaataaatataattctagcaaacaggcagttagtatctgattgtgaaacaaaaaattacaccgctcgcttatttaatcgagtattttttttttttttaaattttgttaaacgatttagaaataaatcgcttatctaatgttaattcaggtcgtgttttcaatgttatcatcactaattagtaatcttaccatttgtattctttttttcttaaaaaatagttttgccagaattttatagcaaacattttgaaatcaatacatgcatgatatacgtacccaaaaattataaattaggccaacaaatttttgtttagttaaatgtgtattttgtgataattaattaattaatgggtacgtacgtaattgacaaaatcaatttaattaaactatattataatgctgtgaaaattaatgagttcagataagcaaaatttgtggaaagaaaatattaattcaaatgaatcctttgaattttttttaatgggatatatatttatatttatatattatacacataaaaaataaatgagaaaacaaatcaagctagctacatctataaatttttcccatcttaatttttttttttttgaaaatgcccatcttaattattactaccctatagtgaggattatgtagtataaataaatatgtgtatagatacagtgtaaaaattaaactatatatattatttaagtttctttattgtacatatagaaattaaagctaattattgacaatacttaaaaatgaaaaaattatttcaattttttttttatgaattatttagattatatgaaaatcaaagttccaagtattatttgtttgtgattatatgtgcgtataagaaattatttaaactctttttttttttaagaaaaatgcacaatgccctaattaacaacaaaatagtatagttgttacatgaacaattatcatatagctagcatgcataatttatatatatatatatgattaagaagctagaaatatgtattaattaagtatacaagatattaacatatattgcaaaggataattacaaatatatttatttatatatatatgtgatgaaaagagagatatcatcataaagattaataatctactctaactcatgacttaaa

SEQ ID NO: 43472 - DNA, 2213 bp, Cannabis sativa
  modified_base (320)..(332): a, c, t, g, unknown or other
aaaattattttttgttctcatttctaaaaacaattttttaaaacaaaaaacaaaaaacaataccaaacatgctctaaatatttcaccatgtcttcaataagtgaagtgacataatattagaagtatccccatatttatcttaaagtataaaaatagttaaaacattaattttatatatttttaaaattgagatgtcgtttatcttaaaatataaaaaattattgggcaatattgtcccgcatgaatcaaatataaaaatattgagctatatataagaacatgggctccactcatcaccaattggttttgaaatagaatcnnnnnnnnnnnnnatggtatcagagccatatccctatagcgggctttcgatccacatttatcaaagagttagccagccgcaagcaagcaaaatgatactcccagttgcgaacaagaataaacgagcaaatgacactacttaattatgataaggtgattcaagattggtgagcaaaaatagtcaccgtcttgaggaagaatattgggcactattgttccacagcgatcaaatgtaaaaatattgagtcatatataagaacatgacctacttcactcatcaccaattggttttgagatggaaccccataattcttaacaaaaataattaaatattttattttcaaaactttcgatagtgtttctatttattttctaaatttctattatgttttctatttttttttaatttagacattaatattttcttaaaattttcttttcatactttatattataattatttttaagtgtattttatttaataaaattgtataaaaataattaagtatacctccgtaagtgcaattgcacgtaacttcggcctagtatagtataaagtgaaatgtttaattttgtttttgtttagataattattaaataaaataaatctttttatttttaataaaaaactatttcaaggtgtttgaatgaattttattaaaaaaattgtgagtaaattattttaattaatttgaacatatagctaggtttaaaaaacttattttggctcaaaagaattttaaattaaaaattgactgtttattctttatccagttgcagtgctttaatttttcattataaaactttttatagaaaaaaaatatagaataaaattatgagttgtataattaagaatttactaacgtcaattcaagctaattatatgtccacgcgcgtccaaggaattagtttataaatatttggttaaattacataaatatatcataaaataagtttataatatgttatactaatttatctcaaaaaaaaaatatatatgttatactaattctacaaccttaatttaaaaataaagttgatcatgtcctcgttgacttcatcattatttttcttgcctatttgactacatagttaaaataagtagaattctagaaccatataaatatcaagataattttcttttttcaaaattcaacatgtttccttttaccaaaattttcaagaaaattatcattagtttccaaaaagacaatacaaattaattattaattagattagacatgtaaatacgggccaaattttttgacacggtacaaaatcagcacgagcccaaaaagcacgagcacgattaggcacgaaaaaaatataagcttaaatatgacatgacacgatgctataaattgccacgacacaacacaaaaaatatgtccttaaacacgacacgagacacgagaagcacgaaagatacaacacgtgcacgaataaactagctcgaaaagcacgacatgcgacaaacgcaaaaaatacgcacgacatattataatttattattaataataataatatataaatttatcaattataaataaattaaaataataataaaatttatatgtaatactgaatattataattctataattaaaaacataaaaaatgattatatattaatttatttataggggttgttataaaaatttgagtatttttaaataaatatttacattctcatgttaataattttttttatctctgaattattgttcaaaaattatataaatataattaaagctataaaatacacatacaatttaataattgtaaaaatgatatgaaaaagtaaagcatgaatttaagcccggatatcaaaacgggttggccgcttatttaagaaatacaggccagtacaagcaaaacacgtcatgaaaatacag

SEQ ID NO: 43473 - DNA, 2051 bp, Cannabis sativa
attaccttgaattttattgttgcttaatcaaaattcactttcaaaatggtatttgatgttatacttgagagaagtccattaagaggatagagtatttctctgtcataaattgctttttgtttattccctgctctgttcatgataaaaatagagaaaataccaatcttggtttactaacctggacctggtgaccaaaaagtggactagtcaaatctctcaaattcacaaaacgacaatgaattttctccatataacgtcaatttcataaaatttatcaatgcattacaccacacacaacacacaccaaccaatattaaaaaaaaaaaagagtttattgaagcagcctgcttgctgacacaatcagataagccataatgaataaaaataaacaaaatttaattaggaaaacgccccacatataatattgccataccaactttgagtctcaattttcctttttagcagtttcatcaagcaatgtattttggcatttatcatattgtcttcatagaaaacattttatactcttctctactctatgcttaacataattattacaaatggcataaaaccctacagaattaaagttttgtgagatttatataaaagatctcatcaaaacttggtcaaactaaagctaatgcataccttggaagcatattgaataacgtatacacactaacactataccttataactcttttcagtgcattattaattctatcaattacacggtttaaaagctagttttattaattatatcctgaaactgaaaccccctttatccaaagtcaacttttgcattaaataaaataaataaattttctacgtgatattaattattaagcctaattaattagcagcagtactagtactagtaaggatatatggtccctcttattaatagcatttttcaagtcattaacaaaactttcatagaactctagttttagtatatagtgttcattattcttctgctataagccctctttttcttccttagctaattcatcattttttttttctggggctatattaaacaatgatagttcagataaaaatcatgatgttactccttgttttttctgttttattacagggattttcttgtaactgtcgaagtttattaagaagtgaagattatgaaagagaagaaagaattgaaaatcatcatcatcatcataataaggaacaaaactcttttatggtgatctcagctgccactgttggaaacagaaagactaataagatgatccctcttcatcatgttcatgctgtctcacacagagaagtgcccactggaccaaaccctcttcacaattgattattattttgttaattaattatgtgtattgttttaggaattattacaagaaacttgtcgattatatattctggctctttcgttttcgctttatggaaaatatacttaaatagatttttttttagtctttgttttctttttctttagtgtgtatataacgatttatttggtccagtagaatttagagtgtagttcttagttttcagagataattagcaaagtcaacttttggtatttggtagctcagctgtgcttgattattaaaagtttagctattaaaagagaaagaaatatgaaacatgatcatcaatgtactaaagtttttagccaatttaattgtcacgtaggttaaatattatatagtaatgctactataatatttttattaaatatatataatttgcaggcagcatataatatagcaaattaacaatttttataaaaagcaaaataaaactaatggtttaacttatcgaatttggattaaagaaatataaactagtaatctttcacaatatatattttttaaaaaaacatgctagatataattgaggaaggcatgtgcctcatagttttcaaaaaggtataaaaataaaaaggtggaatagtgcccacttttgcccatatttatatacttttttttgtttgttaattttaaaataagggtgctatttatttttatttgttgaaaggagaaagaaagggtgtttagtgattaaaattataa

SEQ ID NO: 43474 - DNA, 1899 bp, Cannabis sativa
aaaaaaaaaaaaaaaaacacactccttagttaaattagggagtgaaacttgaaaaaataaactacaaccataaaaaaaaaaaataactctctataataaagaatagatatgtaaggagctcctaacttttttaataaacttttttaataatattttaatcaaatactaattaaagtagagaacattagagtaataacaataaaaataattctctattttagttttttaactaaaaaatagagaatactactaaaaatgctctgagacctaaattctaaattataaatttacgacactaacaagtccatattcacaaaactacacggaaattacaatttaataatattagatatttatgcgactaagtatattattttacaaactcaaaacttgaagtatttatgctgcaaatatctagtgtaagttataaccataagccaatcaaataccaagtcaattaataacaataacaaaatgataaatgtctagagttaaaaattttaggaagaaatattaccctaatcataattaagcattttgtacctataagagtacaagtaatactaattcatgttttgttgatacaaagttagctccaagaagggagaattttgtaataaaaagacatcaataccaatattactcaaataaatgtaacaattcttaacaatcaatttgctcataatacgattgtcaagaaacaaaacttgatatgtatacaactaggcttatatgtagacaccacaacaacaagaagtcaaggagaaagaaaactcaatacactaattggtgggttcaaatgtagcctgttcatgccaaacaccactcaaatttgattgccacaacctaacaactccatcgtttccggtggttgccaaggtcattccgctcatatcccattccatctcccatacctgatcacaaaaagaagaccgcatgtacagtcagttaccaccattttaagactgtaaaacaaacattgctatacatgaagcttggtttgccaatatctcaagaatctctctcttgaaattgaaataacagaatgctttgtactacattaaaatcgtcatgatatcagtaagtgaactcagtcaaagaaagtggcattggtagtattaatacctcgcctccatggccggagagcaatgcaacttgctccaccgagagtcttccatttgtgtcaggggtcaatccaagatgccatagcgcaatcccctcgtgggttgcaacagcaattatctcatatggcctgagtattaccgaaaacagaaatcagtattagggacaatgcactttctgaattcatttgttccataagcacatgcaacagaatatttaattgcctgtaatacgtaattttatcccactttgttgtacctgccaatatttggtgcccaggcaacagagtagacctgatcacccttgttgccatccaaagccaattctgcaactggaagccatctttgatgagcttgatcaaactcccatacctgaatgaaaactagatcacgattagcagtgaatcgattaaaataaaaaatgaaagctatttaaataaaactttaaagaccatgataatctataagcaagtgcataccttcgaggagttaagttgtggtgtatctgaattgaaacccagaacaaaacttaattcctggctttcacctcttggtggattccatgaaatagatgcagacatacatgaagctttgctcaaaatagaaactgaatcactgacattctgaaattcggcctgaccaaaatgaacaattccaaacatgttaatatttttcttttcatctccgatagagtacagtaatgactaaatgttagaaaatcataaaaattcaaaagaaaagtcggtacatagcttgcagagattttcagtaatagtat

SEQ ID NO: 43475 - DNA, 1724 bp, Cannabis sativa
ataaaaacaagaaaatggttagtttggtggccgaggaaatgttaagaccctgtcaatgatattttcaacaacttggtcaagtctttcacctatctgagcgctaaaggcatgacctttttagtcagaaacaaaacaaacccataaaattagaaatttcacatctcaacatttacagcccttttcactttccctccaattttcccggcaaccaaacagttaagcaaacttacactaaatgtcgggagtcggggcgtgttcgaagtcggggaagcgataaccttcctgaggtcttcggcgccggaatcgtcgcaaggctctaacaaagccttgagcgaaatcacctgctggatcgcctgggatttattccacgaaggccttcgcatccctgtataaacacgtgtaaaactccaatatttacacacaaaatacatctacatatatattaatttaaccacattattacaaatattttatacatttgttttctttctctctctttcctttaatttttttacttctcatattccaagacaaagaaaaaccaatcaaatccgccattagaaagaaagaaagaaaaacaaataaaagaaacctttatctttgaggtatttgcggcagtcttcacgagtgagctgagaaatgtcatcttcggtaagctggttaaggggcttctcaagtatggagcgaaacgtcgtcgttccggcactcatggcgggaatctcgccggaaacggagaaggtaggtcaactatagtatatggaggtgtagtagtggaagtagaagtagtggtgatctgtagtgaatcgtaatatcgtcaaaattgaagggcataaatgtcaaactaaaagaaaaggtaaagtgagaaagagagtacgcgtgtgtgagtgagtgagttgtagagagagagattaacctttttagcaacgaccttgcaccctagactgccacgtatgcttttctaaattattgtcgacttttaacccttcctgagaaaagggtatccgttaaataaagatagagcttaaatatgcaggcggagacatgaaagaggatagggatcatctctaatccaaaccatcactgttaacctgggtcacacctgcctagagctcacccaccttgtttaaggcccaaaaaataatttgttttaaatacacaaagatttttggcaaattttttaaaaatactatatctctttacaacaaaaactcgtatattagccataaactaagcataattgaagaaccaatttttttttaaaaaaaaaaatagggttttttgttcttttttatagttataggaagttatcttttttctccgaccaggctcgccggcctttactgggcataggtttggcttggtcgggactgtgttttgcttttgtaattcgattttttctactacgattagtcttatttctgtgatatagttttgagtgttttagtcttatttctgtgacatgactttgagtgttttagtcttatatgtgtgacataattttgttttgttttgttttatttctttattgattcttcatggcaccgttgtatagcatgaagcaatacttgagcctttccataatggtagggttgtacatttcaggccgaaaattatcaccaaaccaaaaatgaatttgtttttaaacattcctttggagaggaagtacaagtttttgtgttttctttagtgatagaaaagaaaataactcttttattaatgttttg

SEQ ID NO: 43476 - DNA, 3959 bp, Cannabis sativa
tttgagtttttatacttagtcttacaatcttattaaaagaaattattaatttttatattatataattgaagttgttctatcgggctaagaatagataaaacaaaattgagttgagttagaaaaaggggaaaaaaaaataaggctaaatataaatatatttttgaaatagtgtaaaaagatatatttttttaattaaatagtaaaactaagtataaaaattttaatttttcttttactattggtcattggattaaaattttattttttaaaaaattaatatttttaaaattagcatttaattaaaattatttttcaaaaaaattcatcaataggcaatagccattatttttaagtaatacccatcgaaaaataatctataaatatatgttataaagtacttatatttgttgttgattcttcttgctaatattctcaaatatgatgacatgatagaatattttcttaacacaattaatttctatatatgaaacacagttttatactaattaattatgttgatatagctacattaattcattctttttattaattaatattattttattttaatagagaataaatgtaaatgctgcaaaagctacaatccatgatgcaattgcaaacaaactagacataaaagaattgttcttctctaaagaaacaaacaacaatagtaccattttcaacatggttgacttgggatgttcagttggaccaaacacattttctgttatggaagaaatacttcaacttgtcaaacaaaaataccaacaatttaatcatcaacaacaaggcctcaatttctcttcttccaaagaacttgaatttcaagtattctttaacgatcaagtcaccaatgatttcaacacccttttcactactctcccaaccgaaaggcattacttcgcagctggggtcccgggttcttttcacgaccagctcttcccgagctcgtctctccaccttgtccattcttcgtatgcactccattggctctccagtcttccgaaggagttggtcgatgagaactctccagcatttaaccgcgggagaattcactactcaaatacctcggatgaggttggcaaagcttatgaagctcaatttggtaaggacatggctaagtttttggatgctagagctaaggagcttgtggttggaggtttaatggtgttgaccttactttctgttccaaatgatttcccttgttctcagtctgttatgtatgtgttgcttgagcttcttggctcttctctcatggatttggcaaaagaagtaagttacatttaatataagagatgcaaattaattttcattaaagaatatttatggcataactaaaaatgttttacgtttataaacagcagggatttaatgatttttttcacgacaaaactacccaaagttaataaaattgtaattttgttagatagcatgtgtcactacctaatttggtcacatcataaatttgatgaggttagcccttagatagtgacacgtgtcatcctagctagttacaaatataatgaattacaattttattaactttaggtaattttatcgctaaaaaatattgttggttttatgcagttggttacaaattttaaaattttgggtagttatgttgtaaatattttttttatttattaattttttttagactaattacaagactttgttaggaatttagatttcatatttttttttctcttaaaatctgtttccaacataaatatattgagaaattgtaattaattaatgcaggggattataagtgaaaatcaagtggacacattcaacatacctttatattcagtcttaccaaatgagatgacaaaattcattgaagaaaatggatgttttagtattgagagaatggatttaatgaagacaagcatgattgattatagtgacaataatggtgaagtgactcaattgacctctgcagagacaattactctgcacctaagagcaatattggaggttttattgaccaaacattttggaagtgagattattgatggaatctttgatagattttataagaaagttgaagaactttcagatcaacttcaaccaatctacaaagagggaggatttcaactcattcttgtgctcaaacgaaaatagtattgaaattaatctcatcaagaatttaataataagagataaacatgatatgtattttatatgaattgtgagaacattatgtaataatgcatgcatgcatgcttacccttctatataaagaataatgctttttaatgaataaagatatatatatatatatatatatatttatatatagcatattggtgactttttttagtactcttattttttttatatgagttattctagttgcattctaatggtttatattaaagtattgatatgagatacttatgttgtcgtcttattataagttaccgattttttataatatttattaaaataaaataagtggaagccgatattaaattataccaataacaatttatacttcataaagatgctaggcatgaagttccctataatttgtctgtctagtacttttgatgtaggtgacagtgagtacttggcaacgatcttctaaagttaaagacgctaccagtcatttcagtggaacgttctcaaaaaagaagtactaaattgttgatgtaattttttgtcaacctataaccttaggagatcgtaaataaaattaaagaaattcaagtgtgatagcggttgttagaaagtaaacgagtgatgcctagcaccacctaaaagtggtattttacgattgttagtgatattttataaaaattattacgtcaaattacatgagattcgatacttaattatactaatatagcgatatgccttttagtatttctcaataaaaaaatatataagaaaatgcttttattggcgatactctaagctacaaaatgagagtgagcattgctattaggtaccagtagtgtctattatatcttatagagatgatactttatgattagttaacgatattttttataaattattatatataaaactcgatatttagttgtactaataacgatataataccaaaaaaatattctagttagacattaataataatattttagcatttcccaataggagcactctttgttgatggccaaaaaggccgtcttgtctagttggcacagttggctagctcattgccctatttatgaatccagaagtagttggatatatttatatatatatatatatattattcaagttgccatccctatatatattaaccctcaaagtcaagatatatatgctcatctctctactttgtttttaaaattataataataataataataataataataataaattgaggaagttaagttgtggtgtgggggaacactccataatatttttagtatatataattttaaaaataattattatattttatatatatacatatgaatgatatagtcaacgaaactttaatcatcattgcctatatgttgaatgtaatttaccagttttaagggatgtatcatgtatgtatattcatgttatcatcacaaaaaatatatatttatttatatataatatatgagatatgtatatgaataatgttaaaagttactgatttttaggattctcttgtatattaatattgttattgatataattaagtatcgattgggtctcatgcttatagtatgtttaatgtaataatttttaaaaaaataccactagtcaacacgtctaaaaaatataaaacactttagctagtgcccaaaagtaatactttacatacggatatatagagtattgttacaaaatattagcagcatacctactgcttatagtagtacctattcataatttttacagttatttaatgatattttataaaaattaatatattaaattatacaaattatatatgatagttaattatataatatgatatacta

SEQ ID NO: 43477 - DNA, 3100 bp, Cannabis sativa
tatcattattttttcccttataaaaaggttcctaaggtactcttccatttcccaaaccattccaaattgctagctcactcattttcatagagagagagagaaaaaaaagaaaggaagccatgaacaacactaataataatcaagttgaagatcatatggtactctatacccagttgtaccctggtgtttacccccaaatggtacctcaacaaggtttgtactttgatcaaataaagcacaaatttattattagctagtcctttcctagttttgcattatgttttgttttttttctttctcttattaattgatggatttatgattttatttatttaggtgagacaaaaacaaaacgacgtcgtaagaagagcaaaagcgctaaggaagaaagcgctttggcaagaaagaggaaattaagcgatgaacaagtgaaccttcttgagatgaattttgggagtgaacataagttagaatcggaaagaaaggaccgtttggctgcggagttaggacttgaccctagacaagtcgctgtttggttccaaaacagaagggctcgttggaagaacaagaaattggaacaagaatactctaacttgaaaaaaattcatgactctgttgttcatgacaaatgctgtcttgaatctgaggtactatactgcactctctctcctctttcccctctctaatatttatttatttatttatatttcttctataacgtgtattgtgttcaacatgtcttgactttggatttcgttaacccatgtggggtttgagtatttatccaaatccaaacaaggtctaaataaatttggggcaagcatgttttattgattattcacatttttttttatagctttgtatgtcattgttttatttcttaaaatatatatatgtttcatcacgtaaatatgtataagttaaatacatcttatcctttaaagaagaaaaaagaaaaggaaaaagacaaatgtgacccaccacacacgaacgtgcatgagctctgggctcgaagaaagccatggtatcatgttgggctttattgtaaaaatattttaaaaaatggggatatttttgacaaataacagttactgccacctcataagacagcaaaaggtactatatgttccggtcctcaagggtgtccgtacatacagtgctgtttaaggtggttggtttcgggcttttcccaaggcccacctcagggaacatccacgtgagccattcacgtgggcctttgggcccacttaagtctatcaaatccatgcaaactttgacacgacactcagtcactcaagtctttattttttctttcattactctcttttagtttttaagtggttttttttggttatgtttgcaggtactaaaactgaaggaacaactgtcaaatgcagagatgaagatccaacggttgacagagcgcgtggaatgcgtgtcgagtaacagccctagctcttcaatgtcgatggaagcagtcatggacccaccatttttaggagagtttggagtagtggaagaatacgacgacgttttctacgtgcctgatgataacaacccttatattaacaatggcatggaatggatgaatctgtatatgtgatttctgaattagacaatagtagtaattaatataactattaataagcattttaatcaattaattaagctaattaagtacgtatattaggaagatctcatcattgtagatataatgatcattaaaaacttattatcatgtaattaactaaatcgttttcttctcttattattattatcttatttattaattaattagaagtaggtcagctatatatatagataagctataattaattagctgcaggggtgttatttgacttcgactttatgaagttgttatatatatatttagttttaattaagaatataactcgcttattttgactggattaaaatattttggataagttttaacttcaatgctatttatatgaacattatattatatatagataataatatatataaaaaaaaaatgatgaagttattgtatttaaattttttaagttaatcaacttctaagtaaggcgttataacttatatgatatcataataacaattttttacaatgttaaaaataatattaattcactaatccaatctccaaagtaattctaactaatcttttataatcaattcacatgactaaattaccggaacgttagttcctgttaactatgctccccacgtggttttattttattttttaaacactatatattatacttttgtacagtaccatgaagaatataagtaaatataatattacgtccagtaaaatttatatttattaattatttatttatatataacctcatactttattttacaaaaaaaatgcaaatgtaaatgtgaatgtgaatagaccacgaatttaattggctgatatagtaattaattctttgacagcacagttcagtcctctttctttttttattttttatttttttggctgggatcgactttattagaagaacagaggacaggagtactatatataaggtagaaaatggtacctaaaatgctgaaagagtaagaaaagcatgacttttttgacttatgccattttgtttgactatttagctttacgagaattttcttttactctgatcttacatgacacgtgtctcatcttaactggagcgcaacctcaaacgttggatgcgttgtcactacattaatgtttcactgcattattcttgtttaaaatttatttaccttttattttatctttttgttttggcagaggcaccacttgttgtaaatatatatttaatcaggggtggacccacgtagaggcgaggtggggcatcgcccaccctaaaaaaaaaatcgggaaaaatatatatatatatattttagttagttacaacatatatttataaataaaagtgatatctatatgcataaaataaactttggtataatggtaatatcatttcatacatctaaaagagttcatgagttttaatcacaataaaagcatgtttattttaatatttttattttactttttgaacttctaccaataatacttatatttaatgtcttaattatt

SEQ ID NO: 43478 - DNA, 1791 bp, Cannabis sativa
aagctttaaggttacacaagaatactaacattttttgttttttcaaactcaagagtacaagagacagagtaagattatacctgctgttttcggatggtcaattcctatgccaggggaacgacggcagagagagctaacaaccgccgaatcaatagctttatctgtactccctgttgtcttttcaaccattagacctcctgaaagtaatggtttttgagaatgtaggatccatgcctgcagttcttcaaactttttctcccaagccttaacatctctttcagctttcttcttctcacattccaaaactcgattctcaatcatcagaagacccatcttatcttcttcttcttcttcccaatcatccttagttagatcaactattttttctatcctcttagttcttccacaaacttccttagtttcatccaactctctcttcaaagcttctagcttttcctgagtagcaaccttttcagcttccaaagccctgaatttggcctcaagtgcttcatactcgttaatcttctgcttaacttccaactccaactccacacacctgatttcagctttagtccccatattctttgctccaaaacaactacacccacaagctcttttgatcacagcaacaaactctgatcatcaaatcaaacaaacatataacatataacatataatcatattcctcaaaatatagatttcacaaaattccttttacataaaacccacctagaaagaaattagggaaaaaaggttagcaagacacatcatttatcagtgtctattaattggcaaccaaaaagaaaagaacttttcaaaacccaaatgcctaattctacacactaagctagggaaacacaaacaaaatgttctgaaccatctttcctagtcttctagatattgttcataatttggaaaacaatcccaaaaataaaaaacactcctttttcatgacactaatattaataagtaactactattacatgagtgaaaaatcaaagaaaaagaatgaaacttacaaaataatgtgaagaaaggtttcttccgtgggactaatcacaagctttttccattgtttctgttgactgaggtttttgagtttcgcccttgtttccgtacaataagaccgttttgagcttagcaagagtggcggaataagaacaatcacaaacgtaacttatggcacaagacgagttttgggaataaatataaataaaatcaaaaaaaattagaatagaatactatcttttcctctgaaaaatagaatagatagttaaaataaatttttaaacaaaataacttgtataaaatagtcatacacaaagttggtttatttttttaaaaaaaaaataaaaaaaaaaattgtacagattgtttttaattttttttcttattaaaatgtaattgatttttgtttttgaaaaataataaaaaaaaaatcataactattttttgttacttatttcataaacataaagcagaaatgcggtaactttaattttttattatttaagcgagggagaaaaagtaaatatgagaaagaggtaaaagaaaataatgatataaaaaaaattaatatagataaatttaaataaatttatttcaaaaaaagtactgaacaaaaatattatttaaataaattttaaaagtaactaatttttgttttaaatcttcaatcatattaaaaaaaaagtacaaatattttattaaaaggataactatcattttagaccctgtgttttgtaaaagttactgattaaatcctatgtttttttaaatgataaaatggac

SEQ ID NO: 43479 - DNA, 4114 bp, Cannabis sativa
aacttttgaaacttcccaagtagaaatgggaagacattactatgaattttgtagtttgattgtctagaagcacatgattgtatgattcgatatgggtgattgtagactgttttgccaaattaacacaattcttttctagtattcaaaattgtatgtaaaaaatagttcatctccatgaagctttgaagtccattgtatcagatagagattcaaaatttactttcaagttctagaaaagtctccaaagaggcatggtacaaagctaaagttcaatacaacgttttatccttagaccgatggcccgtccgagaagacaatacaaatactacagaatatgttatgagcctatgttttagactttgatggttcatggagcaagtatttgctatggatagaattcacctacaacaacaattattaggctacccctatgatatgttgtattgtagaaaatgtagatatctagttcattgagatgaaacctaagaaaaaaagtatctaggtccaaaggtggtacaaaggactaatgatactattgagaaaataaaagctcaaatgcttgcttcctagtgtaggcaaaagagctatacatatccaaagcgcataaatgtagaatttcaagtaagagatcatatgtttctacgggtttcgcccatgaaggatgtgaaacacttaggtaagaagggcaagttgagctctaagtttatagaaccatttgagatactagaaagggttgaccaggcagcataccgattagccttacctccaacattttctggagttcacaatgtatttcacttgtaaatgccgagaaagtgtaatcagatccaacccatgtcttaagctatgaaatcctagagttattgttagattctagtttatgttattttcaagttatgtttttgagcattttaattagttttagtgtcattttgttcaattttatgctttagtttttgttatgttttcaggtttagttaatgaagaggaaagtgaacaagtttgaaaaaaatagtgtaaaaaatgaagatttcattgaagttttgtcactagtgtgccaaaagaactatccgtggaataatttagaagattttgtgattgaagcctttaaagagaattaaagatgttggagtagcgccatgtcataaaaattcaatgtcagagcgctcttgtagaaaaaatagacaactaggtcgagtttcagagaaaataggcggacctcgacattaagggagccatgttgaggcattacagaagatgagccttgatacccaaaaatcagccactagggtcgcatcattggtaagggcatgtcgcagtctgcctttgcaaaattggcgtggcttttcagcttttagagacacgagtcatatcattagattgggcatgtcgtggcccgctaccccttgttgccactaattgggtttttgaaccctaattttgaaaaagaaatggggcttttaacttggacttttgagggtacgaatttggaggctaaaagcgacctcggagactactgctattgatttctgacgagttcttttcttcttcctctatttttatgtttttaattaatcttaatcaaatatttacaatgacaatgaggagctaaactcctaattagggttttaatggatgttgtttgatacttgcctatggttttaataaaattttagttcttcttgaattttatatgtgcatctatttcatttatgcttaatgcatataattgctcaatcaccaatcatttatgtatgatttaaatatacaaaatttgaaaagtgagtgttaattatattgtagtggaatagacacagatttcgatattagacgaaagtacatgtatggtctatgtagcaactagaattttgttatttaatgttgattatgtgtgtaatttattacaaaagtgtaggactttttcatataattagattctatatatcctaataagaatataaattgaattattaatccactatcacatgaattgaagaagcaattaaattatattaagccataggaagttgatacaattgaagttaaactccctaaacttctaatcatcgttaattgcctacttgttttattgttttaatttcatagtaattacaaccattattcaaataagttgtttgccaaatataaataaagatttaattgattagtaataattaactacagtccttatgggatcgactcactcttgtgagtattattacttgtaacgatacatgcacttgcatgttagaattttcacaacagctgcaatcaaatttatcctacgagaaacaaccagtttagatcctcgacgagaagaataaagttctggggaacaatactatagccttggttaaggtactctaaaggaacaacaaggtagaggaaactttctgggagttagagtctaaagtgaggacacattatctagagttttttagattagattttgaagataaaatccttttaatgaggggataattgtaatgaccgcataattagacatgaaaaattagtaattaactaatattatagtaaattatgaaataatatgtgcatttcaaaaatgaaagtctattattagaaattagacaaatatattattactcaattatagagtgtcatatgtatataatatatatttaacatgattatgattggcaacagtagaaacttgatgaattggcaaaaatatcacagtggtatattaaagtatttaatttagaggtactgaatttttttaggcaattagaaattatggagttatgtgggttatttaagaaataacccttttgcccttgaaattaagtatagatgagtttaagtttatggggcaaaatggtatttgccaagagattactagatgataactcttactttgttctttcagtaagaataatatggactattgtagaataatcaagacaaagaaaaatcataattttgaagaaaactttctttcttctaaaccgtcttttagcaatttcgaaggaactaaaatttgaggagtacatttgggaatcttgtaggaactgtatgatttcatagctctgtttcttttgattttttttggatcaaaaataggtttcagtgtgaaatttggggttcttgggtcctgttattaactgatgagttaggaagtgatttcttttatgttttaaattagaaatcatactgttgtagtaactttgaaaggatatcctaagtttcaagctcaaagctcgtatctttatcggtgaactcatgattttattgatgtttcaagttgttggatagattgtattagtatttttaaactgttctgagaagtttaagatgatttggagcaggttggaggagttagaactcaaaatgttttgtgttgtaggtttttgcagtaattcgggcacctagatggaagaaccgggcacacgattggtctggcagtgcctaaaatttcgggcacctagttgtaaatctagttgttcggttaggggttcctaagggtacctcaattttgtattttttagggtatttagggtattgccaccttagattataaattttagtcatagaaagtgttttagcgagacacttactagtttaccactaatgtgacttagggccttcgatcctctagcaaatttgcactcaggttgaccagcacacctgaattatgaattgaggtaagaaaagtttttcatatgcacatgtctagtatacatgtttcatatttccatgtagctagcatattagagaacggtatgagtgtacatagagttgcactaagacacaaatatctaatatatatgttaggcaatgttggatagtataaattgatgataccaacactagtaagaatagagtacaagcttaggtgttggtatatggttaatcatgctataagtacaaacgttcgaatattagtttatacgcattggatgcggttagtagactcatggtaattgagtgtatgggtactcaattacaagtcaaatatatgatgtatcatgtttatattttcttacagagtgtgtcgactcacagatatgcttatatgtataggtaaaggcagcactaaggctgaacaattgtgagtgatgagtttggtgaagattgtacatatttggtcatc

SEQ ID NO: 43480 - DNA, 2927 bp, Cannabis sativa
aaaaaaaaaatattttaaaaatataagggagcctttgataatacttttgttttttaatttttaatcgcaaaaatgaaagcaaatcttatgtttttaaaattttatatttaaaagccaaaaatgtattttataactaattttatttttttaattttaaaaacagaaaataaaagtatgttctaaaatttcattttcttttttattttttcgattttatttaagttgagtttaggtccgcgttgtgattggggccgtggtttgagttcgggactggggtcggggccggagtttatgtcccaaggttcaggttgggtttggagtccaaaatattaattaagaaaaaaatatttaaaataattttgaaagtagatttttttgtttcaaaatttttaaaataaaattttgattcttaattaaaaaattataaagtaaaaacaattttacacgacatgttttttgaaaatattgttacttttctaattaaaaaataaaacattgattaaaaaagtattaccaaaagtaacctaaattttactttaatttttatgattaaaaaataaaaaaaaatattgctaaactccccttaattttttttttcttgggtttgaatgtggcgtcactagttcaccaactaattagctcttgcttggtctaactctctaactatcacttttgaaaataaagttcatcttgtgaaaagttcatatccaatttcttctttatggaaggataaggatgacattaccctttgttttattcacaaatttgaagtttgaaaattagaagttagacgttgttcgaatatatttcaccatattaatttataactagcctatataaaatgttctttatatcataatcaaggataaaaatattatgcatggtatcaattaaaccatcacccgagggaaaaaaaaaggtaaggagaaaaaaaaacaagatgaatgccttctttttcttttgctttaatgcaaagtgattatgctgatattttttaccccttttcttttgtaggtactcgtcttttttcttcttgggtctatattgtatatttgtatgatgacccttgcaactacttagaacttatatagattaactgccgaaacaacttcaactctgtctatatacatactgcatttaatatggagactctctttctgcccccataggccacaagggctttactttataaatgtataaggaacatttatgaaagtaggagcaagacattaagaactgccatgttcctttttgaagtagtacagttggcactatattgaacattctttaattgattaacaaaaactaaagcaacacatatttcacatttattaggatttaggagaagtatgcaggatgacaagaacacaaaaacaaaatattacaaaaatgaaaaacacataatataagaactctcctcaaattaacctatatatatatccttaaattcctttttccaacttaattaaaccatgacaatttcttttttcttttaaatatatgaaacgtccacctttctgaatgatgacatatgataatcaataattaaataaaaaaaaacacgaacattatatatatcattatctgttcacttcttttggtaccacatgcaatgcaaccttcatatataatataaatgatgatgataatgatcaataatcaaggctcctcattgttgtattggaactgatcctcacgctggttctgatacccttcaaaggagttgcggttgttgttattgatctcgtacgacctgtcgttcgcattgctattgtggccatagtagttgttgttgtcgttttccctgttgttgtaccaattgttgttcttgggttcggccaccaccctggagtttctgtaggagttgggatcataattcttctccatgttcaggtcgtaaaagtactttccgttctccaagaacctggtgtcactcatccctagtctctcggggttgtacgacctgtcgtttcctcttccattgttgttcctcaccttgttgtaattagtgttatagctattctcactgttgtagttatagtgattgttcttgtagctgtcgttctcgttttcattctcgttctcgttgttgctgtagaactgggcgttgtcgttggtcccttcttcggactcggtcctgtacgggcggccaatgggagtggtgtagggcttgtaagtagtggtgggagtggtgtatggctcgtaggtctcgtaggtgctgacggggttggcggaggtggtggtgtaaggggcgccgccggtggtggtctttgtggtggtgaagtgttcttcggaaggtgggaactgaccggactcgtggccgtaaaggccgtagccgtcgttttgtgtttctgggatgaaagttggctctggttggtgatcgtcaactttgttgtcgttgtttctaggagttactactgttgttgtcgtttcttgattgttgttgtcgttcgtgactttgctgaagaactggctgtctctggcgtcaatggggtgagatagtaggaagaggaagagaaaagagaagaagagagttggttttaggtgagccattgttagtggctttagtgagagagagagagagagtgtgtgtgtggattagtgagggttgatggagcacttcagtgatatggtgctatgtatatatgtctatatatatatttatagcaaggatgaataagtgtatgtgtatctgccacaaccattttttctactcattaggtgcgaataggacgatagaggttgtggtcccccctagctgggacgaaacttcaacaaagaccacttttccttttatgcttttgtttctttatattattatatctttgtaaataattagtaatattaaataataattatgaaattaaaatatataagatttaatatttaatgtttaattaccctaattaaaaaaattatatttggtg

SEQ ID NO: 43481 - DNA, 2599 bp, Cannabis sativa
catagtgatcctcactaatctacaatacttaagattgtgagtgagtgcatatacatatatattcttcttttgttatataatatatatgtattatattacatatgatgtatttttcttatatatatatgtatattgtaacatatatttaatcaacctcttattttaatctttgtattatttttacaatagaattgtaatgcatcttaattttctttcattgtaataaaatctcaatcaaatactattttacaaataatattaataataaataaataaataaagaaccaattttgccaagtaattaataactatacatttatagagaaaatgactattttgcttaacatatctagtacgtattataaaatgaatggaatattggatctcttttctcttggagaatatacttatttttatgagtaacaaaacttttagaaaatataatatatgaataaactacaagtatgtgcaatttgtggatatggggagttcacattttttatttgtgaataatattaaaagggctagggttgatattcaacccaattcatgctatgaagtttatatataaatatattataagtgcatgcatacatcaaaatcaaatttggtccttaactccttattataatttttaaatttgcttaatagtacatataattaataattactatcacactaaaactgtcaaattaataatctgcaatcaagaactgaaaccagcaattcaaataataaaccagaaatacaagaacaaactaattaataaagccatgaaacaaagtaaagaaaaacctctctttgttaatacacaacaacttagaaacccctcactcaaaagaactcttactactaatctctctaaccaacataactacttacataactgtatatataactactttccaataataaaggaaagatcttgaattagttagttaagattaacgtatatatataaataaataaaaggtttaattaattttataaataattagcattattgttcttttttggtgcgagaaaaagagacacgccctgttgactagggaaattgcagagaagacaatggaaataaggtatattattaattatttatactgttattattaaatgcttaattatatatatatataatttattataatgtattaatgcaggcatttgaagggtgaaaaactggaaaacctaagccttgaagagttaaagagactagagaaaatgattgagacaggcttggaacgtgttatagaaactaaggtttttattccatttttctaattcctttttaatactaataattgtacacgtttattataataatttttgactgacattatttttttcttaatcttatttttgcttcaggataataagtttattcatgaaattgattctcttaagaggaaggtcaggtgctaaactttgtaacaaaaaatagtatcaatgtattaattatatatctattattgttaccaaaaaaatgtattatatatctatatatatatatattgtaatttgatttgcttgactaccatatatgatttgattttatagttcattattattacttttaatttagttcattctttgcatgtgtatttatatgtatttgaaatttttgaggtaagaacattacttttaccgtagggcatatcctatttttagaatatagagaaattaataacaactattttcttctataggaaggagtagattatagttatggtagattttcttttctttcttttttttttttttttgtctattttcagtaaattttgaataacttatgatatcaaaaatatgattcaaatagttagttgtacacgtgcaactaattattttaattttatttttaacacagtaagctattcaaaatttctcgaaaatatgccaaatatgcataatataactatagtgtacatcgttatataataaaaaagcattaaaatacaatttttctaggtgccgaaaacagaaaatacttctatgttagggacaaaagtgatactcaaccaaaaaattcttatgtgtatatatacttattattatagacatagataatatggatattactggtgataataagaagctatataaattggttttgttataagcttgtgaacaaagaaatgcgccaaacaaacaaatatatgctttgccaatattttgtgagttttggagaatatgataaataatagtaattatatgctagctatggttttcaaaatcggtcgaggcgcacgccacaaggcgatacggttttgttgccattgaggcatacaccttatgcgcctttgatgagaggcgtactaaggcgcacgcctcaacttatttgtgtgttagattatatttattgtttgctcacttgggtttttagctgttttttcatgtctgtttttaggtttttaaataatttgagaactttagtttggactttttttttaaagcagattttattaaataaaatatagataagatgaatgaaaccctaaattgaaggagggaaaatgaaaatgatgatgctctacctagctatataatttgaatacttttcaaaaagtcccaacaatgtttgtcaaaaaaaaaaaaaaaa

SEQ ID NO: 43482 - DNA, 1675 bp, Cannabis sativa
acttcttatttttattgtttatttactattagtttacctaactactttaattaatgtagtttaaatattctggagttggagcaattattgaatatgcggtaacacagctcaatgtaagctttattttaatttcctctccttaattttactttgaatttgtaatatattatccatcactttttttgttaaattaaaaatatatgtcttgggctttggtgattagagttgtaattttatcaggtggggaaatcaaattccgaattagtctcgtttatattgtagtttgttttaagatatataacataataatccataaaaaaatgttttgtagtggcataatttcaattttttaaattattacacattaaaaaatactaatgtttacaatttatttcatcaattcaaaaaattcaaggtggagaatattttggttatcggtcatagccggtgtggtggaatagagagacttatgtctcatccagaagatggttcagttcctttgtaagatatatatatgtttgattatgaattcaaattattagcttagttagattactaatatatgtattagatttgattgataatagtttattgtgatatatgttaatatgtcaaaatttgtagtgacttcatagatgattgggtcaaaattgctcaatctgccaaggataaagtcaaagctaagcacagtgatttaccatttgagaaacaatgcgaaatatgtactgaggtaatacatataattagttgatttataaaaagaaaatgttatacaagttatcattttattagatgataaaaatgagctaactaaatattggtatatatatagcatctaatttatatttactactaattcataagatagaaaaagagattttgagggaaaaaaaaaagtaaaaaatgaaaatatatttgtaagggaggagagagagaagtacatttatattaaattaaataaaaaagacaaaaataaccaaaataggtaaatgaaaatccatatatatttataataataataattcacattatattataatccactaattaaaaacaaggaaaaaaaagaagaagccatagaccagtttaataaaattattgacaataagatagatatattaaattaataatatatgtatatatcatgtatattatattatcctataatacagctgtaactctaatattgttggttaataattttgtgtaggaagctgtggatttgtcacttaacaatctgcttacttattcgtacgttaagaagggagttgaagagaaaaagattgcacttagaggtggatactatgattttgtggttggaaatttcaagctttgggaacttgcatgactgaaatattaattaatttcaccccacgtttaagtgtgattgtgttacaacttatgcgttaaataatcaataatgtatgctttataactattatacatgtgtactacttatggtttaagcaaataatatatttatggtgcttcattatgaaatatagattagggagaatctacaatgcaatacactctcctttgtagtggtagtacgaatcactttatcacgtccgtctatatctaggatcgaccttagcaggcataggcgggctagctagacccgcacttagggtccactcattttaggagcccaaataaaaaaatatatctttta

SEQ ID NO: 43483 - DNA, 4800 bp, Cannabis sativa
  modified_base (1496)..(1501): a, c, t, g, unknown or other
  modified_base (3353)..(3361): a, c, t, g, unknown or other
attaaaaatatactaaacttaatctaaaattaatactaaaaaaacctaacatttatatccaacatataatgataattattaatcaatagttaaaaattaagatttacttttattgaaaaacatgtaaattaaagagaaaattgcttacaagaatataagatagataatttatacttgatattaagaattttactcattgtattgataatgtatgataaattattttataaaaattaaatatgtgatactaatcatgttgatcaagacacacgaatacaacaggtccacacgagaagacaacgagtcgagttaaggttgaaatttcttgacacaaaatatataaagatcaggttagggttgaccaattaacatatcaacttgcataacacgaacacgaatataaaatgataaacaccaattgtcatccctagaaatagaggtactcccaaatcccaattttcccaatagttgttttatttatgggttaagcaattaatactacttaattactttagatcacttgccaaaataaaaaaaaaaaatcaactaatctatcatctatcatctattccataaagaatgcacttaactcttttttgtctctttgtgaatttttttctttttctctctttcctaattaattagaagaaaaatgaagtctacagaagacttttagattacatagacaattatgaaagagcattattattggaccccattagtggttagtacattctacttttctagacatgttactttgtgattggttagtgatactcccttaaatttattatattaaattatatgagacttaatatttagggccgacttaaggttggggcagtaggggcgtggggccgcacccaggcccaaatagcctcttaataaaaaggccccaaatttatttgttaaaaatactatttttttttttatatttttactattatttatttaaaaatatacatattttctaaataaaaaatacttacttattttttttaagatactacatttaatatttttttttaagatactacatttaatattttattaagaaaaaaaagtttaattatattttttaaaatactatattttcgatttttaccactaaatatacaaaaaaataaaataaataaataaagattttcatataaaaaaaagtctaattagattttttttagccctagagccccaattagcttgagacaggtttctacgatatttaattacacaaataacgatattaacatggaagagaggatgagttaagcaattaatattacttaattactttagatcacttgccacaagaaaaaaaaatcaactaatctatcatctatcatctattctataaagaatgcacataactttttttttttttgtctagattacaaagacaattatgaagcagcattattattaagtaccagtggtacttagtatcttctagacgtgttgttttgtgattggttagagatattctttaaaaattattnnnnnnaattatatgagacctgatacttagggccgacttaagggatgggtagcagggacgtgagacatccacccaggcccaaaaaacctctaaacaaaaagcccccaaatttatttgttaaaaatactatattttgtattttaactattatttatttaaaaatatacttagtttctaaaaaagaaatacctaattttttttaagatactacatttaatattttattaagaaaaaaaagttcaattatatttttaaaatactatattttaaatttttactactaaatataaaaaaaaaataaagattttcatatcaaaaaagtccaattagatttttttaagctcaagacctccaataagcttgagacaagtctttacgatactttttttttttggaatgagtctttacgatacttaattatacaaagttagacactactagtgtgttttagcatttctactaatattcataattttagtaatgtttcttatgtgcatatataataatttaattttattatttttaaaatataatattatttttaggaagcaaaatcttttgttgcaaatcaattaatccctaccctcaacattttatcttaaatagtaacacgtaacatatatatatgccccacacatgaacccatttccatccccccaacatattaggaactattgtcaccaagaaaacaattcttctataattttctttgtttttttaagaattgatctaatgatatatcgttaatatttataattagaataaaaggatcgttttccccatatacccaccaacacacctgggttggtggcactctcaagattgaaagtcgacatctttcattacagtctatggttgccctgtatttcgctaaaatataattcattctcaaaataatatcagagtcacccatacacaatttgattagaccagcaattaacttacaaccgtctatccataatggtaattaaagacctaatccatctactagaaatgatactaactccctatagtaggtaataattgataactctaaaaattagacttatttttcacattttttttaactaaaattgctttagtctttgagtttgtaattaatttaataagtttttaattaattttaaatttattagctttatttaatttttattggtttttataattattttgtcataatatgttgagtgttatttatttttaagttcattttagttttctaatttattttatgtatttttaggtgtaattggtggtgaaagttaggattaaattagaaaaatattaaagaaatgaggccaaaaatacaatttaaatctaatcaactcttatgcaaggcccacttacggtcaaagtcagttgcccatcgcagctatccacgtcctgatccgcaggtccagctagctcgcgtgtgacatacaccccaactaaaggaacgtgggcccctattttctgcctccctctacttgaccacgtgtgacccacgagcagtactcaacctctcagctcgtactgcacatccctgtggtcccgccccatcaactccctccagttgccacctcagaccaccatcagctccacacaaaccatagctcgccacgtgtggtgtgctgccccatggcacacccacaatggggccattttgtaacatgagcatgccttggtgcttcatcattagtcaagtcctgcaccaagcaccgcattggggtggagagacttttggtgattagctttatttcttttgtatttccattcaaatatgtatagagagctataatcatatatgttcctggaaatcccttgaaaccccattaagctctttaggggtggtgacctggtgacttatgaagcaccttgnnnnnnnnntgataggggcccagctgtgtactcccttgccttatcaaggccatataataataaaacgatgtttatccatacttcttgtgtatgcttctatgttgcttttgtgctacctgtttgttacctttgttgggccattgcgtaccatttgtctatatgtttacttgtgggttgtgtgaaattgatccttggggacgatttgtgtttgcttgctcatgcttcttatttgcactcaacatgtgcgagacatgtatcgtgcctaacctttgagcttgtttgcctccaggcgcgtttaggctgacttgctcgctcgatgtgcaagcaagtgctgcacgttctacctacttgggagtgtccaaatagtcggctcgtgacaccacgcgtgcgcccatcaggtcctcctccaactagcgcgcgccatgtgtccctactgagaagaaaattaaagaaaaaaaaaggcaagcaaaacccttctcatcacccaaattacacacacacaaaagtttaaaaattacatattttcccacactttacacttaaatatccattttatcttcccaacttatttcacccaaataaaaattcttattttatttttaccctatctttttaactactttttcatccaaacaaacatttattttttccaatactcttacacatactctatttatccattctcttcccaacactaattaaattaattaattaatttattttgttttgattaatttaatctcttaattttgcctacaaatatggtgttggaagatcatttcaaaacacatctcttcatctcatacactcttcactttcattccacactcttcacttttaccatttctttcttaccattttctttctaccatttttacattttgaagagcatgttaagtatgtttatcttttgtaaattttatttcaatttggttatgaacttctaatcttttttcaagattattaagatgataataaagcaaaatgtaactagataagatttatttttgaatgttgcttttccatgtgtgctacattgttcatggagttttcttataaaaattatatatttttcatcttcaatatcacgtattttttattgttaaagcatgttacacttagttcttcattatgcaaaaatatgatattctttaattaaatgtctttcattaaattgcttacatctaattcttagaacataaatattatattttgtctaaacatagtttctttaattttgtgtagtttcattaaattgtaacacatttaatgcttagaaattataccttttataagtgaagaaaaattctacattatgaaagaaagtcgtgcttaaatagaaaatatatttttggaaaatatagtgtgatttatttcaactatgtaaacttgggaatcaatatacttataaatactattgaacttgcattttgtggattctaatatct

SEQ ID NO: 43484 - DNA, 1766 bp, Cannabis sativa
attaagaaaaattaaactaaagttaaagagaacccacaccaattaaaaattataatatatttaattacttatattgtatactactgactactccatttcatataataatttaattatatgttattaagaacaattttatatttttttaagttaggaagcataagggattttttaaaaaattgtatatttataaagacatggatggattgtggccccgcgcacaatttttgtctgaagcaaagttgccgaaaaatttactctaaccccagcagaaaattagaagtagctagaaagaaattaaatgagaaagaacatagtccgatacgatagaaagaaggaatagcaaatagatcagaaattcagaattacacatttgaaatattgtttttgcacccttttttaagctcatttcttctgtttaattaggtcagagtaaaagaaataaaaatatgatttttattatttgttaatattagaggagggagttttcaattttgaacctttttatatttgtaaaaagaagtgtaatagaattgcggaagtgtatgattgagaaagtaaaaataagagaatgtataataaagtgtatgaaattttatttcaaaattgttgacaataacaaagtagtagtccatgtatagtatttagtatgtatgttatttgggttatgtattaaatataggctttctatattatatattaaatataaaatagcatctcagataaaaaaaactgtgatcaaatataaagattaattgtatattttttagaaaagaatgcaaagttcaatgaagcaaagaaggtgattgcgaccaaaaaaaacttgattataaatattttgaccaaaattaagtgtagtgtactattttgatatccattctcaaatataatttagcaaaacacattgagtacaaataataatagtcaaattaatctttgatcgatatccttttcaaataaataaataaatattttatatataaaaaaaccctatacttatttataatttatttttctaacccaatatatatacattgaatattcataaaacatctactaatttatttttatttttcttgacaaaaataaaactattaaattattaataataaacttttttttttttttttgagaaataataataaacataagataaagtaataagtaaaatccaaaactaaaacaaaaattaattttggttttttgttttcaaatttaattttttaatgtattatcattttaaaagcagaagaaagaaaaaacgaggaagtaataatttttggttaatgatctcctctggagaataatgcaggcagtggcttgtcggcagtttttaaagtccaaaatcaaactcataatgtaaggtatgcaatgatcattagcgtgccctaatactctctatatgttttttttttaaaaaaaaaattaaatactatatacatggtatacatcgatttgtcaatactgatcacatagtccctacttcaatcaatttcatctttgttcttaaataaaatgcctacgaatcactttacgtgatcatatcttattatgttgacatactctgcaaagtagcactaaacactatgtctacctttttttttttgttttggtgatgatttcagttataaaataatattaaataaattaaggaaatatttatcttatgcttgtatgagtaaaggtagtctttataaattaagttgatttaatttttcttcatctctggagtatactatggggtgcttttctatattgatctcgag

SEQ ID NO: 43485 - DNA, 1615 bp, Cannabis sativa
  modified_base (1427)..(1447): a, c, t, g, unknown or other
tcaaaatcttttgtttctttgcaataatggatgttacccttagtttctactttttttgtggaaaatttgtgtaaaggaatctctttaataccttactgtcaaaggaaatccaataaagccctggtccatatagaatgtaaatttctgtgaattttcagcagggtatagattgtgatctactttgagccggtgggtgattggcttaagttattctctagtatctcttttgttattttctcgtacaaaaagtggccttcatgattagttttaatatgcacaatagaaaaagtgtggtaccatgaaagtaaaactgatgagatgggtcttttattaacaacaccattgaaattaatttaaagcctaaccactttgataagcggttccttggacagagagagcgtttagcttgcagagtgggcatcggactctattcttttcctgaggtgagacgtataccgttggtgtgaagtgtctttctcaagattttaatctaataattttgaaagtcaaagttgtttactcattatattataggggatgttttatattgattcttagatctttcttcaaagaatgtgttttaacgcatgataagattagtattcattttcttgcataacattgtcatataggatatttggtttggaatttcataagatccgaccattccgtagcatgtagggtccaacaccttgacaactagagcccatgagaaagtgggacaagtcactagcaagtagcaaacaattagttgatgggtcactattcattgaaagaactgtacgtgctcaaaaatatagtgaactatagctagctagagttttttttttttctctttaactttttttttttaacctgttaacttttgtaggaatttacacaattatccctacacaactcacacacacaagttattatacaaggtcaattttgacctttttttatctgaattgatacacacaatattgacacgtattgttttactttgttttttttattattgactttactttaccaatatcgtaaaatctttgtctgaattgaaactcacaatattgacacgtattgttttactttatttcttttattattgactttactttactaatattgtaaaatccttagcttgaccagctgaaacctcttctcagatcttcactaattctggatcagttaacagagcagctttaattcattctaacagatcagattacaacgtcaaattatgaagtttgcccacagcaaactcgatgccagatttgaccatgtcttctgttagtagaggtgaaatcttaatcatacaagctacctgcccgggacccttccttctcatggcatcagccactatattagccttcccaggatggtaaaggatttcacagtcataatccttaaccaactccaaccaacgcctctgtctcatattnnnnnnnnnnnnnnnnnnnnnatatttgaggctcttatggtcagtgtaaatctcacatttttctctttagagagaatgccaccaaatcttcaaggaaaacactaccgtggcaagttcttaatcatgacttgggtatctctattcatattcctttaattgacgagaggcataagcgatgactcgatcggc

SEQ ID NO: 43486 - DNA, 2237 bp, Cannabis sativa
ctacgtgaatgtggaagtggggccgcttcctataaaatttggacaaatttctagagtgttcactatattgggctagacatgcatggccattaaagcacaagcttttggactacacccaagaaagattgtgcgtggtatatcattagagatagagttcaagactacgagttactctagtatattctaagttgtatacacaatgcaaatgttcaaatcgaaagatacctttgtctatgctctatcttatttcatagactattgctcgagaaaatattttttaaaaatttcaagtgggggattgttgaaattttgttaaattttttaaaaataagaagcggagtgtgtgagtgaatggagtcccacatgtgatggaaacactacattagaagtgtatataatgtgcaaatttaaaacttgggttggggcctcaaggggtacccaattttgtgcacatgggtgaggactccaacactgaaccactacacacgcgcgcgctggcgccatttgtctgactaactaagctgagctggcgaatatgtattccgagcagtagtacaattattgagtgtcgtattttgacggttctctatcgtgcaatagagctccgatacagtatttttgactgggctattttattctggggacgacgaggttgatagtcggcttgcacagttctagacagtgccgcgaacgtcttaaagagagcgacctagtccgcgactcaactcagattttaattcggtaaattcgttcattttattttccgcaacaactattttcaacaacctttatattcaaaaacatataggtttgaagttttttgaacacgcgtggtaaattggaatatcatgaactctgttttcaatgccgctataaaaaaattgaaaaaattattctagtatgtgatttcaggtgtcaaaattaactacaaagttaagaggttgtaattaacactctccataattacattagttaggatttggcaaaagtttatacaaagtaattaggattttataaaagtatatgcaaagtttttttttaaggttagtttatacaaagttagtacataggatttctgaaaagtaactagtctaagggtccgtttggcacagcttttgaaaaagctaaaagctattttttgaaaaagctgtcattagttgttcatgtatgtagagatgtaaatgttaaagctcataatattgtaaaatatgtattagggatagataaagagaaatttaaaatggtaagattccaaatattatgaattgtaaatataacttcattgtttattaatagaagttacatttctcaaaataataataataataataaataactaagggtttttttttttttttgttggggtaaccgataaaggttaaaataacaagggtaacaaaagtttttcatccaagaaagttcattgtctatcctaaaggcatgcttagccaatctatgagcctcaacaataaagttgctgcgcatgagagagagatgcctcaagaaaactaaacaataaaactttaatatcagaaaagataacccccagttcatgcaaatacattgtctgaccctccaaagttgagactaaagaatgtgaattagaaaaaaccctctccacgggaagccccacatcttgagcccaacgcaaatctattagtaacgcaactgcttctgcctggaaaactaaaaaagaacctgcaaccgaaatagtttaaaagcaataagtacttttaatttttaaaaccaaaaaatattatattagcacaatattaatgatggcagctaatcactttttaaataacctattctattaacctgtatataataatttttttttaaaggaaaccgatacaggttaaaataacaaaggtaacaaagttacgcaaccatatgagaattttcttccatctaaaccattcattgtctatcctaagggcatgcagagatacccaggagaactagacaataaaaccttaatatcagaaaaacttcaaaactgagagttgtcacttccgccccactaatagaacacctacaaaataaagagagaaaaattaatatataataaatatttaataaaatatgaaatttcccttacaaataaaataaaataaaataaaataaaatatgattttttttttatgaatagtcacatagaattctctgatgtatctattctcatctccaatgctgacggtgaatacactacatttgatgtgttattattagaccaa

SEQ ID NO: 43487 - DNA, 1431 bp, Cannabis sativa
  modified_base (1070)..(1073): a, c, t, g, unknown or other
tataatattgatatgaaaatttgcaggaccaggtttatcaagaagtagaccacacaaagtgattttccacccagcaagtggactttgtattgtaagaaaatcccaattgggtccattgagtttaggtccctgctctagttctgtagcgtggcattattcacgtgatgagaatatattgaccatgagaggaacacccttatgcttacgagcactacagcaaggaaaaccagcacagcttagcaaacattgtaaaggctttgactccaaatggaagcccatttcggaatctaagttgcacctctctactacaactggcaaaaacgacaccgtttgccttgatgttgactctgcaaatgaagttgtgatcataaacacttgtcattgcgtgagtagacatagttcgtgtgacccgtctaggcaatggttcaaacttgttcacagcacaagaaaaccaaagttgtttggatctttttctgatagttttgattattatgacacaaaatcgtgagtattaggattgcttatatcacatgcaattgctgtacgtaactgtgttcacatatttacatattatatgagaagggaaaaggactaatacatcataactctttgagaagaatataaacttttattgacggtataaactcatccatgatgttagttgccgaaaactcaatgtatgaatgttaaaaagtttttttttttggaagaaaaaattgtatttcatctaaccaaactttacaattctatagcgcttccctttaaaggagatttgaaaaaaaaaaaaaaaaccatctattgaatctttataaacttataatgcctaaaatcagaatgtcggaaagttagaacgtagatgaaatcaaaatgaaacttaaaaaaaattcgtagagtaacaatggtaaaaaatatgtattgtattatcaacttaatagcttatgttacaaaaatatttctacccctctcaacttagaaaattgggtatttataggctcagattgcctaatactgttgtgaaaattatgtagtatatgtagtcacacaaataataaagtgataagtaagatcgnnnncacagggattgtaaacaaaaatataatgtaaaaccaactaattacaacttaaaataagaggaaataatataaaaatgattgagaaatgattcaaaattaaaatgacagtaattaaacttgctaaaattaatgttactgttgctaaaaaattatttgaaaaaaaatataatatggtaaaaagtggcttgaatagctaattctttctagtcaggtttttttcccaggtgttacaacatcaatttagcattactccagcatttcgcacagagataacataaattcctctaggcttgtgagaattttctaaaactcacaaattaaagtctaccacttggctcaatatattcctatatcaaac

SEQ ID NO: 43488 - DNA, 3641 bp, Cannabis sativa
  modified_base (39)..(39): a, c, t, g, unknown or other
ctttttatattaatttataaaatattacatactaaaaanaattaggtgaaaatatattttatttggcccctccttatttcgtcgtctggttccgccactgtatgctgtgaagcatttgtatacatcggattcaaattcacgacgtagtagtatgcatgttagactgattttgtaagtcatgtatgtataaatttgaacaattgaaaagtatattgaatacgttaaaaatatagttattatatcatgctattaatacatatcctcaccttttaacatataatatcattattaatataattaaatattaaatcgtatataatgtgatataataaattttataaatagtatttcaaaatttactggtgctctcataaaaattacaacgtccacgtcgtataaatgaattatatatataaaaataaaattgaaggtagctatgtatatttatacagagagagagagaatatgctaattgctaaggaaggcaacaagttgggaaaacagatgtagggatatagatattatagcgtgagcaacacactcaatcagactggctggcatgcagccaagccagccagggttttaaagcacagtgtcagctggagtactacttaatcactgaaatgtgaaaaaacccaatatattgtttgcccgcttttatctttcaacaaacaaatcacataattcacatttaaatatacacacactaatattaacgtatgtacagtataatcaatcttaactatatacataaaatatactaaaattaaaaaaatattaaaggtgggttttgtaatatttttttaactaatttttaattttttttaatttaaaaaataaaatacttttttaaaatatattttataaaactgttttcactttttaattttttaattttttaagtaagaataagattttaaaaatatatataaaaaaaaatcaccttcataattttttcaaacagttatttttcttaattaatattttcgactttgaccccaacttagatcttgggacctgaactctcgctctagccccgaacccaatctcagactttgaccatggctccggtctaggcccaaacccgacttaaataaaattaaaaaattaaaaaaaaaaaaaaaaaagttgtagaacacacttttagtttctgtttttaaaataaaaaaaaaatagttgtaaaatatatttttattttttaaaagcacaaatataacttgtatttttataattaaaaattaaaaaataaaagtgttactaaatactcttaaagtattatctctttctttgcggtgttgtggtgttagatatataatatctaatagtaaattaataatcctctaaaaaataataaatgtttttaattatgtataaacaatatacaacttaatgattgttgcattactaaatatcaccacgttattttatggtatgttagtttggattgtacataaatttttataaattgtccaatttgaataatacgtccaaaccaaaccgagataatctgacagaaaatgtaaactgaaaaaccaaacaaaaatataacctatccaatctttatattgggcgagttgaaaataacatcaacccgctaggggcggagccaggccctaattattaggggggccaactattaatttttatttgaaaaaaattatcggttttgacatcgaaaaaagtcttttagtacattttttttcataatctcatactttgtagttttctcgtactacttgtaatttttcaaattttttgtatagtttacgataccgaaaaataaagtttaaataattactaccacacaaattagaaaaatagtcacgtgtgtaacaaaaaaaatctttattttcggcactataaataatttagagttttttaagaatttactgatgattctaattaaatataacctaaataatcatataaataatttggatttaaaaattctcttggatacaaaaacaaattaagagtataccaaaacagtttagaagatgtaatatagaattacccaataatttgtgtaacatgtaataactaataaatataaaaatatttatttaacataaagtacacctcttaaatggtcgttttggtatatcactatctattttggtatatcaaagaaatttttttaatctatattgtttttatgttagtgtacgtttgtaattatttagggacacctgtaaaaaaaaattaaaaattcaaattacaatgctataaagaagattaaaatattttgttgcacttatattttttttctcttatatgcgtggtaattaattgtttaaactttatttttagtactgtagaatattcaaaaaaatttaaaaatttattggtaatcttaaataagtacaatgtacacaattataaaaaaaaatgaaaaaacttcgtttgtaattataataaaaattacataataaatttttaattttgataaaaaatatataacttaattgatttatttttaatttaacaaattaaatatttaattatatattttaatagaaaaacattaatatttatcttaattatatttgcataaatatttatcacatcaaaaagtaatgataagttactaaatatatgtctatatatataatctcatttattttattatatatatctaaatatatatatatataccacttagttaaataaattagctatacatatatataatgaattcattttttttttaaatttgaggggggccatggccatcccaccttatacattgcctctgcccctgcaacccgcccaatcaacccgaactaactcgaccaactcggtcaaaagagtttatatatatatatatttatgtttttattatatataatctatatattacataatttatatatatttataaaaaataaaaaattcaaactactatatatatttttttatgacggatgatttgaattttaaattcaatatttatatttatctcattatcacaataactaaaatatgataattgaaagtaaaaaaaaaataaacattagtgctcggtttggacagattaacccgactaaaccgaccaattcattgggcgggttgaaactttttttttcttaattgagcgagttgcacttaaatttttgtaacccgatctttacattggattaaataaaatataacgtagaccgagcaaaccaaccaacgtacaaccctagtgttagtatagattcactagaaaaatagtcgttagaagtagtttattaagctttacaacgtcgattttcgcaaaatccgctatcaatgttattctgaatgacatcataaggacctatattataggaatgctatgtgtgttattttataaactagtttaatactaatagaataattatttattaaaaacaatgatgatattaagaacttaactaaaataaaacactaagaacggacatcataacggcattaaaaacatgtttcggggatccctgttataaaaggtttgcaaaagactatatacgacaacaatccaaaacacaaaatcacaatacacaacaaatacaactcaaaacacctcctggcaactcgacacacaggccggtggggtcaatatgtacattgctggagaagacggtcatctcatggctggtctaacttttccttgcccttac

SEQ ID NO: 43489 - DNA, 3264 bp, Cannabis sativa
atgtcaataagcataacattgttgagacaaacccaaggctgttggaccataactcttctcctatgtccttcacatccaaattcaaccaggaataaatttgaaggatgctcagtgatattaattgggaactgagagagtttgctccaatctctagtcacggtttctcgtaagtgtttcttgttgaaagacttaacaatatgcagcttggcgattaagaagatgttaggtgcatgtaaattgggattagtttgtggcgaggaatctcggagggagtgagcagtattctctatatctatgagattgaaagcaatagagatggagctagctaagtcacccatttgtggtaagaaaagggggaaagctagattaattatagaaaatgtaaacaaacgcaaacaagaacagaggttccgtttaaggtatttccaacaaaataaaatgagttatacataagcagattttttgaacatgtattaatttgggaaggggtttgttgaaaccttcttccatcaccattaattaaccaaagcagaaaccctatgcacaaaaatgacggatcccccattcttaaacctatactaagtgaatcattacaaaagaaaatgggtttaaacatattcacgctatcaatccagggtatctttcaagggaaatcacatggtctaatagtgattttgcttaaaacagagccgagatcagaagtaatcatgaggagatttgtaaggaatagacgagaaatgacattagggtagaaatttgaggtaagagagatcatacatctgatttcctcataaatacttggtgtgaaatttggaggatagctcataactcctttgccatgttgatctattcttgggcaggatcggaggctaggttggagaggatgagcggagcagccaccaagcctggaggagctgggacgaagaccaggttccataatgggaaagtcatttaggttggaaaaaatagagaaagccttagttacttgcattgtgaacatagagaaattggaaagttcattagaaagtccaaattgagtatatatattactttttttgaaatttgtaacacaaaatgacaagattcaccatttcaataaactagtccatcatttattcttcaagctctggtgccattgcattgacttgtccttttttttttataatgtaacttcataaagataaaaacaaagagtacaaattatagtcatcaaatgctcggactacaaccattccaaacaatctcttcatctaatcctaaaattctcttagacaaaatatgagctgcaatatacaaatttctatgtacataactaagataaacattagaaaaattaaacaaagagatattaacatcttgcaacaaatcagataataaagagttattcttccacttatgctttattttatttacaataacttgacaatcagattcaacctcaataataaaaaatttaacaacagaacaccattttaacacaacttttaaaagaaactattaaactaggaattggagaagatagtccaacaacttcttcacctctactattctcaacaatagttttaataccaacttttctattcttcatatcagttatagcatcaacactaactatagaaacttgaaggaggaaacttctaacctctgacaattatatcttctatctttgatttcaacatcattattgttattagcaaaaccaatttttttgaaaaacctttcattctttttattccaaacaaaccacatcattcccaaaattaacatcatatattctttctttaaagtttcaaaagccttcaacataaactctttaatatcataaagcctattgtggttataaaattctttaaaagaggagttttaccaaaaaaataaaataaaatggaacaatgtatctcttttacaatcctagaaaatggtgaaagatcttcataaagacaattcactccataaccaaatttacactaattttttttaatcaaatgtagcatacacattcaacttttaagcttttttccaaagattttatttttttgaaagaatatttttcaaataatttaatcccataatatacttctacaatgctcttaatttagaaataattttgataaaatgttatctatatcaagctactttcaaagagtaagattttttttacttttcttatttgggaaagaaggtactagaattgtgtcttttattacttttcctaccaaaaaaaaaaaaaaaaaagaaaatatacgtatacacatacatatacgtatacttcacgtatatatgtatgtgtatttattatatattatattgttattcatactatatctttctcatatacaataaagagggttattcgcctcttgttcattttacaaccatgtcctcctctttcaatttagggctttgatgtattttcctatataatttttcttcatttcttcatttttttttgggtctgtatttttttttcacttccacacttgttgttctcatacccaatcgaattttacatatagttttttccaccaagtgtttccctcctaaaactcttgtcttgttttgaagatcattacagttcatattacgattcaaaagattgcatctacgtttctggacgatgctatgatctcactatgttgaatagtcaggtgaggttttgttgtaagaagatttacaattaagggtttgaattgttgtttttttgttggttatttatggcatttcagtgaaaattcttttgtgggtatttagaattgggcttgatttgtacttgtgtttggccgcattggttgatttatagctctagtgtttcttgatgtactttattatttggttatagtgaaagtatagattttgaaattaaggtttgtagagttgaatgcatttctttttttccacttgagagatcagcggtgagctagcaagtatagaaatgattgaattttaaactaattatgtgttgggtttgggaattgtggatggattctgagttttaagatgaagttttcaagtaatttaatattgtttgtgtttggaaaaaagtttctctctactttaattatggtagcaatttttgtttctaatgtgtttggtgatgtattaagtagggaaaagctttatttgaaacaagttattccatttgaattgttttttagtgttataatgttcatgattttagaaacaggaatatccatgaagcattatgtgataatgataatgatagtgatactgtttttgttatttttttttttttttcattcagga

SEQ ID NO: 43490 - DNA, 2692 bp, Cannabis sativa
atcagaccatcaaattatttatgtttagaacatgggacggatttcttaagacaaattctcccattaagtaggaaaaaaattcaaatcccagatgcgattctacatgtcatgttctgctatgaaaaaatcatttgataaagtacaaaagtattatagcaggcccatgaatagtattatgttttctccacgagaattaatgtttcaaatatatataataatttatatgtataaaataataaggatgttaagtctttagtggcttaaatgctgtctgatcctgtatcgaatcatttaacattgtataaaaaccttataaatccagggaagctcaaaaccaagaggcaatatcaatacattctagaactagtacctcctataagttggcaaaagctagaaacggggaaccccacctattatattttaaaaagtttcaaaatggtagagcccgtctaaacaaagatcttttgtatctaagaagtaagaagtagtgcagtcgtgcttaaatgaaaggagcacacaaaattcaaaatgaaaacgacccatacaaaatttgcaaatgataataatttatgaagtaaaaaagtatagaaaaatacaattacgactcaatggacaaattttcacttgcgtgcagtaattatgcatacccatgtacagcattaatataatatattaaaaatgaaaaataaataaatagatctgaacaacaaatttaaggtaacaggaaacaagatacaattacaataaagaatcaacgtcaattacaaaacaataaattttaatggtggaccccaatttcaacaacagtgacgttctcagatctaatttacaaaacaaaattggatagttcgcagagctttcgagttgttcaaccattttcttatcatgaggtacacaaactcttatattattatatataaatatatgtaaatatcctaacactcacaattaaaatatatccaaacaaaattaatgaaaccctaaactaatatcaatttaagaattaagtcgaatgcaaagaaaacgaaaagacaaataacaaaacgacgtcggatctgcagccaaaaaaaaacatgaaatgaactcaagaaaaagaaggagagatgtaaataatgaaccttcagatatggcgttttggatttcagcgcacttaagtacaacgttgtggtcgttaagtccttcctcctcttcgatgaggtgatcggcgtagccattctttccgttgttgtgagcttctctggtcgtcggagagagcttaactttcgataccaaataccattgaagcaacgagaacgcgattccgaccaccgcgcaagccggaattaaaatctgcgtcccaagatctggcagaatcaccgtccccaacatagtcgccggaaaattcaaccctcaaaaaaaaaaaattaaaaaataaacagagaaacgaaagatttggagatgagagaaacagtgtgtgaatatatataatatagatatatatatagatatggaagagggtggaagaggggacatatatataggtgagttagagagagaaatgaagacgatgagtgagggcgtgtggttaaaatttataataaataaagtttttgttacaaaaatataaataataaaaaatatatgttgaaatatataaataattcgaaaaatataaggagggagatcgagaaggggatgagggaacagtgccaggtggcctagatctgattgcttttctaattaaataaaaaacaaagataattttgtaattatgaatgtaattttttgtaatttgttggaaaataacgtttatttttagtaattgagaagtaacagcactgtccaatacacagtcaattttggcgtttcatttttccttattttagattttgtttgttcaactttttttaaaatatttaatcctttcaattcagttacatttgggcttaaatttgtctaatttaagaaatcaagtagtgattataaaacgagtctttcatgttgttaaaaaaaaaaattatatatataatatatatagtaatttgtggtataaatatttaattttaatttttagctgtaataaatttataattttagaactgtaactataattcttcattgctagaagtcatgaatttttaatttctttttttaaaaaataatttatatgtactaataaagaaatgacgcgtggataatgacttgacatttaatgttgaggtcataaatataacttggctattattttcgctaaaacttaaatttaagtatttgctactaagagttaaatttaaatatttataccgcaaattattctacaatataatatatattagctataaatggaccataatattgttgtcacaaaaattgttgtagaaaataattatattatcctttctctttataacgattgaagaaagaggctgagttccaaatattagtatgtttatttttcattaaaaaaatgttatcaaattatcaatgtatgttttattgaaaaaaacaaaaatattatgggtgtgataaaaataaaaatgtaaataaaaaaaaaatgcattaccaaaatatatacattttttcttctaagaaaaaatatacatttttattatagattaaattacattgttataatatttatttaattattaaaaatctattatgtgattaaagcttggtagctaacataaaaaatgtgtttaataatttttta

SEQ ID NO: 43491 - DNA, 2787 bp, Cannabis sativa
agagtatgttgccatttttattttcttcttgctctcttttttattattattgtgttcttttctttcaaccggagtaagcgagaggataagtgttgagcttttaatatttgataagaagatttaacatgttaaacttggataaacatctgtgttacatgatcttttttgcaggaaagaagttggcagaaagcattgttagagaaaaacttgcagcttgtgttaacatagtaccaggtatgtgctagacatggttccaaactatattaacggttcctagctgcatgaatcattcagtagtttatatgactcttctgcctaagcaaaatggaaaatagggaaaataatataaaattgtgaaacataaataattaataaattacagtaagtagggcagaaagagatattaaaatataatgtattaaactgaacatggtagctaagaagatgaaaagaaaaggatctgattatttcttttttagacaagtcttgcaacagtgtctggtacaggagctttgatatcttagattaacaacatccctcagaacatgttatttgtgtgagagagaaactgttgattgttttgtgcttgtatatactcttatcccattggtaataatgttttatggtactatcttcaaattcttatatcatatttgctttcaattagtgcaattactagtcttcaaggttggctaagtgtagtgtatgataaactttgttaacgcaggtattgaatcagtttacgagtgggaaggaaaggtatgaatctattgccatctgcacactatgcaagagagttttacgaaacctgtttctattgccccaagctgactactgtaaatgcccaagttgtgaactttagcttctccctactaactgacataggttatcaatgaagtagatagtagaaacattaacactctttgttttcttacttcatttattgtgttttgctaacataagaacagatccagtctgatgctgaagaacttctcataatcaagagtagacaatcccttctggaagctttgacgaaacatgttgaggaaaaccatccatatgagtaaagcccaaagcttgtttatgcactgttatttatttctcacttcagctttggtctttcccaagtttccctagaaacctaattgacaaaatggatgtacaagtttattttcttcttggaaaaagacctttctctgaagtttttaaatgattcttgttcagggtaccagaagttatcgccttgccaatcaatgggggaagtacgccttacctaaaatggctcaaaaacaacactagagattgatttctccttcaaagctaagaagagagttgaagtacacatatccctgtagtgtgtcgtgagtgtttgcatattatgagaacgtggagttgtttgatctctctctctctctccctctttctctgggttattgcacgttggtaacattataataaaacatagtgattctataaggaataccttttgcctttgaaagctttactttgtcaaatagttggtaacccgcaggatttagaactttgctgctaatctagtcgtacgctagaaattatttcacatagatgtctgcaaagactaggagcatattaaaattacatttcgacttccaaatattaataggagcatactattttagggtctctatgtgtcaacagaataatgtcttggtactttgttctcaataatattcatgtttgctcaaattgtgaaatttaaattctacataattatttgaccattcaaacaaaaaaatgggatttttactttgtttataaggattttgttttccatataaatgtacatctcagaaaataaaatatactttatggcttaatactaataaggatatggaaatttgattttctaggcatattataaggtaaaatttgttagaaaaactgaaagtataactaattggtaaagtgtgtaacatttaataataccctaaaatacccttcacatattaaaaaaaaaaaaatcagaagtttgccttctctctttccctcttgctcatccttctcagaaccaatcaacccagttcgtgttttgttttttttttttttaaaagtgattttactattaaagattgaatgttgctttgtctatagtggaatttaagttttgttagatttagggttttgaaatacgtcggatctatgatttgggcaagagcttaattttcaagccaggtccaatgcacatctgatgtaggtccgattcgttctacgaatttgaaaggttttgaggttgaagacgtaggtccgatagaggccgatgatggtcctaggtgtctaattgttcttttagctttatgattttgttttgcccgatatatggtctgatggtgacccgatatttcttatatatgtatgctattgttgtaggcccgatgagtccgatgattagcccgataggggatatgctggtttgttatttttgtttagtgtattaggacaatagggttcgatgttaggacgatagtggaccgatagtggtccgattgtgaatgcttttcttcatttttgtatgttcgatggtggcccgattttgtgtccaatgctttactacagaattgctaactttcattttcttgtttttttttcagagacctccacagctaatagttgcaatcttaaagcattacacaggccgtgtcacttggcccggcgaaagttattactacccaaagattaaggccaaaattgaggaattcagattatgggatagggtaaatcaatcccctttcaaacagttcttcgagagag

SEQ ID NO: 43492 - DNA, 2730 bp, Cannabis sativa
tcagtcagtataaatgacgagaagtgggttgaaatcaacgtcgcacttggtaggattaaaagcagtagagctagtaccactcaaaggaaccttcaaaccacatttaaccttaaccttaaaatcaccaatattcatgcttcccaatctcacactagtatagaaatgaatcttcaaatcaacagggtaaaccccagaattaccattcctctccttaaactccacaacctcctccgactctaacgtcacctttccctgtcccgaaagccacgtgtcgacaacccgcgtggtcttcgggggttggtaaaacgatacaagattccccgagtcgaatttctcgccgtagtaataagcttctgtctcgactaggtcgtactggaagcctatcctcttgttagggttacgtacggtgactgaaaggcgaaggttgtacagaagatttgtgttgtcattagagagactgaactgagtgaaggaggcttcggtgacgtggaatttcatctttctgggattgactgcgatccagaagaatagtatggtgagtccaatgacgacaaccacggctgctacgatcttcaaaatcaaggcttttcggcttttgggctcatcagactccggcccattttcatcggtggttggtttctcaatatctgacattatattcgaataaaagaaaagtcgatatgagaaaggcaaataagaattaagaatcgttaagttgagttgagtgagtacatgtcataactggggaatggggttttatagaatggatataatggtttgtgaactgagtaagttagttataattaattgtttgtattgtttgtggtttaataccttacaatctcgttaattaggtcgttgaattgactggacttgataactagttagtttttattttgtatcgttcttaataatttaacagtgatcctctcatgttgtaatttatatgtaactatttaattagaataaatatatattatatgttcatgaaagagacacttaatttgcttaattaatcaggtgtagaagcaataccataccgtagattatattataggatgtgtatagattagatattgtcgaaaaaaaatatttaaatatttatatatagtgaatttgtataaagcccacatttcaacccaatttgtcaattctcctagatgaccaccgtttcacttaccagaattagttctctttcatcaaaacaaaaacaaatgtataatatatagtgatttattgatgcaaaaccacccaacatgataccaaactaggtacacatagtcataatagactattttcattatgactatatgctgtaggttaaagaaaaaagagcaactagttttgtcaaatagaaaattggaaaattttacttttatatttctttgagagtgacttgtctgtgtgggtaagatcaattaatttcacgtggagtacaacttagtcaagtcatcgtacacaacatattaactgacgagaagtctgaatacttcaacgggatgaagggacaatgaattggccatctggagaggtccggtcggacctctaactggccctatggccagcataggccagccacccagcctctagcaaaggaagggtcggctagcatatctcctggcaagcacttggctggccaacttgcaccctacaacaggcacttgatgtgtagccttgacctttacaagcacttgatgtgcaacttgcttccgggacaaccattcaagctgcgaaatattaggcttcaacaacccataaaaatagaggataaatatcaagtatttatctattgttaggggataagtaacctgtttattatttattactaatctatatgacaaatagctatatatttcctattctttaggattattagattatattctccaggacaagccatccaagctacgaaatattgggcttaaacaacccataataaaaataagggataaatatcaactatttatcaaatcttaggagacaattaacctatttattgtttattatttatttatatgacaaattgttatatttctaattttttagggatattaggttatattctcttgtaaggtctcctataaagagcattaacctaaccttaaagaggctaagtctcaagcaccctaaagctctcaaactctaagtatgaaaccctaattccctctctccctctcttctacacgccccaagctttgtagaagagaataattaagtctcttcatcattttcacttgagatttgccaactgatatcatattgtaatcttaagagatccatttcagaatctacaatatttgtgatctaagtggtattatctttggtattgatacaaccaaaagaggaataggtcattactcattaactaagaggattgaacctctgtaaaaatattatgtctctttactttcctgttcttattgtgtacacatggtaatatttgtaataaatacaattttatagtcggtagccaaatttgaggtcaacaatattttttaaaatagtacaaactaataacttagagctcaatttttgttatttttttatgatattacttagagctcagtaaattaaaatttttaacacaaaactaagcaattagacacttaatcaaataaatgcaagtaatatggcaagcaataatgatagtatataatcaaacttgtaaagtaaagagtttaagggtaagaaattgtaaactctcaacaaatcattagtaacaaataataa

SEQ ID NO: 43493 - DNA, 3368 bp, Cannabis sativa
gtcaaatactaagtaatggtaagtttgatgggttggttaaaacaacgtaaccaaataaagaaatagaatgaaaaccgacaaatagaacaaaacagaaaacagttgaatagaatgatttcttagcaaaccaacctcaacttgttcagcttgagtagtagggttgctataacgtttgatgacatactcagagagtttaacctgagcagttgtgatttccgccgtggaattcaaaatgttccacatcctcaaaatggggcgttgaagaagttcatggcgaagaccataagccaaattactaagtgattttgcagtgtaaatccttgtaaaatgccatgtcaaaatggtcaaaagaccaatcaaaatagctaacataacctaacaaaaaaatcacaacaacaagaaaaataagataaccataacataacataacataataataattaagaagagagaaaataattaaaaaccaaccataatggcaagacgagcaacaaagacactataatatgaagaaagacaatatgtatttgcatattgaaactcttctctttcaacatctctatgaaaaactcttctaccacgaggtgttatgattgtacttcttctccatgaattggtagcaaaaccagtaattttatcaaacaccctttttagaagagagcccatttagatcaaaagttgtgatcttttctttgttttggaattctcaacaacaacaacattcatatgatgatgatgatgatcatcataacaagtgttaaaaagggattttctttctttctttctttgaacttttctctttataaaagtgccatgcattagcacaaacttgttatatgaatatgtaagagagagagagagagagatgggtgtgtgagccactagaagaagaagaagaagttggaggaagaggcagatgtacctctttctctttgcattgaaaaagtgggaaatgacacaagaaccagtatataatattaaaaacattctcaatcaatcccactcaacttttgttcttattaaagttaaacccctatatcaaattacacaaatactaatatattgtaggtagttattgattttttatattatctaatttattaaattatgtgaaatttgatattgaattgtacttataacaaatgttatctcttgttaatgttgtcaattctctattaaaaattacagtagtattgttatttgatattagtggtgtctaattctattatgagattatatttttataaatagtattttgggttaatattattttagaccatgtattctgtgaaagttattgattggactatttattttgtaaaataataaattggacctttaattttttaaaatagtacaaaatagtattttaagcttaattcttgataatttttttttttttaatataaccatcttgaaaataatttctaacatgaacagttacagaaaatatattcaattttttcataacaactctagatcaaattattattaatttttattttaacaaaaaattagtacttactattttaaaaaatgcaaaatttaatttattatttaacaaaataaaaaatttaatcaataacttaaatttaatattaaattatactaataataaaatatcattaatttcatttagaaattttgttagaaacagtctcaatccccactcaactattctctctctctctcttgttttgtcgattttccatttgccaaaattggaccatggaattaatttataaatatatatggtgaaattaatagatatgtgttaagagttgagccataaaaatatatgcacatatttattcactcacacaaacaatcaatattattctcttcagtactattattacgagaaagagaatagaaagagggaatccatatcaattatcaactagaaaagagaaaaataaaatcatcattttaacccatttatattctctttttgtttttacatgtattaattcccccaattcaactctgcatttactctctctttttcctttttcttttttcatgttgagataattagaaactcaatggatccaaaagtcaaagacaacaagaaaggttgtatcagcagtaaaaagaattgtatgtatagtttaaacttttaagataattattaatgatgacccaattaaaaaaaaattgatgagatataagactcttataactgaaattttcgaaattattaaaatgactgtaaggataagaaagagagatctgtgctacatgttaagtaaaaaaaaaaactaaatcaaaagatccctcttttttccagcaaaaaaaaaagtattattttcattattatttatttatgtatacatatctttcggtgtgttatgatgtttttattggtagtaacttgagttttaagtctccatagtcaaaaatccaaagaagggccaaccaaaacatttattaataaaagaattatttttaatagtaatttgaggcgtatatacttaaatttattttcagtttgcagtaataatatttaaattatatttttgaaatttttcgtaagtattaactgtaaagtgttattatccatgtgttatttcttatttgtatatttaaatgaattttttaataaaaataaaaatttaatgacttgaaccaaaaattgcagtaagaaaagttagaggcaagactaattacagtagcaaaatcctgaccaagttgcacttaagcccaaagaaagtcgacgagcttgatcgaagaaaaaagacaatttctaataactataaatttaagaaattttttcacacaattttattagttatacaaagccattaagaaaaggtgaaaaagaccaaatatttttttaaagcacaagtgtagtttaatgaaagcaaacttaacgtacttaaattaaaaaaaaaaattaaaggacaatagtgacatcaatgaaagaaagccttatcaccaaagttagtgacaataataataatatattatatatataattacatattaattgtatgcatgatatgagaattgagataagtatagtgtttatatattatatttgactacttgaaatgaaatgaaagcatgcaggtacaaacctacctatatatatagtcaaattttctacttattatgagaatccacaaacaaaatctactctttttcttaaatatataagaaattatattaatcttaaaagcaataaaaaaacaaaaagcataagataagtcatatggaattatatatggccatttgggtaagtggagatagcttacaaacaatccattttcgatagagactactatatagtgttatgtgtatatatatatagtcggctatatatattataatataacatatacatacattatatagaaacttttgaa

SEQ ID NO: 43494 - DNA, 3559 bp, Cannabis sativa
atatgtattagtttagaaataaaatattaagtatatacaaatatagaaaatcaaatttctctttgtaaatagccctattaatttagaattctagaatttttttaatgacgtgataatatagtagtgtaattaagatttgttaaagtatgctttcaaaaaaaaaaaaagtatcaaaacaaaaaaaatattttttaaagaagttttgtaacttagttcgtatttgaagtgatatttgaaaaaattactcaaataaaattcactagtgaatatcgtacattagttattaagaaatttttaatatcatgatgcaaaacgtaatgttggtctacctgcatcatgatatagaacaatccttaaatcaaaataaataatcatcgaatcgaactatataaataaatttaacaaacaaataagtcttgcagaattcccaagttctggtcacaaaaccccttgccctcccccacatgcaacttctaagatttactgcacagaatcatgaagctaaaactactacattgcattcctctgtattcctttccaagcttctatccaacctaacagagtaccagcactggaagaacgaccaagatacaccacttaaaaaaaatgccggactcactatggggaaactttacagatgctttagacttaccatcaaatttccttcctttttttttcctattcagagtttaattcggtggtaataaatacctcatgggagaaactgccaattagtatgtggatttaccatttcaaagcctgaatgtactgtaacctccaagattggaagacccatatccaccattgtagggctgtgacggtaatgaagtcggagggtaggaagagctgctcaattgagagtacgaagatctcaatccagtagtatctatcctaccatagctactcgaaagtgattctttgtgattgctcataacttcctgcaaacacaaaaagaaacaaaccaacaacatgacgtcagctttctttctcaagatttatcactccatatatggagtgcatcatgatttgcagctaggtatttgcattggctttattaacagtccaatcactaaaatgctttgcctactagtacaagtcatcatacagattcccaaaagaaaatagaaccatgataaaagccaaaataattacggaatttaagggtaagttgtgggaagttggattttgatggggacagaaaaaagaaaaaagaaaagtaaagaaaatgtagaaaaataaattaaaataaaaattcaatttttcatattcaacaataagaatttttttgttaaatcaactattttccaatacaattctttccattccaaacatagtaacttgattttttatttatttcccacactttactttttcctacattttcattacctctttctttcccccactaaaattcaacttccaaacatagcttaaagaaatgacaattccattccatcatcttttctctcaccactttcaccatcaccactacaaccacctctaccgctttgctctctctactttccatcctctctctacactctcccgaatttgtcattccctttcacactacttacgatttcttaccacacttcatccaacacactctaggcagcctccaccgtctctcaaaaattctctctcgggtttcttcttacataaatttctcacctttctccatactttatttatctcccctctcttacagctctcctttctctgcactttatctccactaccctcccctcttccaactctttaccattccacgtcttacctcaattctagacttaactatataaatatataatatatttgtaaaatctgcaataatgaaagtccacttgactatatattagatcaactaaaagagtattttgttaaaataaaaaacaatactattttgaattttgtgttttgcaaaaattactaaccagattcgaatcctatatttttcaaaatagtacaaaataataccataatctcaatttttgtcttttttttttttaatttttttttgtaacaaacctgaaatcaatttttaatataaacaaatacaaaaaaaataaccaacctagttacaacaccttcagatcaggttgttattatgtcttattttaactaaaatttaggtctaagatattattatgttctattttgaacaatgcaagatctaaaatgtcattaacaaaacaaaataacttttgtaaaacacatgaatagacatgtcattattcatttttattcaatattatcagcatcaccattctctcacggcaatcaaacatcaaacgaaaataaatcggttgctttctttgggaaggttgattaattatttagtaaagggatgcagcaaaaaaaataaatcctaatgtattcaagctcccaaggaaccgttaagtgatttactcatattagttagattagcccaggcagcgatttgaaccccagacctcttgcactacacaccaattcaaccattagagtgttgcgcagatgtagtaatcaatgatttgaccattcattattacattcacattgcaagaagaccaaggttcgggtctccacagttggaaagaagccaaacaatatatgaatgataagcaaaaagacatctaagttcttgtgggctgcaatgaaattttcgatggctatacgtttatattttttttttttttctaaaagtaaaagaatggtcaactttttcaaactgattccgaaatgagcagatatgctaaattgtctagtatttcattgattgtgcagggagtgagtaattgattttaataagcacctgaattagttgttgagccaactgaacttgtgttgaggtgcctttgatttccacagtgatttcatcaggaagccccatactctcttgcacagttagaatggctccactggtacgccgaatgtatgcaatattagatccttcaatgccaataatgtcttccgcataagcaagtggaatttgcatagtttgtgcaatctgattggaagaaaaggaacatgttatcatgacttctaaccaaaagtaagaacgtgaaacagaggatgagaataaaaaatactaatgctggtctcttagtcatagggggacttaagaagatgatacatgtaccaagggtcttgtgcaatttcaaagcattgcaccttgttttaaatccaatcaaaaatgaaatctgattctctttcaccataatcacatattcacctccctttttttttaaatctcttttcttcatttctttccttttttttttcacttaaaacgaaaagtggaccttgcttcagaaagtacgaaattgtaagcttataggatttaaatgaggaatcaaaatggacaaaattggccactgcccacttcaacatactataaaattggaacaacagaccagatatttccaaataaacataattgaatggaaatagtaagtagcattgtgcaaactataacctattatcatttacacacaccaacctgagtaacaatgggagcaccagtacgaccgagacttgaagaaccgagacctgaagaaccgagtcctgaagaaccgag

SEQ ID NO: 43495 - DNA, 2759 bp, Cannabis sativa
aaatattagatatagtccaataaataccataatgttaattagaccacatctaatatttttaagtatatacatatcaaatccaatcacagttatctaataatttctatccattgaattcatttcatatatatctattagtttaattttaatttattcaatattttaaacctaatatttttttagatcagatccatccaaatattttaaattcaattagatccacccaatctaaaaaaaaagtaaaattttgatattaatttttatttatacataatttcttttttttttttacttataacataaaattaatttactcatccaatctaaatattaaacttttaaacaccccatccaacattctatccaattgaatttttgaaaataacatcaaatctaatctaaccacaattgaacatctaaattttaaatgtcaattgtcattaaattggatcaatttatgcactaaggagcagtaggtaattggtaatgatttgaaaaaagctagtaaccaaaaagcattacacaaaatgattaaaataaacaaaaaatctattcaaataaatgattaacgcaaccgcatatcaaatcctcaaaagaaaaataaaaaaataaaaacaagcagtcaattagaagataagagaagtgaagggcaatctagacaagcaggattatgcataagtcactaaaacacaagttccttagtatgatacgataaactaaacaagtaaaatttgttaaaaattcgcagcaaaaacattgaatatctgaagaagaaacaaactcaacgcttctttgagacaccgacagtctttccccttcggccagtagtcttggtgtgttgtccacgaacacgaagaccccagtagtgtcgcagaccgcggtgatttctgaacatcaaccaaaacaagtcagccataataaaatctgcacatcaatgttttctatgatttgttttttccttctatcttgtacttatcgggtaaaaccagtagccagtttttgtatacagtagaaatttacaccaaacttgtgataagttcttaaatgaaaactgattagcacctcaaattttagaaagtatataatgcagcacaagattgcacccattgcccttatgcaataagcttttctatgaaaacaaactaagatctgataaatttcagtgatagttaaaaagctcaaatctcacatatggaagcagctaagcagtaaggaggatataaagcgactaaaaagcttatcaattctccaccaagccaagagttcagtcttatacgatttaaagctcaaatatgcataatttgggaagaaaattagtgtggttacatacctgatcttcttcaaccgctcaaggtcatccctaagcttcatatccaaagcattggagacgacttgggaatattttccatccttgtaatccttctttctgttgaggaaccagtcagggatcttgaactggcgaggattggcaacaattaccatcaagttatcgagctcttgggcagaaagttcaccagctctgcagtaagacattcatatctaaattttccaaaccaaatctcctccccaactcataacaaccaataattccacaaattaataacaaagataattcaatctacatcaatcaatttgtttattcaaacacccaattaagtaacaatgcactctcacaataccgaattgaattttctaatactaatgatcgaaaactaagcattccctccattttgcaaactatactattcaagtcactacacagaatcaacatcaatgaaacaatagacaactgggttcgtagaaattttggcaaaaacgaaaaacccaacactagttaagcattccctgcatttagcaaattattcaaatccctcccagaatcaaaatcaatgaaatgcactgaaataatacacagttagattcgtagaattgtaagaaaaacgaaaaacccaaacatttgaattaagaaagtaaacctcttgttcatgtcgacatcggccttcttgcatacgaggttagcgaaacggcgaccgatacctttgattgaggtaagggcaaacatgatcttttgcttcccatcaacgttggtgttcagcacacgcaaaatgtgctgaaactcctcgttagctaccagagactgcaaaaccaagaaaacccagttatcactgcccgataccaaaccaaagatacagtaaacgaaaacaagtggatcatagcgagttgactcaccatgatgaatactttgttctgctctctctctctctctgtaaaatctctcactgagagcagcggaaaggaacgcagcggaggaggagtgagaggaatttgtgagataggttttaaagtgttaagggctgcaaaccaaaaaccctagacagacgattacaccctacacccagttctatatcatatttcaatattagccgtacgattacactctaagccactttactcgtatattattggtcaaacaacacgcccccggtaaataaacgagtattagtgccaagtaaaaaaaatcagtattttgtaaattaattttaaaaatatcactctcaattttttttttgggatttttttatttttatacttcgaaatagttttttttttttacattttcacataattttacatagaaactcctattgcaaatagcgctgcaacctaaattaacgctgcaaccagtttaaaaactcaaactttaaatttgaaaaaaaaaaattaaaaatatagtatatatgataattctcctttttttt

SEQ ID NO: 43496 - DNA, 2979 bp, Cannabis sativa
attaaatccataaacaacatactaataaactagagttaaactagataaagtttaagtggaaattacaaaaatgtccttacttcaccattacgcaactttaaaaactaggggtaaaataggcataacctaatacctcacataaccctggtattttaactgcccataatttttgctccgttaattttaagatactaaactgcatctaagtgacactgttggccaaatcgtcaatttccactattaccgagcataaaacataaaaatatcaaaatttataaatatcatatatgtcacgcctagaacttaataaaatcattgtaattgagaaattatttctctactacttatttctgacaataggaatagttttctactaatgcatatattaatataaataatttaatcaattaataatctactaatttccatgtctaattatccagtcgttacacacgccattaggctttggagattttctggatgcatctagaacaaagttgtcttgatctcatccactgtgaacgatttcgaaaactcaacattattcaacaaagaaatagatggatgaacacaatcaatggcttccctccactccacttgaaatgaagaaaaagtaccagagaaataatcaaccatagcatcaggaaggcccttcattcaccaacctcattttttaacttatgaatcaaattgtttaaattatcagtacgtgaccttcttatgattctcctttatttataaatacgcatattatctatatatgaagagattctataatgggagcagccgatttgttcccaccaatggggttacttcactaaccatttgattgaaaatttatacttagctaaacgtctgtttaaaaataggaaagaactattgacattttgtaattttatttttcaaaactcgtgacctggtactcgtggctcgatcaaacctatggcattcacgagcatgtatgagtgtaggttttatttcccaaaacttgtgaactaaaaaatcatagacccgtaacctatagcttcaatctatgttcaatcctaattattgctatggggtttatacacttgtacaagttggacagttaagttggttaggattttgctagttaattttgttatgctttgttggttcggtcacacttgtattggtctatatataaagaccatttgctgttgtttagctgagttaagttgagagtgtgtagagttgtaaagggtatgagtgtgtaactcaagtccctcgagtgagccattttcagtaggagcaagactctattttagttcatgttttctgtccttgtcatgtacaatctctgagcttcattttcaatcaataaaggcaaagcctcaaggcagttccacctaaggagtagattcaagtttctgcttgtgatcgaaccttgtaattcatgtgtttccatactctattttgtcattactaactctgcattgtcttttttagttttctttgttattttttgatcacaattgtaaacggtacgattagcttatttgtattgattatggtctatgaatgatatcatgatgtaataaactgtccaatttagttaatgaaaatctttattttttccttaaatgaaagaaaaagaaaaaaaaaaactactttggcgctacttttgggtaatgttgcacacaattaatacctactatcaatgttcttttttaaaatgtaacaagtgttttggggacaaggcaaccacctaattaggagttgaattaatattttaaaatcaatgatatgattaattgagaaatccgcaagttcgtaaaaagagattgctaataaaacttttcaaatttgagtcaaagtatagaagacatgactcacttaatttggtgattaattaggtagattaataatcattgactaatgtaattaaaacaacacaaatcatgtccacggtaacatcttacttttagccttttagatgcaaggactatcttttgttttagatttcaataattttaattaggattttcgcataacaaattttgacatatactaaatcatgttcatattaatctttaaggtcattaagaatccattgaactattaagattgttagctttaaaattttttgttcaattttagtaaaaaaaaatctaatatgaatgaaagttcagtggatataatttggtacatgtcaaaattcaagggacatgatttgctatatgtcaaagtttgagggacatgatttgatagatatcaaagtttggagagtatagtttactacactgaattattaaaattgaataaaattcgacaaaaatttttaaatcctacaatctcaacttatgtagaatttttaacgacaaataaatataaatattaaaagacataatttggtcatcgtcaaattttaggaataaaatcctaataagccccattttaatttctagagaaagtgattttatcaagggtaacataaatggtaataacctaaataaatattcttgtgacaaaaatgaaagaaattcaagtgaataaaatactgtagaatcatgccgcttgatgcgcacagccaatgcaaaggtccaaaaggagatttcactttcagacttttattaaattgtaacgagtcgaccataatcgtcaacaaaatatataaataagtatttctcaaaagaaaaacataatgtttctcaaaaaaaaaaaagaaaaaaagaaaaacataatatacataagtattaatataaagtgtagagaagacattaatattcaattcttttttttttttcttttttgaacacacattaatattcaattcaaccaccatataatctctgtttaaaattcattttaaaaatatgttttattgtttgaaaagtgccaattaattataacatcctatttcgattgtttccttaacattcaaatcccaaaatatatgtctaagtatttaattattatttttattttttttcaaggatgtttgttataattatgacaaaa

SEQ ID NO: 43497 - DNA, 6158 bp, Cannabis sativa
  modified_base (48)..(56): a, c, t, g, unknown or other
accatgcaacataaaatgcgatttgtgatctttattaattagtaaatnnnnnnnnnttgaaatgagttttattttgggcacaaaacccaacacttggcccctcatcgtgttggcctttcctctcgcgtggtgtcccaccttggtagttggcctcccattttcttgcccatataccttcaaagtgtattgtaggggacttatctccaattagcttaaacatttccaaatatatacttagtgaatttccaagaacactagtatggctagttttggttttataaggctagtataactgattttggtttagtaaggtcagtatgatctaataaaaaaaaaaaggcatattgtagatactttcagcaatgtggagacgagcacagattagtctcctagtctttacattagagaattatgagtgacaatatttatataaaatttcatattttattaaatatttgatactgattaatttttttcctttattttgtacgtaggtgttctattggtgggatggaagtcacaactcttaagtttgatatattcttttatgatattaagattttggttgtctagtcctcttggggtatcttctacatgctcttaggatagacaataaactttttttagaaggaagaaaaccctccactttttgtttaaggtagttaccttagttattctaaccatcatcgattttcccttaaaaaaaagtgtcgaaaataggttcgaaattttttaaacatgtgtggtaaacaagaatatcaataactctgttatcgatactgtaaactatttagatagaaaaaaaatgttttgtatatatttttagacatggaggttgagaaagatgttaaaataagaaattagtggtaacacgcctcatatattagtatggttaaagagttgaaactatttaagatgtagggaggatgtgctatatttaacattgggtttcactttttaagtgaaggagaactattggagaatatttcataacaggagactaaagttaggtgaagaaactattcaagagaaataacaggaaagaaaatattagagttgacgagatgattttctttcttaagctaacttgagaactttttttttattagagaacaatattatgcataacatgaaacttcaaatactttattcatttggggttcatacgtcatattgagcaccatgctcaatatagataagctagtaatacaaaagtttttttagggctttcatatttagagaactcttaaacatacaaactcaccctgaccaggaaactcaaaaacataatttcagcaagtgaaatgaaaatgaaagataaaaatactagttaacaaccatacccatgcaaggatgcatggcctagattgaaacgctattcggaattcccatggcagtaactcctttttcactagtaggatggagcaaagtgtacgggaacttaacaggcccaactcggttcttcaaattcacatcattgttcctcctcataatgttgtcctcaatttgaatgagtttctttccaaacctttcaaaagcttgcaaggaatgaccttctgacgtccactcaggtgtgtctctttgtccaagataaacttcatcagaagtatgccttgacaagacctcaatcagggaaactccaatgagggtctgcaacaatggagtaatagtcttcaagaaacccttttcaggatcagactgaagctcctcatattcaggagttcccttctcaggcatgaagcgacgacttaatgtagggcgatttggaaggaaccctgcataagggtactgtccaaagttgactgccgcatgaagggcagaagcaatccatatcattattgtgcatgaatctattaactcttcacgagtttgcattttattccaccagagctcgtctttcttgtcaccatgaccgacctctctaagttccttccaccatgcctgaagttcacaatctttctggataatttcatcagtcttgtaaaagtaagaacagtactcttcaacccatgatttaattgcagaccagatctctaatccatcgacagcatatgggtagtcttctatcagtaggcgaagcccatgtggagaatttggatcctcaactgccactcctctgcatagagccaaagtgtagttgtcaactaaataagaacttaacaagaagattttcattacagacttttttttcaataaacctttacacccaacttattttttttgcaatattatatattaaagagaatttcattatccctacttgatcataagacatgggttccttttcctttaaacttttatcaaaaaatcaatgagattatatgtatatataaattcttaggcttgaaaagacttgcctcttaagaagttctgcagggagtgcctgttcaggaaaaatccagttcttatagactactgctgacatttccatagcatattttcctggaaaaactgttatttctaaaattcctccagcattaataagagtttgtcttgcaagtgcatttatattcatagtgtcccgaaaatgaggttgcaagagtttatgaattgggtggagtgcacttagttgtctatttgttgctatcacaaatggctcaatcacggcatgagtattcaacctataaacaaacaaaaattaaggcactagaccatgttacaaattgaaacaaagaattggggcaaactttccttcaaatcatcataccagtgactaatgagttgatgatagcctgagtcatttacagctacataagctttagcaagttcccaaatggcactttcaacaccttctttagatggggtgtatactttgctaactgcaccatattggtcaccattttggatgtggtaagcttaattcgaatagccaacggcttcaaagtgccatcatctttgagaaacaagagtgtcctactagcataagtctttgtcaaggttgagttaatcctcctcaagtatggcatgaatgaatcatggtgatccaatataaataacttgttgttattgagtgcctatacaaccataacacattaataattaaacaaaaatgctcgaggtaatagttactaaattagaaaatgaaatctagcacaaaaaacaatatgtcacaaaacattacctcgaatacaccaagtccatccaaattactttgaatatggtcttcaataattttactagtttggtcaccgtacactttagggtctagcgtactttttggtgggaattcctgtaattaaattggaaaaaatactaattggaaaaaaatcaattaaaataacctaaattttgcaatatttgctttaatcatgtttattaattttagtatgtaatcataaattacctcaaggcgacgaatgacaacagggttaactccagccaccatttctcttccaaactcttcatcagtcctccacccagatttattctctaagccaaattattaagacaccgaaattagatgaaccaaattaacagtgaaaagatgcaatctaatgatttttcgaatggtataaaaagtatcattgtgaacaagattgaatgtgacttatgaataaataaaaacctttaatcacatgaggtggaggatatttaaggaactgtcccctgtcaattttaaacatttcctgaagcaactcagctggaacatttttctcaatattgtcaactactgttgttggtagcttaagtcctcctttatacaggtcatatacctcttcaaagctactaaactcaccaggggtctcaccaaaataagattccaaagcaggaaaaatgccttgagctaaagactttagtccataaccaagaaagtcaaccatcttaacatgaccaaaccgttcatctcgtggaacataaacatttaaacttgtgataagactcatgctgctctcaatgttagcatctgttaagaaataacaggaaaaaaaatcacatctttaagagcaagaaccaaaattcaaactaattcccaaatcaccactctagtttgatacaagtaacacacataaatgtctaacctgtctcagtgggtggccttccggttcttcctcttcgagggtaagggaagtcactagatcctccaaggatttgacgaacataatcttgacccttatcaggattacccagatcattgtagtaagcatagtcataaactctatcccactcttggcgctctccttttccatttcctctcaagttcactaactcttgttctctcaactcacgcagtggttcgggtgtttcacttggaagatatgactacaaagataaagcccaagaacttaagataataacacaaaacagtgaatttatccttaaagaaaaaaagctctgatctttcattacgtactttatacaaacagatggagggctatcttaaaaaacaagaaccaataccttgtttctgaagaaaacacgatcgtagtcatatttggttgctgggtagatccaagagttacatacaaagtggatatcaccttcatcgggaacatctttgagtgtaaaggtcttaagaaagaatttttcggtagcgtgattatttttgacgatcaaagctcctggaactccaactgacacgtccaaatccaaagtaacattaaaagcattgtcgcctggtgctaatgaaggaaaagatgaggtaacctcattctccaagcaagcttcttttcctactttcccttttaatccatttgctgtaacaccaaaaattgtaaatgaaattatgcttgtgatgatggcaaatgtatacaaatacaatgtggtatttttttaaggacagggatgaatgataaatgatagagtaatgctagagagacatgtaatacaatttttttttttactatattcaatttctaacatagataattatatatggaaaccatgtgttatttttaattctgtagttaagactaattatacattattatatgcaaaagcagaactataatttgatgaaaataatgaaatcgaaatactctttagctttcacaaaatcctaaattatttagtctactattaagaaattatattttcttacaactatcaaataaataaattattattgttgtgacttacattcaaaatgtatcatataatgatatcattttaagttttgtggaaaaaaaaaacctcacattagtgagtactatggcatttggatacaccaagtggtgtttggaaatgacaacaaaagtttacatgttgtatatcaaaatgataaataaatcacatgaaactatctttgagttcaaatgaaaattcaaagtcaccaaatactattgataagtcacgcaactcacaaagtttaatatttcatcaactaattggtggtgcgtacgacaaatagatttcaagtgtagaaattttatcgaatagaacttagttattaactgtgtatagctttataaatagataaaagggagaagacaagatgatttagtaacttgttctttattaaaagataaaaaagaagatctacggatttttatattgtgtttctgttttttttttttttttttaatcaagaataataatctttttattaatcaaacaagccatttacaaccaaataggaaatacacctataaatttacattaaaacttacaaacttttagcatttctaataacaattctctcaaaattagaaagcttcatatcttgaataagagacaatctagttttgagattctctttaatgtttctatctatatacattggagctatacattttctttcaaaaacacacaagttccgattgagccatataccatatatggcactagctagtgtagcatagtaaatttctattaataaacttctcggtcttttttcttgaatccaatcaagaaacaattaaaaatgtattagactctttaattattttttcattatagcataatagtattacaatcaactaataatttaatagcggtgagttcgaaccatgccttctctttttctcaaccctccctcaccactggctttacactctttaattgttaatttactttttaacagttcaatcgattcgtaccatataataataaaactctatgtaccacttctctcatttaatatataatattatatataatatatatttaattatataaatatagggatatgattttgtcttattattgtactttcacggatt

SEQ ID NO: 43498 - DNA, 1972 bp, Cannabis sativa
aatgatgacaattattatttctaatgatcgatctcataggattctaatgaatttcctattagacacataaatcttcaaaacaaacttacttaataattatcaattgggagatcaataatgatcttttttaaaatcttggttaataacaaacttaaataattttcagaatctaaatcaattattatgaaaaaaatattgcaaataaaatggggtccaaagggtataaatatgttattttgaagaataataataattaagaaaaaaaattcatagccccatgtccttatacagatgctaaaacagagttttcagctgtcacataaataattataattttttaaaaatacaaataattcattatcaatagctgtctgaattgggtatttttggaaagacataaatatccatagacctaaatttgatattttcatattaaaataataaaattgagattatagagttaatttgagtgagaaaattgacattggtcaccatctaaaagagaataaaaacaacatataggtcatgatctctgactatttgaccacttcactacttttatttatttttatttaaatttaaattgttttttttttttttttgtgaagtaagatagaatcaaatttataataccaagtcaaaaatttggcactgacccatttatgtgctgctgagtaaaaggtggcaacctacccccactatatcaatcaattttgttcaataacttcattcatacaaccaaaattaattaataataatcaaattataattaacccaaaattatatatatttatagattaaagtagtacaacaatatttgcaaaatggaccgaccaaaatgccagcagctattacacagaccaaaatgttgttacaaattacaataatataattttggtgacttttccgaccaaaatcttaaaagggatgtatttttttttatataagaatattttcattttagttatttagaattttttgtaaaaaaaattaaaattattgcaagtgtcaaataaatttcaacaatttgttatagatatacgaaaaagaaggaaaaaaaatataattatgcgtgtgataaattctttaaaatttttttaccaaattagtaacatgaaaatattaaaataatggcattgaaactgtaaatttatagtcacagtaattttaatcccctggtgtaattttggttgctcttgcaaggtatataattattttgttaataatttttttataaaactattttcctaataaaaaaaaattatatttaaactttgatttctgtaccctaaacaatttgattatttaaaagttttgcataaaatcctaaataaataaaagtaacattgtatgaaatttgtaccagagagtttttcaattttaagtggaaaaaagatacataataaagtttacttgttgtggtgagaccttaattattgtgtcattaatacttgaatttggtgaccaccccccaaatctatttattattagtttttttttttttataaagtttgttgaatcacatgaagattgaaaatgaaaaaattactaataaatcaaaaattgtaaaaaaaaaattacaaaaatatgctaatatgtaagaaaatttatttttacgctttagatttttttatttacaaaaatatattttttaataaaaataataaaatattttttagttattttatagttgtattatagttgttatgaaattattttttgattgttttttattattttatagttaatttattggtttctcgttatttttagttattttcttattttttctgagcaaaatataattttgtaattttaaaattttacaagcatatttttgtaaataaaaattttagaccatataattgtaaataaatataaaaatgatatttttaaaattttcccttgaataaatatagtgtagatgtagggtgaatgaaaactttccatcctatttcaaaaaaaaaaaaaa

SEQ ID NO: 43499 - DNA, 5504 bp, Cannabis sativa
ttttggagagaaaggagtagtttatgaaaatttctgagaaggggtccctgtgggcttatgaagttgaattttcgatctgtgattttgggttgtagaaaagggttactctgggaagcttcgtaatgtttactccgcagaaggtgtggtcgagttggtctctcacgccaagaactgggagccgtaagagtggaactgggtcagggtcgaacccgaactccggagatgcgactaagggaaaaggtattgcttttcttgagtctgggtctccgccttccgaattggtagttcaggacggaggaaatatgctgatgggttcgggtgaagctgacacggacagggatagtatggttcagagaatttcccaaatcgaaaatgaggttggtgggttgtttgttttgttcgtttgtttgttgtgttgttttttatattttgtgttgactttgctggaaaaatggattttgtgtcttcctgagttgaagtgtattatgtgcattaatcttaacggaattgactgttgttgttgccagctttttgaatatcaatataatatgggcctactcttgattgaaaagaaggagtggaattctaagtatgaagaacttagacagtccttggcagaagctaaggatgctcttaaaagggagcaagcggcacatttaattgcaatgtctgatattgggaagcgggaggagaatttaaggaatgccctgggagttgagaaacagtgtgtccgtgatgtaagattgaatattctcttgatctcgctttctttgattatttatacacatttatattcgtagagattattgatgaatgtgtacatttagagctggtagtttggtggtattgttatatagaattaactctcactgactgtttgctaatatctattcttgttatttctgcagttagagaaggctttgcgtgagattcgtgctgaaaatgctgaaattaagtatacggctgactctaagttggctgaggcaaatgctttagttactagcgtagaggagaaatctctagagctagaagttaagttgcgtgcagcagatgccaagcttgctgaggttaacagaaagagttctgagatagagagaaaatcacaagactttgaggctcgagaaagcactgttcgtagggagcgtttatcctttgttgaggagtatgttcaaggcttttaacttgttctattattatattatagcttttatgtgctcattgagtgtgcgaattcatattcattatgttagagcattatgacttgttttaactatcttgtatgttgtatcaatatggtttgattttctcaggcaaaaggcacatgaaagtaatctatctaagcagaaggaggatttgcgggagtgggaaagaaaacttcaggagggagaggaaaggctagccaagggacagagacttcttaaccaaagagaggacagagccaatgagagtgataggattttgaagcagaaacagaaggaccttgaagatgctcagaggaagattgatgaagctaatgcaactttgaaggagaaagaagatgattttagcagtagagtaggaagtctaaccataaaagagaaggcaagaactctcaaatattgagctgtctttaaattgtctacaattgaaatgttagtaactctttttctgggatgcaggaatatgaagctttgcgaataaacctagagatgaaagagaaggaattattcctcttagaggaaaagttgaatgccagagaaaaagtaagcttttgcgccttttattttttataggagatacaagacttggttagtagggtaatgagatagttttgttggggctgacccacttgatatctccttatgttttgctcccaaatttttgttcttccttctctttctgccccttttctttcttctttgattaaccacatttaagttagttttgtatggctgactggatatactaccatttgcatgacacaaatgcaggatgaaattcagaagctaactgatgagcataatgcaattttggaagaaaagaaacatgcatttgaattggaagtagaacaaaagagaaaatcactagatgaggaattgaaaagcaaggtggttgatgtagagaaaaaggaagctgaaattaatcacatggaggagaaacttgcaaaacgggagcaggctttggaaaagagatgggagaagtttagggagaaagaaaaggatcatgaaacaaagttgaaaaccctaaaggaaagggagaagaccgttaaatctgaggaaaagaacttagagaaggagaagaaagaattgcttggtgacaaggaggaattgcttaggctcacggcagatgttgagaagataaggacggaaaatgaggaacaactgaggataattattgaagagaaagataagcttaaagtgagtgaagaagagaggtcagaatatgggcgcttgcaatcagaattgaaacaggaaattgacaagtacatgtatcagaaagaattgcttctgaaggaagctgaggatctaaagcagcaaaaggaaagttttgagagggagtgggaagaactggatgtgagaagagcagagatcgataaagcgctgaaaagtgtgagtgaacagagggaagagttagaaaaactgaaacaagttgaagaagagaggttgaaaaatgaaaaggcgtctgtacaagactacataagaagggagcaggaggatctcaagttggcaaaggaatcatttgcagccaacatggagcttgagaagtccttattagccgagaaagcagagagtgaaagaagccaattgcttcatgattatgaaatgaggaaaagagaactcgaaactgatatgcagaatcgacttgaggagatagaaaagccattacgtgaaaaggaaaattcctttgaggaagagaagaaaagagaactagataatattaagtacttgagagaagtagccagaagagagatggaagagttgaaacttgaaaggcataaaattgagaaagaaagactagaagccaatgcaaataaagagcatcttgaaaggcagagagttgagatacgaaaagacattgatgagctttttgaccttagcaagaagcttaaggaccagcgtgaactgtttatccaggagagagaacgcttcctatcatttattgataaactcaaggattgcagtaattgcaatgaggttatttctgaattcatgctctctgatctacagccttttgctgaaattcagaatgcggaagtacctctccttccacaactgggtgactatacaaagggtggcgtaattgaagatccggttgcttctaagaggcagaacaatgatttatctccaaatgttggttcaaaatctccactatctagtggcactatttcttggtttcgaaaatgcacaactaagatttttaagttctccccaggcaaacaaaatgagtccatctctggtcgaaatttggctgaggaaacatttgatggagaggagattatggaagaaccatccaagaaattacagggcactgaaattgaggcagagctctcttttgctgctgcaagtgaatctattgatgtccagaggaaacaatctgacaacagcataagagagtttgaagctggacaagagccctctgctgaaaatgagagcaacttaaacagcaaggggccagaaactcaaaacgattctcaggcttctgatttgaaaggtggtcgaaacaagtctcggggaagagggaaggcagctagagttgccagaacaagatctgtgaaagcagttgttgaagatgctaaggctatacttggagaagattcagaactaaatgagagtgggtatcaaaatgggactgccgaggattctgccaatactaatgctgaaaaccaggatggggccggtgttgatgataagaaaactaatctacgaaagcgaggccgtcaacagacatctcaaatcacagtcagtgagcatgatgggaatgatagtgaaggacgttcagaaagtgtcatgggagggcgacggaagagaagacgagacagagttccaccagttgagcaagctccatctggacggcgttataatctccgccgatcaaaaaagtaatattttagatctttctatataaaactaagtcgacagaatttgtcccaaaacagaataaagttcctgcatatataaatatatataatttgtcctcagtttattatagttacttgtcacaagaaatttactcttgctcttgcttattgccatcagtcaagtgacaaccgcaccggctagagcttcagttgaccatagcaaagaaaaccaggaacaagatgttgttgggggtacagaagaagtaggcgtttcttctaaagctgctccagcttcttcagcaggagttgccagtgaaaatggtggaagtatgcgcctgttgcgggttagtatatcaagggttcttttttaatctacatgtgtttctagatacatttttaggatatagtatgtgctgtactgctttttattgttataacctgttattgcttattgctattatttattgtgattgttagttcaaatatctgtcattgtagtaatattaagttgttgagaagtgatttcttctactttccttgtggtcatagatcctgttgtttattattttttctttttgaacaatcatcctgtttattaattctatatagtttcaatcaaggacttgacctttttctccaatattttgagctcacttgttcgattttcttgcttattttgtatgaactctgctgtattttgcttgtggtggttttcttcagggagcattgaaagttcatatttctaatgtgttatatcttccgttttattttgtactggcagtgtacgaatattggagacactggggatgtaataaaagacgtggctgagactggagctttgagtgaagaggtgaacgggacacctgaaagagcggagaaatattccaacagagatgagtatcagagcgaatcccacggggaagatgctagtcacgtcgaagatgaggacgaggaagaggatgaagaatcactacgtcctggtgaagcctcaattggaaagaaactatggacttttctcacgacatagtcactgagctttggttgccaacaagtgtgaatcttgactgagtcaacttttttaggcatgtatgcttttaggagcctagctaatgtgtagtagtgtgtattaacattttgatttagcgttagaagaagcatggaaatatttgaggctggggtaattgggtttttctttgccccaccatatcagtaggagtttagggtggtattgggttattttatgatattttttttttcccttgaaaaattagacaatctatgtagcagtaaatcggtgcatatttgtcactggaactcatcttcctcctctttccacattgtttgtaatcaaatgtttgtatctcttttgttctaaaaatgattgcttgaagccttgaacttgatgatctcctgtctctctctctttcactaaatctatatatatgta

SEQ ID NO: 43500 - DNA, 2488 bp, Cannabis sativa
actagaatggggaccatggatctatataactaataaatggatagataatataactattcatacaagaaatcaaaaatatacaaagtgataaaatcattaaaagtatattcaagtttgcttaaggcagattataattgtcattgcgaggcaaaattgactactgctcgaaaatcaaaagttcggtagataactaactacttaaacaggaaaattacgagcaatggaaaaacccaaaaaactttacatttgatcaaaatatagttgtttacattgtgaaaaaaaacgcaagcaaacacagttatattaagttcgaacgacaaaagtacaaggcatttaagataagagaaaacccaagttggtttacaaacttatctttacaaaaatgccactaggggcaaaccattaagccattttcctaaacaaagaatacaaggttatttatggggggttgatgaagtcaaaaaagaccatctacacgtagctcgagaaagaccgtctacacgtaaaaggtcttgacctttgcatagacctcattctctgtatcaggcagcctattactaacattagcacttaaaatttaaccagttgacgtcaacgacagcatagccaagggagtatcatatgaaggcaaaggagaagatgattttccatgcaaaaacacgtgacctgtagaagagagcacgtggtcacttaaagacattgacccagaaaaagagttgggcccaacagtaactggcccatcatcacaagtccaaaatttcttaaaaatagctctttcatcacaattaagatcaatattagtcaaattaggagcactttccttacctggaaaaaatctagaggaggaaacattaatggaattaaaggtggtgttgtcattgtttcccatgctagagatgtgcattgagctataagttggtgatcaagaattaccaaaatatttgagatagttggcaaggaatcaatactctttccctttcaaccatatttcatttattattcattacacccacagaaatcggagaagtaaaaaccttagctagagctttctcacccttggtcaaactaaccggaacacgagaaaaagttggtgacacaaccattgaatttctaccagccaccgttttccaagtgtcatagctaccatcgaacccgacaacccaccatgcaataattccttaccccgacctagcttacccgcatccttgcgagtccatttagatgacctaagcgagcgttgaattgggcaagtccttaaaaaatcaccatactttcacttatggcctctccaaaccaattctggcaataaaacacactccctcaaagggtgtccaataaccacaacaaaagcgaaattctagcaacctttcatatttgagaggaatttttgatttctcctctcctttaatcaaactaacctttataagtttaggaagaggtttggagatattgatgccgacacgaacccacaaaaacccttttaggcaattcttggaagaattctcatccacttcagtcactcatccaagaaagccaccaagttctctacccatatcgaccgtcatgcacgaaatcgagacaagatgaatctggacccaaattttgactctattaaatgccaaagaattgtaatcaccaacacccgtaggaactttgatagccaaaagttgacattctaaaagccatggaccgccaccataaactttacatttatcgttgagattcaaaaatcgaaataaaaatatattattaccaactgccttgacagtcacattaccattaatctttcaaaataaatcatcactttgtggcatatgctccctagaaaatacctttgaagaaatcaatgtccccactaaagttctctcaacactatctttatcaacatcaacaaaagccacctcaagatctccctcaataacatcctcatcactatcatcgtagtcaaacgaatcgtttaaagttgctcattcatcacgatccatgatgaataaaacaaacaactctaatagccaaacttctccaccaagagtttcaaaaaaaaaaaaaaaaaaaaaaacacattaattcaaaaccctgaaaagaaaatagatttttttttttttttaaaaaaaaacatcttctactatattatagtagtagtttacgctagtaaataattagcatttccaaaacttttgtcactatcagattatgtgccttaaaatatattgcttctaaatttttttccttacttacataaccatttcctttttcttaagttccaaattaaataataaataatatatattttttagggccagttttgcacaaccatgttgtggagaaaagcagatgtagctatactgtgaggaaacatagttgtaacataattgtagaaaaaagatgaattgagtatttggtaaataataaattttaaagtgctacgagttgttaagattctattatattaatgataatattttaatttagttaattataatcacaa

SEQ ID NO: 43501 - DNA, 2342 bp, Cannabis sativa
  modified_base (1384)..(1389): a, c, t, g, unknown or other
aaaacaatattgaccaaaagtaaattgatttttaaaatagaaaacaacattttgttgttttcaaaattcttgttttttgtaactttgctttctgaaatctgtaagccaaattgttttccaaaaacaattttctgtttttaaaaacaaaaaataattttttagttatgatgtcaaacatacaccaaatctcttaatttttgatgtacaaattgttcattcatttcactttaaacacatcttgctttgtagtaatagtccaaaaatacttaactaaagccgccttgttccatttaggacctttttgaaatcccaagcccctaactttctgggcttataaacaaggctccaagaagccagtttctgttatttattgtttgactgtctctcatgtatctcgaccctatatatatatatatatatatatatatgttaggcctgatcagtgcaattcaatttctgagagttttagttgagcaagaactattgtaactcaagagtaagagtattgagagaagttggatgtacatttgttgcaatctttgagaacctacagaattgtaatcttttctgagatagtggatatatttgacataggcatattgttggctaaccttgaagtaggattaactacgctggttatatcccaactaagtattcttgatttttttttttttttacattttgattactctgtgcttgattattagtttatttatttattttatttttaatttttttttttgctgtattttgtgcagtactgtactagatgttttgtccaggtcctagacctattcgattcttttctttttaattttcccaacagatagacttttaatcacttatgaaaaaccttattttatgttgaacaccctaattatgatcgtttataaaaataaatattttaaacgatcatacctagctaagggtcattttaaataattttatggtctctaatgctagctagcataatgttgctcattgtaaaatcaacgaatattgttgaaaaataacttttataaatgaaaagggactagagaaaaagatgagaaaaaagattataaagatcaggggagatattgagagtgaaaggaaaatatgcatcagcaaattctatttacaccctatataatgaatgataagtgcacattaatatttaaaaaaaaaaaaaaaaaaaactttttaaaaatcactctaaataatttttttttttcaaaaaattttattctcacaataatttttttgtgttagtttcaaaatttattttaattttattttcatatatttttttataataaaattttacataattttttgttataatatttaaaatgtaatttatttttatttgataagtatgtaaattagaaaaaaaataaaaaannnnnnaaaaaaaaaatattttttatgtaaaataaaaattattaaaatactagacatttataaattttttgaatacaatttaaactccccttattattagaaggacttaccatattttctgttcatgtttttatttttattttaacttgtcaatcatttaagctagtattttttttttctttttctttttgggtaaatggttaattattattattttttttctttttcttaatcttcattccaatattttcattttatctttctttgctataagtagggtcaactctcaatttaaacaagttagatttatgcttagaactcacttgaactttagtttttctttgaaaatcacacattttttaaataacagcctagtaattttttttccttaggcctaccaaatcttaggaccacctataatagatcttaaatatttcaaaatgttatacgagaaaattacaaatttcattagtttttatataatatatggaataatatagtttttttcctttaaaaaaaattactttatgagattttttcttaacaaaaaaaaaaaaaaatgggaaaaatcgctaaggtaaccagttaactcaggaggtaatgagttactttatatttttatatatatatttaaatatttgtcataatatatacatatatatatatttatatatttgaaaaatatgcatatttttgcaatcaatactgtaggaaatttaagattgtattttacaattctgccctacaccaacaaaacaaacaaatcaataattaaggtcaatttcgacctttccctgttcactttacttttcaaagtcagaatatcaaaacggtttcgttttgtgtttgaacaaaactccaaagctcgagaaacttctcaacactttgtctctttccttaagtttccctcgaaaccctagcagagagtttctctctgagaaactcaaatccaaacccta

SEQ ID NO: 43502 - DNA, 2854 bp, Cannabis sativa
atgactaaaatcaaaccaacaagtaagccgacaagtcaaatgatgataaaaaccaataatacatgcttttagataattgagcagaatagtttacaaatattaaggaacggtaggtaacactaacctcttggtcaaggcattcaaatttccatacactctcaccaagatcatttatttcattccaccacctcaatccgactaaaatacgaccactcacatttttaaccacccaaaaatcaagagcagcaagaagaacagtcaccacaaaaatgatcacaaagctatcaaaaaagagggaagaaagtatgtaaaacgtcaaagctgaggcctgaaaaaggtagaaaataaatcagcaaaactatattgacaatgtaaacaagaatcttgaagacacaaaaatgcaggttccagaattttatgcacgagaccttgaaaagaacatgaaagaagcatatttgtgggttggcatagttctctcctgcaggctgcacaaaaagattaatcatcagttcacatgaaaaatcatgttaaaaccagcattcgttattgtcaaaacatcaactagaattttttccgcgacgaaaaaaggggtagttcgatcgatttctttccctaactcttccaagacaccaaaagaaatgtccactagctaacatgtgaatggtgtttatctttttcatctatcaattattagacctaccaaagctccacagtaatctttaaaactccaataacaaaatcaatctattatcattttgaaaacatttcaatctattttcttctgtttctcatcaattacttcttctatctaatattatgaaacaagaaatcaataccaattgctaagtacgtgccgaacgaagacttaaacctcagaccctgtggaagcaaacaacatccctccctaaccatttgagctaccctccaagatatttgccatcaattctttggaaaatctaactgatgtattaagttctaacttttttatacaaaagttcttgttaaaaacacattgcatcttcaaaacccttgaacaacaactcaaaagaaatccacaaataactatttcctattcattcaaaacataaattaagacaaattaacaccgaatttcacaaattcaagcacctaagaaaacacacgcgaacacacagcattagcgaagtttcaaactcccactaactttcttgtattgttagtaatcttttcctacaattaaacgaagaattaagtcaatccctctttcaaccctaattttcccatcagacaaacaaattcgccaagctcaattggacaaccaaaattaaattctaaaacccagatccattctcacttaaaactctaggaacaaatcgtttaaaccataatacggaaaaacctagatatcaattcatataccatagagaaatcattaaacccttgatgatatatgtatccagtaaaagagctggaattgaaggttgcagagctgatagaaccgagtcaactcacctggttgagatccatattcgaaatctgaagctggagaatgaagatcggatgaaatcaaagatggttatgaagaagagaagatattaacattacagagatcaatggatatttctcttctttacacaacaacaacaacaacaatcgtagatccagtgaaagtttcagatattataaaagagtccctgtatttcttctaaattatcataataacccacctacactaatcaattctccttttgttctcccacaaaacaaacgcatcatcgtttatagtaatttattattggtttttttttttacacttcaaaatagttttattttcatatttttatggaatttcacacaaaaattcttatagcaactaatgaagcaatttaaattgcaatcaaaattcgtatagcaactcgtagaaactatcagagaaccctaaactataaatttaagaaattatctcatatactatttttaattttttttttaaatttacagtttgggttgtttcggtaatttctatgtgggttgctatacggattttaattgtgatttaagttgtttctttagttgctatagaggtttctgtgtaaaattctgtaaaaataaaaaaaaatattttttgaagtataaaaatgaataaattccttctagagaattttttaatgaataattttgggaaatttgaatttctatgattcatgaggcaattttttgggatacactctcattacatgcattttcgacttaataatgtatagttaattcctagcacatatttaaaagtgttgttaatgattaaaattataagtatgatttgatagtcctgttgtattatattatattatattgtatactatatatttttatattgtatatactatatatttttatattgtatgagtacttttagatcaaactaaaaactagtaggattagtatgcaaaaattgctttataactaaaatattcgtaactagttaccaaaatgctcaagaaaggtaaaacttgtgaacaaaaaccaaaagaagccaataatacatctagtaggggtgagcataaaatctagaaaatcgaaaaaatcattcaaaccgacctactgaacaatgttagaaccgaaatcgacaaaccgaaaaccgaaaaaactgctaacagttaaaatcgccattgaacggtcgatttttttggtaataaaccgaccgttatacatatatatattaatttattaaatttttttttgcacatattatagttactaataatatataaaaataaaaaaaatatcgcgtctactactcgattcacgtctgacaacgaaaaaaacctacaagaatggaagccacaggagtgtcgtctttctctcgctccacgtc

SEQ ID NO: 43503 - DNA, 1532 bp, Cannabis sativa
atagttatagtaattgtaaaaaatagtttagctaaattaaaataaatgctacaacttgtgtatgattgacctcctggattaaaataagaagagatgagctagcttgctaaggctttgcctcaaaataagaagagatcccacacctcttccactacaaaaggatatcattcatattatggcatgtgttatttcaatatttcgataattgtgggattaattgatttatatactctaaattataactatatgtacacaatacgaaattattccagttttcattttttcggaattattccggttttctgtttattattactggttgtttatagtggtaattcataacaaatttacattaaagttttgcagaacagagtgtaaacataactatacattgttaagaaaaactaaaataataatacctatatttaatcaactgtacgtatgtggtatcgatcttggagctctattgatttggggggccaagccaagaacacgttcacgtccaggtacgtatctacatttgttaatagatcttttgtgaatttctgaatattctttaattacctgattgaaaagtcaccatcttcttagataatagccaaatgacttgttttgtttatgtactattttcattatctagaataaatctaaaggagccaaaatcttgtcttttgccagtgtttaggcttgtgttgttgttatgattataatgttaagtcttaatccaccagggttggttttgtgcctttttttgctttttgttgttttattgttatgattagagaattgttaaacactgtttaaggttattatcaaacttcattggtcattcattccattaagtttgataacttaagttcatctgtagaacaacctacgtactcacatttgtcagataatcagatctgactcttagccaagcccctaagatattgccattttttttaagtctaattttaattctgacattagatacatcaacgtgtgtattttccaaagataaaataaaagaaaagaagacactttttaagaaggccggccctttttaatattttgctcaaaacttcttaaatgtttgagccagcagcactgttgataatatgtacaaacttataccactactagtctatgagctactctgaaacctcatacttgctctcattatattctttacctttattcattttctgaatcatattagggaaacttttcaaaaatagtaaaatttataaaagaaccatatttgatttaatttatacaaccataatagttttacatcataaatttatagttgcaaaaatagttgcacaatataacttatgatcgtttgtgcgaccatacatgattattttgctaataaatttttttgtaaaattattttgctaattcaaatttttataaaacactaattttattttcacattcttgtaacactagggaattttcatttttatgttatcttttggcaatgtttacaaaaatatgaccatttttttccttcaaaaaagccaaaattttcatattttcacaca

SEQ ID NO: 43504 - DNA, 3161 bp, Cannabis sativa
  modified_base (28)..(33): a, c, t, g, unknown or other
  modified_base (61)..(66): a, c, t, g, unknown or other
  modified_base (94)..(99): a, c, t, g, unknown or other
  modified_base (615)..(616): a, c, t, g, unknown or other
  modified_base (997)..(998): a, c, t, g, unknown or other
aatttttaatgttaatttattattattnnnnnnttttaatgttaatttattattattattnnnnnntaatgttaatttattattattattattnnnnnnattattattattattatatattgaaatttataatcggtttaattttaattttttatttaatttaatttttttaattttaaaatgatttctaaatattttaatgaattttaaataatgaataataattaaatgatgcggaccaatgcgaagatgacatggacacttacatgtcacttaactgaaaggtacttacggaagttccagaatcctaacagaaggtatttttaccaccaaaatttttacttaggtatttatctgcaactttgagataaacttaggtattacgccgcaaattactctttttttttttattgttattatatatatttctattttttgttatatggtatataaattttattgtatggtatatcattttgtttagatcatgcgtgtttagttttaattttattatatataaatgtgatatataattttgtaactacggtataattattttatggttgtatgtaattttatgaatatagtacatacaattttttttaataatattannttattttgttttattttttattattataagtatatatattttgttgtatggtatatagtttttgttgtgtatagtatatcatttatttaagatgatattgagtttctattttattatatataaattttttgatatgtatacataatttaatagtgatatatatatatatatttttggtagttgatatatataattttatgaatttatttagtataattataatttttttgtgatctataattttattaatacgttatattaattgttagatacgatatattaaatactgttttatatattttatgatttaatatatttattcgttttcttacaatactattatgcaatactaaaaaaattatataacttaattttattatnntatatatttttttaaaaaattaatatgtagtaaatgtattcttataatttttattagctaatttattatttttgtccattttgctattttttttttaaaaaaagatatttattaacttagttttttaaatttagaaccactttgcatctaaactctttatttaaagaaaattgctaaaagatattactggtatctagcaccttcctcgatgtcatgccgttgttagtgtaattaagtacggggtgccatataactttaaaaaatagcttttaaataatatcgctaactaattgtgaagcgtcacctataaaaagtgctaggcaccacaattatccaattacaatacacttacataaacgttctcattaattattttatggctagaattggagcacatgaagcaccaactaaatgacaattttaatgcttcaatttattcacgacacatcatgtgatcttaataagattactaaaagcatcaattactccgacattaatttcgatggtactctaaattaattgccctaattttgtcaaatactcttgagtttattttcttccaaacactttctttctcaactcagtttgatggttttgtgtgctaaaatatatatataaatataaatatttactttaatatttgaacatgttgatactgataaattataattgttttgcttgttaatattaacccaaagtgtagacatctgcagagagcgttcagatccaacattaagcatgcttgtctttattaagacaattttacgacaaccttcataattgtagtttatttatcatgattgaatgggaatatattttaataattttagattcttgtattaattaggacctaataatgaataatctacaaatagtataataattaacaacttttatttttatcttatatttaaaagaagttacttatcatcttcatggattgcttcattggattccacattatatggaaatgaatatatagatacaaggtatatcataataagaattttaaacaatataagttgatttactcatcctaattcataaaaatatttaataaatgtgataagtatcagaaattattaataaagcatatacaatcgatatgaaatgcaaaataataaaaatatattgaacatatatgcacaccacgaaaaagattttaatacctccacctatatttgagcttcagtcccagcaatgtttatttggattgggtaattgggcttacaagttttttctgctctctttagatagaatttattattttttacacagaatgagtcagaagcttggagatcgctactctatatttataggtgagatgctccatcagtattagtgccacattaattgttaaaatattttgacaattagtttagaaaataaaatcaggaaaggaaatcgtaatctgaccatatttagaatcttcattcttatcacattttgatttgtaatcatatacagttagcgagataatgtaaaatcaatctcaatgattttatactaatattaaaaatattctaatattctctcacttggtcagcaaaaagatttaccacttaaactaaacgttcctcattacataataaacatatgaatcatagcgatatgtccttattatatgtcgagtattatctttcatgtattacgatatatttattacataacaatgtacttaaagtggcaatgtacttaagcgagtaaactctaatctttatgtttattctagtcatctaaatataattttctcagatgaaattaaggtgcacatgaatacgaacaattatcgaaattagtgtaccattgaatgatttatttgtacaaccaaaatcttcataaagggtgattgaatcccatatttactttacaatctttaaatttatgttacgacatgccttttgtcaagaacattgcgataacccaattcatcgttgtgagcttaatgaccacttatcactcctctttctagctaaatacttaatgtcaatatggtagcttcgactataactattatagtttttagccattaataatgtgactaaatttatcgcaaaatttaattaatttcctaaatatagaatcattaactgtaatgcttggtatgaaactctataatacatgtaaagtccttttttggcaagttagttgacaaaatatttt

SEQ ID NO: 43505 - DNA, 3290 bp, Cannabis sativa
acctggatagaaagattttgattggtactggaacaatctgcttgatcgatgcctcgtggaaggacagattggctagtgtggttgtggaatggttcgagaggagtaccgaccactagtaggattgcaacatttccacctttttctttagatgtcatatcctaaaaaatgcaccagatagcctttttatcaaatttctacgtaggtgatttaatttgaagatataacagatgcaaccaaagaaacgaaagtgactaactttgggtttcattattttccataatttctcgaagagtgatacaaagacaagctttggttgaggaagcatgttaatgatatggattgttgctctcattccttcagcccaatatctacatgacacattctttgcatgtaacatgcttcgacagacctcaacaaggtgtcaattcttcctttttgctacactattttgttgttgtgtatgtggacacatcaaataatgacatatcttatacttttgtaagtattggaagaactcatcagatgtatattctcccccattatcagtgtgcatgcatcaatcttttcttcctctacttctccttctattttttctttaaattccttaaacttctctaaagtttgtgatttttctttcataaagaaaacctagacatacttggagaagtgtctattaaacgtaaccatgtagtgaattctgttgtttgacgattgcttgactcatccaaagacatcacaatggactagctcaaaagaggttgcgggcttgaagttcaactcattgtatggtaattgatgcaccttcccatactgacatcaaacacaaacaatgtcacttttgacattaagttttggaagacctttgataaccattttctccattatcgcatttaacttgtcgtaactaatgtgtcctagtctggcatgccacaagtatggtgttttattcgtttaaaccttatctacgtaagcagtctcaactaacatagcatagatagattctaaatgttaacctttaataaacggtgtcttaaatactttaagattttgataaatcttgacatcataaggaccaaaaatgacatagttttttgatgattccaattgaggtacgggtattacatttttcctcattcctggcacatgataaaatttttgtaattgaacttgataagtactagaatgtgggactacatcaaccttgtcgatgtaagtgattggcaacttagagttatttgtagttaccactacacgttctcctttgtattatgtcacacctcccaacttctccatgtctctagtcatatgatttgagcatctagagtccataatccagtccctcttttaattaatatgctctggagtgactgccaccaaaatacccattcttcaaagcttgcattcttcttgcaagattcatttactataaatgatgctttaaaatcccactcttctttgtcatcaatcttcttgttggaggttgttgcattgccttcgacataattctttgaataaaaatgtctagcaatatgccctttgtttccatatttttttgtttactcatctaattattcttgtgtgtcatgattcttttgagctccccctactatgagcttctatgtttcttatgtaacttctcattactcctatgttattttattgcttgggttaaccttgtcttttgttgcagaagaatgcttgatcatcttcactctttatttaaattttcaacatatgcttagccaaagtttctctatcggttagcaagttttcaaactcgacgaaagaaggcttggttgaccaaccttgtattgcaacaataaaacttttatattcgagttgcaatccacaaataattattcttcttattcttgcttctgtattttctaagttggctctaaatcagaaatctcatgataaagagattatactttgttaaaatattagttgattgtcatttcttgttgtgagattgacaagaactcattctctataagttgaagtcttgcatcactcttctttgagaaaagtgtgacgaatgtgtacccaaccctcctttggcgactcaacttttctgatgtgcataaacatttcctctttgatcatggtgttgattgcacacaacacatttccagctttgatcttccattttatcaaagctacaacatcttcaagtgggtttacttcactaccaattacaacctcccacaagtcttggctttggaggtataattccatcattgttgaccaagtattttaattctagttgttgagcttctttataccatcaattacttgagcgtcacccatcgttctttaggtaacgaattaccaaaaaagcttatcccaacttgtaagcttaacaaactcaaattatgcacgacaacaagaagctcttctaccactacgagctcgacaaacttggctctgataccacttgttgagtaagaaaattacaacactttgttattaagaaagagtacttacaaacttagaatcatttggacacaatgactagctacgacactcttactcttttacacactttggactctctttctcacacttgaattatcttgcttcatcttgtattctaagcatagacctcaaatctatttataggctacaagtgaagtatatctaagtttttatagaattttctaattttctaagtgaagtattatgcaacattatcatatatattattagaatttttttattctagatttttttaaaataaacttctcttattgatttcaatggttgtaataaatattttattttataaatttaattttggaatctcagatttgtaaaaataaaaaactagcaaacaattcgatgatgaatttttttgaaagaatatggaaatatggaaatatttttttaaacttttaataatatattttttcttttaatttctgattaattaatttatttatttaaaataaaatttgattaatgtttttattaatttaaaattcaaatgagttaaactaaccaggaactaacacgtagaactatcgcaagtatttaacagaattattaaacgggcactaacagattaatatcaaaataagagtatttgtgctggtatttttcatattaaagtatttagtaggaataaatctaataaattaaatatttataccgcaaatttcttatttatcttttatagttttccaaaaaaaaattaatagtcatctaatttctataataattatttagtcgtaaattaattttgttcagtaataataattatagtaaatagaaataataacgtttacaaa

SEQ ID NO: 43506 - DNA, 4436 bp, Cannabis sativa
tgtaaatggggtgatgtaaatgagggtattttagggatatcataaaagttgtcatatcttacaaatattagttattatttgtttaaaaaaaaaaaaattagccaaatgtaagcataaaaaatcaaatttcccaatagagatatcttgagtgctaagatgggttcttgtcctttggttgttaggagaaacttgtttggggaagggagattattcgggagggttataggtggcgtattgggtcgggcgaccaagttaaaattgtggaggatagatggctgcataggccatccaatttctccttaatggttaggcctattttacctcaagatattcgagtggtggatttgaggttggcctcagaggagtgggattatgagttcttaaaagctaattttcatgttaacgataattctcttattcttagcttggtgcctggtacattagattctaaagatcgtattatttggcactataataagaatagggagtattcggtacaaagcatgtatcaagtggcaatcaagaagaaggaaagagtggaggggtcgaatggaaggtgtggagcaatggtggcggcgagtttagggtttataggtgccgaccaagatcaaacattttatttggcgattttgtcatgggtggctacccacttctacggtgcttaagaagaggcgggatgagagatgtggcggggtgttgtagatgtgctttacatttagaggatgaagattgatttcatgctatttggggttgcgcttttaatctttagaaagttgctgattttgggaagattgttagaagttgtgggaatgaagatcctattgactttcttagccctattgcaagggtgctacctaaggagaggtttgatatctttgttaccttaacgtagcaggcttggtatatgcgtaattgtgctttatatcatgcttttgttccaaaagtggagcgggcttttatattgggttgctgattatttacacgagttccgggctaggaatcatggtgggcgactggttgttgagaggccaaagtgtagatggcaacctctgggggttggggaggtgattattaatgtcgatgctgcagttagtaagactgatggttactgtagtactggtggggtggttcgaaattatttgggggaggttatcgcagcgcaaggtatattcttgagtagacccttttattctagtattgctgaattattagctattaaacatgggattgaattgactggtcttttatttttggaccgatgtataatttcttctgactgtagcttggttgtagctatgttaggaaggtcgcttgagttggctagtgaatgggatttgcttgttgtaaatcttagtcacttgattatggaatttggtatcatagatgtgtcttttcgatcagatacttggaatgaagtggcacattttatagttaaggatgttttatgttgtaaaacttctagcttttgggatggagatgttcctccaatggctgcctctgctgtgttagaagatttgcctctccttatgtaatgtttggtggtgatgtactgttttggttaaaaaaaaagaataatatctttttggtaaataagatgggatgtagttataaaaaataatatttaataaggtaaatttaataatgaggtgtagttataatttttaggagtgtaaatataatctctcttatttttatattattattttatatttttttaataaattattaaataaatatgaaatgatatattaaattttgtattaaaatttatatttataatcggtataatattactaattaatgtaaaatattataaagccatttctatttgttctaaatataatttaaattttacctctcttttgattggatatgttctaaaaggttcatttggtacgtcgtattgtattaaataataaataacactatgtttggataaaacaatgtattgtattaattattacgaccaaattttttaatacaatgcatgttgtattaattaatacataacaaatgatccgtattagcttgtattataatatttacaaaggattcagggtcaacaccaatctccaatctggacctgggacccacacatggacccaaatctggactccgaccccaactcggactccagacctggaccacgaacccagacccagacctagacccggacctggacccggacccagacccgagcccgaaccccgaacccggacccggacccggtccccggacttggacccgtactcggatccagacccagacttggacccggactcaaacccaaacccagacttgggacccgaactcggatctggactcggaatccaacccggtcccgaactcagacccggatcccgactcggatcccgaaacaagatctagatccgaacccaaataatactatacaatacaatacaacacattaatacaagtcaatactaactatagtattgtattaaataatactaatataatacaatacaatataattcaatacaatacgacgtaccaaacgagttcaaaaatatttaaattaaagataatttgcaatatatattgacattgggtggctggtcaatggaaaatcggtcaaaaaagagaataaaatattactttagaacttagaagacagaatgactcaggctataaataaaatattatataaaaatgaggaagatgagaggtgtctgttgtcagttaatttgagcattaaaatataataaacagaaaatgagaataataataataaaatagcaccgaagacggcaaatttaatatttaattaagagagagagtcacacagaggggcaatgctccaaacgtgtcgaacgcgaggaacgagggaatgcaccttcagctccacgtcagcatgaacacgtgtcgcagagacagttaagggaacctgagatattgtgcaagcgtcaactgatgttgaaatgtggtcttacacgtgtcgaaatctccatcgttacgtagacgctttcattgcacaactggaggcaactggaatgaagtgaacggtgaacggtgcgaaccacctctctaactgtactcactgtacctttcatttgcctttctctcacgctccaaactccaaacccacacccaagggcaaactaatcatttatcattgactattatttatttatttctaattttaggcgcaacaataaagttatgttgtttctcctctgcatctttagagcaatagagcactcactgtcgttatcaatctatcatcactgaaatttgtgcgaaattataatcaatgcacaagatttaaaatttcattgaaatttctattaagtttggtaaagaaaaatatatatatttaacttattatttataattatgctctataaaataagtaaaagaaaaataattatttaatattttattaaatatacaaaaaatattattattttttattgtttaattaataatgatatggtaaataaataatataaaatttagtaaatattaataaatcataataaatagtagaattatagtaaataaaaaaaaatatttattatgagttaaatttagcctaatattatattttatactaaatatagcaaaattttaagtatgtgtcaaatttatcacattttttaaaatactattgaaatagtaatttttttacaatatgctaacatatagcaatacactattaaaaatattgtaatagatgaattaaaataactcattctttaagaaagttaaaccttaacttttcttttttgtaaagtaagttcaacgttaactatatcacacattttttctcttaatgaatagtttactaagttttttttttaaacatacttcattacatcaaacaacattacacagaatttggcgagtcatgctgaagagcatgacttgcacaaggaggattaaccctaatctacatgacactagctttgttaagcaaaacttcattggctaaaacataaactacttgattaacttccctataaccgaaattcaaactagcaactctttcattttctagtagaaatctaatatgctcagcaataccatcaacatctcgaaagcctccttcatttttaaaaattaatttagcagcttgaaggcaatcaatttccacctaaaaacgacaaaatctctgctgaattccagtctgaatcccagctataatggcctgaagttttgcttgaagtggagtcatctccctagctacaaaagttgcagcagcaaactgtgatcgtccctgctgatcacgcatcaccatactgatgttagcttctccaagaccttctctcacccttgcatcaacattcaacatgagcatatctttatgaatacaacccgaataagtttacgaaaaattcaaatcacccaatgaatatattaggcggtttgaatattattctaacccgcccaaataacctgaataaatcgattta

SEQ ID NO: 43507 - DNA, 2039 bp, Cannabis sativa
tactgattattcctattgaataaagatccatcatacattcaatatcaagctaagttttctttatctatttttcaattaagttcaagttttgattttatgattagtgttagttttgaattgtatttcttagatattattagtgttgtaacaacttgttttgaaggtgaagattaaccacaacacgcttagttttaattttattacttacattatggctaacattgttcgatgaaaaacatacataattgatatatatttatgtatgtacatagatttgaaaacaaaaatagaaaaaaagtagaataaacaatatgaaagaaatgaaaaaaaaacaaatgaaaatacaagtgaaaaatacgtaaaggaaaaatgaagaaaagcttgaacaagaaaaagtatgaagtcttttgtttgaaagagactacttttcactatttcaagaaaaaaaatatttggaattaaataagtctttaacatattattaggttagagctcaatagatgagaacaaaactagaaacaaaaattatccaagctcaacattatttacaaagatattcttgtcaactatagactcagaaacaaaattagacactttctgtcttaacgtttatttcgccaaattataagcaggagttatttttttgttattaatttgtgagatattctcaagtgaaaatttattatgttaaatttatacaacattttttcatttagtcaatctttaaattaatgtacctcaataattatctttcttagataacaaacacattaatcatgtcaatatatcatctttttatgacgaatattccatgtatttcaatatatttgttacttatatgcaaagtatagatttgactttggtaaaagtgagtttgggtaatagtattttcttaaatttcccaaaataatcatagtgtataaagtttgagtgggccttaggaatgggcctaatctatcttagcccatggttaaacctgtaattaaacgaacaaatcttatatttattcaaggtgatatgaaatttattttttttcaaatgaaattaagatacacattaatatgagaaaatatcgaaataaaagttttattgagtaatagttttaattgttcaatgaaaattttataaaggaaattataacatgtatttactttatagctcgtggatttatgttgtgacacgctcttagagaagaacgaaagctcttgaaactgaatgacattgggagtactagtaacacacctactttctttcgacttcaaacaaaattactcaaatgcccattaattttttaataatttataaattaacttgcatcatataattaatgatatatgattaaagcaaatcaacttggattataccttatgttagaattttaaaataaaaattataagccatgtgtaattatacactaaatttattaggttgtaaatcttaactccaatactgcaatcattacttcaataatgaaatgatcaaacaccctaaatcaaaatgcattttttttgcaactaaactctgtaatttttattgtgtttggatttaattaagatgatgattttcttataaatagaaatttgaatttgatgaacatttttttgaaaaaaaaaaaaataaattgaaatctcatttcagaaatattttgtaatttttacaaatacttgtgatatatagagtattattaatttatcaaaaccaataatttttttcattattatcttcttttttaatgaatactaattaatgggcaaaattctacaaaaaatcataatttaatgaaaaaaaatcttatttattcttgattattattattattaattatgaatttataagttgactattggttaagatgagatatagaaataatttttttaattaatataaaatttccattatgttttatagtcaatcattcatttaattaagtgaagaaaaaacagctaagcaaggtcaatagtaattgagtagttattacttagttggttttctttacatagggtcacacaagttgcttttctagtattaaagagttaaaa

SEQ ID NO: 43508 - DNA, 1579 bp, Cannabis sativa
cctctgcagtagtcataaactgttgttttcttttaatgggtaattaatgtttattagtgactgtaattagtatatgaatgttaatgaattaattactaatatttcttaaacataccgttttaattaagcttttgaaaccctaatttcgtttacctataaaaaaccctaatctgtgctatttttctgttgatgttatggaacaagtgactaggcaagtgatattatatactgagaaaatatatagaggagctatatcttaggtatatatataggcacagtgtactcatgagctagctagctatagctaatgagagagtgacacctctctatactcttttttggttcattgtatatttacatatatatatgacatgggaaagagaaaataaagaaagatctagacgaataatatatatacaaacataaaacacaaagtaataaaactaacctaagaaaatcttttagtaaagcctatatatatatctactaatctacaacttaatttgccctaaaaattacaactacaactatttattggctcagcagatctataatatattctctgttgaacaaaggatttatcacatatatatatacatgaaatacagaaaggaaaaactaacatatacatctagttcattaatattccacaaaagatttttccctcaaaaagttcacaccaaaataaaaaaaataataataacaagagtaaaatgaatcaatctttgcttcttttttttctttgtccaagttaaaaaatattaaaaaaagaaaagaaatcaaaacaagaatcaagctttgcttgagatctgaaatagaaacaatatagttcacataaggaaattagaattaacaagtatattaattaattaattaagacctgttgttggcatactcatagaggcgtccacgggttgagaaaacgattagagcaacctcagcatcacacaaaacagataactcataagctttcttaagtaaaccattgcgtctcttacagaaagtcacttgtctgtttgttgtgttttctattctctttatctctattttccctcttcccatttttctatgtgaagagctctctcctccttcttcttcattattattattactcccaaactccatccaatataaatatattcctgtataacaaagtattataacctcaaatcaatttcatttcatacataaaattaaacaaaaaaaaaacttattaataaacatatatgctcacataccttttgactcttatctctatgaaaataataaagtgtatatgttattattagtgggaaatagctagctagaggagagaaaaagatgaagatagaagaagaagatatatagaggtgagcaaagagggtctgctctagcaaatgggtatttttggtactttaaatagacctttcaaccattctccaactcacacactatcatcttttttttatctattttatttatttgcttttcataatcctagtgggctccagattaaaaatacttacatttataatcattttttttttggtatatattactatttttgtattgaatattttgaaataagctacatatttat

SEQ ID NO: 43509 - DNA, 2160 bp, Cannabis sativa
acacacacaggaatgggcattgtgaactttatataaaatggatgtaaagttaatgtcattgatgtagaatgtacatgtaatgtactataggtttcatttttcttcatttttaaatcttgaattatgaaatgatattatcatgattggtgatatgttcgagttttgtttgaacattttgttgtttttgatctgatctgcttaccgctcttttatgcagatggggaaaagaccacagcttacggatgagctcgaggaattggattcatcgagtgagcctgacattggtcaatctggattggaattggatgaaaagaaagctgattcagttgctttgaaatttctggtcgacttgttccgccagtgtaccaaggagaacccgaaggaccggccaactgcctcagagctgtatgaaatgttgattgcacagccaagcaaccttaccatcacagaaagaagttaggtattaaagtagattaaagttataggtaatgatcaatacccaccaccacacccattataattttttttgtagacttagtagattgttgtaccatagggatggccatttatatactcacaaacttaagctatttttcttgacatcaagcgggagaaacttccattataatttagttgagatttgtaaaaattgttatatggtttctggtacgggcaattcttgggcggcagcgtattctttttctgtctttaccatgactaaacccgattgatcattaagttgctgcccagaatataattcacaattattcagttatatattatttaatgaattacaacattccatatctggaatttcagtatttactttattttttcgctagttttatttatcttgctctgatacagacaacattgtaagattgtagtctctctctacaatacgatctacttctgaaatatagtctaatgaattttcgacaagaaaacaggtaaggacatatttgttaatattaatctggagtaatattaactgaccatagggtaaccacgtgaagagagggtctttagcgtgtaagtatggtcatccatcgtcctccttccatggtgtcttggtttattttttcgggtatcttggttttttcatgtgtcctttgttttcgacatgtgtgacttgtcttttgtcttccttttagcttactttaggcctcttgcttttactttgatttacacctttctcacccttagtctctttctgtcctttcccttggttgttttttttcctcctgtttgtctctttttcttccccttagtgttgtgtggcgtagtgttagttttggtttttgtttctcgtccatgtaaaagatctttttttgatcatgtttgactttgttttgttttcttttctttgttccttgagtttaaatttgggttttcatccaaacaaatcttatgcagccacgtaatcctaaattttccattgtttgtggactcgataaatgccatgaccctacacagacatgggcacgtacaaaccatccagaagatttttttttgaccaagtttagctttgttttgttttgttttgtttttttttttcttgagtttaaattttggtatgcatccaaacaaatgctatgtggcaatgcaagctacggttttttgttgcctgtggggtggatgccacgaccctatgcacacatgagcgactacggaccatggaggagattttttttgaccaagtttcactttgttttgttttcctattttcttgagtttaacttttggttttcatctaaaaaaaatttatgtggccatgcaagccacagattttcgttgcctgtggattcggtggatgccacgaccctatgcacacatgggcgcctatagaccatgcaaaacattttttttttttgacaaagtttggctttgttttgttttgttttttttttcttgagtttaaattttggttttcatccaaataaatcctatgtggacatgcaagccacggttttctgtagcttgtggactcgatggataccacaaccctatgcacacatgggtgccagcggtccatacaaaagatcttttttgaccaagttttactttgttttgttttgttttcttgattttttgagtttagcttttggtttccatccaaacaaatgttatgtggcaataaaagccacgatttttcgttgc

SEQ ID NO: 43510 - DNA, 3645 bp, Cannabis sativa
tttttttttttttcttttcagtttgaggaccaagagagatacattggtccgatgggtccgattggtcggaacccatcggaccatgtggtccgaccatcggaccatgtgcattgtttttttttctttttttgttcggtccgagagagagagacaaagtagatagagggggtatttttggggttttgaaaaaaatgtcatattttttatagtgtaaaatgtattggtttaaaaaaaaaattttaaaaacttttaagtatagaaaatcaaatttccctatcaaaaataacatgcatgcttttgtaattacaagaatcattaaaggccaccacttacccaacgctactatatatatgacgattatattattattaatataatttaatattgaatctcacatattttaatttaatatttattatataaaaaaattactaactactcataaaacactacaatagtgtcagctataataagttaataacaatatgctccattcttacacaaattagaaatttaggaagctgtcttttcaccgcacttaatttgttgcatcttattatatcgagtaagttccaagtaataatgacaatttccacttctttttggctgtttaataattaaatatattgatttatggtgattttgagacaccccatttcttatcaacatagatcaaagaaagtaatcttcaaacattctaaccacaacaaccacgtctaacagcaccccattagtcacaaacagcaatcgatggacaattaatataatagacaacaaaacccaattgtataaactttatttttgctttttaattctaaatcccatcattaaaggtaagaaaaggtctccactccactcatacacaaatatgccataaacaaaatgaaattattatgttatattatatactagtttgtcataattaatctgaaatgaacttttgctattaattttgtcaaaaataaactattgcagtctgaatgtcgtacgtcggtctaaattgtcgtaaattatgttacgcgtcaaattaagcaaggaacgtctcacatgtcacaagcgatatagttttaatacttttattagtactgcataattttaattttaatatatagtatctatacattttatataacaagtattttaaagttaggcaagaatttcggtttcaaaagaataattattttaaataatgcgacacccctctgtcgaaaataatatgaaataatgcaattttagcaagtaatattaaaacaactaatgtctagctctcttgaccaattattagtaaaataaaataaaatggtacatgattagtattaatggcaacatgcattatccaagtattaaatttgtattttttttaattaattaattatgagtaaggtagggaaatgggacctattcctttggagagagcgttaggtatgaagtccaacccaagtcatcagtacctcctctctccctcccatcccatcttctagtgcatgagttgttttcaaaaagtatgcaatagaaatggtcagtggaccaaacacactacttacttacttactcccaaatcccctttacaccaatatataatgactcccaaaccgctattctcaatcatcaatatcatcttcttctcttaattcttcttctctctcactctctctctctgtctttctccttcattaaccaatatggcaaacaccagcttagagattgggttgctaattgtattagtaatttacatggttatgccaatctcttcagccacggtttacacggttggagacacatcaggttgggcaatgggcgtggactacaccacttggacaagtgacaaaaccttcctagttggagatagcctaggtaaatatgtctcactttaattaattaatttttttttacaaaatgggtccatctctgtttttgttatattgtataataaatatgatttatgtgtatgtagttttcaactatggaagtagccacacagtggacgaagtgagctcaagtgactacagcagctgcacagtagggaatgcaatcacatcagacaacacaggaacaaccacaatcagtctcaagacaacaggtactcattacttcatttgtggtgtaatgggtcattgtggcaatgggatgaagttggctgtcacagtcaaatctgggggtggctcatcatcaaccaccaccccatcatcatcatcatcttcttctggtggtggtggtggaactagcagtaccaccagcacaccaggggttaggacacccacctcatcatcatctcatgataattctccggcggattcatctacaggcccaagtactgttttggtgaacatgtttggtactactgttgtggctgtgttttgttgcttatttattattggtctagttcattaattaatttgttgctatgtgttgcttttctcgtgtattgaattgaattggttggcagagttgatcagtttgtacttgtagtagttttgtttgtaccactacaactactactactactactataaattactctggtcaggatagaggcagtgcccttattattaatatttgcttctacttttctgtatttagtttggagtctttcatcccattttcctcattctctattattattattattattattattatttactaatgatatgtgtaggctatgtttcttctttaatttccttggaaaacctttcatgagtaaaaatatgatagtcccataagagtagagtacgacatttaattaaaaatctttgaataattaggatttttgtccccgaactttgacttatacaaacgtgcctgctgaacttttcatattattaaaatttctctcgaactattgagattgttaaattcaagaatttttgtccaattctattaaattttattaatacgacgattgtcaatgtattaaagcgtaccctcgaattttaatatatacatcattatacctcctgaactttaacatgtatcaaataatgtctcttaaattttcatccacgtcaggcatttgttagtaaaattggacagaaattcttgaatctaacaatcttagcagttcagagaaaattttaaatggcctaaaaaattcaaagggcacaatttagtacatgtcaaaatttacaaggtaaaaatcctaattagccaaaatctttatttccctaatcttgcataacccttttttataaatcaatagatcattttagatgaaaaatatcattccatataaagttgtacattcgggcagctttacccgtttttataaagcctacttattttatgtgagcccaacccgacccattttataaaacgagatggaccgggcctggcccatatttttaaagtaagctcattccagcccataagcacaaattatttgtgttgggccagacccgtgtcgggcctagacaggccagcccgttttttatgaaatgatcgacccatatttatcaaatgggcctaaacggacctataaataattgctaatttgttttacttttcaaattagtttctatattttaaagcacaaatgattgttaaaattagcttcaaaatcacaaaaaaagaagctacatttacatgtttaataatcaaattaatatcaccataattatggtctattattaaattttcacataaagt

SEQ ID NO: 43511 - DNA, 2333 bp, Cannabis sativa
aaaaagaaacagtaaaaagaaacaagtaataacaaagagacatactgctttgctaatgactcctccaagacaacagtgaactcaaacttgatttgtggcagaggaccaactgtgtaaagacttttctctccatcatatgcaaaccttttaccagaaaattcagaagaataagtttggtgcagcctatcaataacttttcttccaattcccttaagattaacttctttaccatcttctgaagtaatagatacctgaaagtggtagtacatcataatcaaattataatgagattgaataaacccagaaagcacaaaaacacatgcaactgaaacatacactgtagtgataaaatactgcatctgggacattaagggaaacattaaaatgatttgccagtaaaggtatccggcgccctgcacgtccagttccttttctgctcattaaagaatactttggaggggtgacggccagttcttgattcacaattgccgggacaccacattgttccttagaacccatctgtagatatttcaacaaaagttattgaagaaatcattcacaatatgaaacaaaaaagtacaagcctaaaccttgtttccaaccactaaagacttttcaatttcctagaaggcaaatatgacccaaaaaaaatacaaaacccttgaaactttttaaaaggcaaaaaaaaattaatagaaaacccttaaaaccttttaaaggcacatacagtaccagaaaaacaaattaaacaactgcgcatacagaagaaatcttccaaaacacaatataggtacattctcaagcacaataatcatttgattttgtttcataaagagaacactaccatgaacccaagaaacccagaaatccatttcgtaaaaagaaccaagagaaatatagacatgcttatacagaaagataaacaggaaattcagtctcaacatcgatacaaatagaagccacatatgaaaacagagatagagcaatgcagcatggaaaacaaaagtcggtaacgaactaatccaatctaaagattcgttcatgcaaaaattactccatttttttaagtttattaaacagaaaaataggagaagaggaagatcgcagaaaaaacactaccatctggtatacataattatataattataaacaaattgagtaggaaacacaataatcgtacctactaagctttctttcttgctttccttcacggccgactgagactaaaagagtgaagatggaaagagagagtgacaaagagaccttgaggctggagggaaaaaaaatatataatatatagatataaatttggtttccaattttaaatttggtttcccaattttctcaaaagaaaataaaataataataataataataaaatggtttctcaaatctaaatttggtttgccaagactgccctttcgcatttctcatattctgtccgtatttgtttgtgaggtacggcattacgttaggacgcagacgcacgggccacggccactccattgtacagaagatgtgggaaaacgttgagcctgttgccaagaattttgacacgtgagccgtggtgaattctctccttgttagaaaaagtggaagaaaattaataattattactagtaacattttttttaatcattcaaatacatattatatcaaaaaaaaaatataatatttttttactttaatttttcttttttaccaatgaataacttcattgaaaaaagaaatcataatatcatacaatctttaagtcttaagaaactccaataaaagaagaaatatcatcaaattatactagttctctatccacccgaagagcatgcgtaactaatccatgtgcaacctcattggttgtctgacgaacatggattagggatactccaagaaaactagctagacagcaaactagctaaatcctctaacaagaaatcaagttcattgaggaaaaaagtacgtttagaaaacgcaattacaaccgctaaacaatcagattcaacaaaatgtaaagaaagtcccacaataatattttttttactttaattaaataaatatatagtacaaaatcttcacatcatttcactctaatagcactccgaattatgtaccaaattaatgtgcactaattctacactattaatagtgttgaattttaaatatacaccaatttagtgtacaacattttttttgcattgtaacacttattttattttattttaaaatataatcatacattatattcctcaaattaaaatttatcacaaaaataataattactttttttataaaaaaaaaaataaaatattttttaaaacactaacatatttaaaaat

SEQ ID NO: 43512 - DNA, 1617 bp, Cannabis sativa
tgtataatcacacctaagtttagatgacaatgtgagatgatattgaatgagaaacaaggtgatgatgattttataatttgtaggcactattatggtttatggaggatatgggggaataatgataaagtatggatggctctatatatagagcttatatggaatagggtatgagatgtagagtaatatgtagagtgatggtagtatatgttgagaatttggttgactgaactaaggaatgaatcaagaaaagtggtatttatagactctagtgaataactacacacatatttattgtaaccacacttaacctaagacaattttttaataatcaattaagtgtttaaaggaaacatttaaaatgacacgtggatattcttaagggtcactgatgctattttggtgaatgacgagttcaacctattgtttttcttaagaaaggaatgctcatgggtatacacctcaccaaaattattatagactaagtggtcatattatcaaaagatgctaactaatttcacttatttctcttacctagcacacacatgcaaattactctaaatgaagctaacaaatttatatttcgtataatcctattgattctcttagaagagaaaaactctctctagggttttttctcttttctttctgagctagggtttcttctcattcgccttcctctttctcggctaaggacccagccgccggcctgccgtgcgtctggtgttctctaaccgagagggagttagatggcgtttcttatggtcatggatctctactcttcgaaagggtggaagctggttaggggcagactttcttggggacgcctttggtgggagatcaatgagtttggggttctgcggtcgacaatggacgctgcagtaaaggggtgtcagttggacgctccgaaggttgtagcggtggggcttcgatggggagcatcgtccttgctcgaccgatgctactagttttggggcttcgtggtctacaatggcgattgttcgttggaggctatgaagattgcagtagtgtgtctctgttggggaccgtaacccttgctcggccgacaaagctagttttggtcccctgccttttcttttgggttttgcggacgggctgtggtggtttggccacccgatgtcgatcctcttccgtcactgaaagtttgttggtggccgcatgtttcctcatgtctcgttgttgtggagtctttggttatggttttatttttttgttgttattttctttagatttttgactgcttttaatcttgatgttttattttgggtttttgcttttatttttgggtctagttatggacattctcttgtgagagatttggaggttggtatccttggtttttttttccttatcttccatttatggtggtatggtactttacaatgactttgactactatgaatgtaggtcagtctttaggccttgttgccgtttgctcgcccatatcgggattgatttgcttttgcttatcgttgagtagtgtaatagactatgttgaatgaaatcattgatccttcccttaaaacaaaaaataaataaataaccatccatggaatgccgcacgtccaccttaaaaataaaaagctagataatgttcaa

SEQ ID NO: 43513 - DNA, 1879 bp, Cannabis sativa
ttttcggacgtaaaaattaactaaaaggttataacaagaagttaacggtagcactcctcgagttgagtattgtttttctctacttctctcttttttacgtgaaaaactactctcttttacaatttgacgtagatgtacgtatatatatgtgagattaagatttgagaatttctaattaaaatctattatctaaaatttaagaagaatctaattcagacaattattattataattgaaaagtgaaatcagacatatataatttggtggtagtactctaacttatttgagaagttgaaggatatatatataagaggaatggattagtacaaagtaattttttttttttttaatatttattaaatcgctatcaactgatctattttgtaaaagaaaacttttaaatataatatcaaataaatgcaacacctttgttatagcaaaatctaaagaaaatgatcagttgatcttattaacatattcgcttttcaaattaacatttataaatagtaattaagaaggtgaaaaacttggaacaaattctcatattaaatattataaaattaatcactatttttttacaatgttattgttaatattaattacaattgataataagtattctaattgtaacccaccaacatttttgctgcttggcatctacctaacaatgtcacctagatgagtgtaaacaataattcaataagatgtgtattatgttataatttatatataatataaactcattaatttatatacacatatataatttgggatttgtggctaatgtttttgggaccttatttaattgtgaagcaatattattaggctagtatcttagctggctctgttctctaagctctaataaactaaattgttaaagccatcccaagttcatataatctaaccgaaattttaactggcatctacaacatataactacttcttctgatcagttgtcttgtctactttcttaaaacctgtttcttataagattcaattctatagctaggaaagataataattttaaataatatgattaagtcaatcaagaaaacccaataaaaaaattgctataatatattaataatagtgtcacatttgttattctctcttttttttttttattttttaatttgaaaggatattctctctctcttttctctcacaattagttggtagatttaattgtatacttcagtctcttgatagttgacattacagttgcccctttttataaaactgcctttcattaaccagaaagggaggaggctttcattaattaatttcttaaagaataagtaaaacaactttttgttttatttaatttttttattgcattttatctgttattattattaaataaatatattttgaatcttgtattttgtaaatactagtatggattgatgtatttcttttatcaatttggagtattttaatctaatttacaaaatataggattattaaaacaatatttttcaaaataaagagtctaaacatctatattagaaaagagaggatccataattaatagtactatcctaatcttaaatagtagcaatatataatattacaattttgaataagaaagggtgtgtctcatctctccacctttatcctttcaatctaatttgcttgtgtaagtacaatactaataatgaactttaataatcaatgttctgtggtacatattcactcctttcatgtgtatatccacagagagaggatgagaatgaagaagtcaattgagattggaaacaatcctaaaggagagcaacacaatgttgtgttttgttttcttatagcaagagagcattgcagctgtacttgtcataattgatcaatcttgatcaacatatataaatatagggatatgatt

SEQ ID NO: 43514 - DNA, 6399 bp, Cannabis sativa
gaattgttgattgagattcccttaatggcgtagaaggctgatagataataacataccactctcaactctctacttacttgtgttacatatatatatattaacaataattcttctgcatttaatttctccaatcacattctcactctcctactactcctatgctacctatattatgacttggccgaatattaataaattaatttttgagtattacaaacactagtataaatcaaatcacaaagagatcagtattcacaatttcagatcactttcttccaaaattattataccatttatttaaggattggaattaatataacgagaaaggaaaagtggtgttaattctattatacatggtttgtaattttcacttaatattttttgtaaactgcatgttgttagtgacaatatatagaatttattatgcttatgagcgcttttattgattctgaaaaaattatttgatctaaatctgccagtaaatttgaatctgttagcaagttatcgagatttgcagttatgctctcgagctgatcactcttcattaattcttaattttaaagcattatttggtggttcttgctctacgtactacgatattcttctcgtcatttataaatactcatcttgactctcttgttctactactatgatattctcgtgtacaaattttttctttttgtgtttggttctttattctcatcatttgtaaacgtcttcttttcttttgatttcattttataaatcttacataacatccaagtacattgctgcaaaaaactaaattgaaattaagtttgactttattattacatacatatgcatgcactaaatatgaaaagtgaatactaatgatcattaagggtatttcgtattacatgtgtgtcattggattcaagcaaatgatccggtcatctttcatagagttagttttttatctggctccataaaatctagagtccttcaagcaactaagtagttaattaggttaaaacttagccgacttaactgactccttacaacgagatctctaagtcagctcttggcatcgagctctctccggacatgtatcacgtttcctggacagacgtcccaaattgatgaagcgcaatttggaaggacgtcccggataggcataaagcctactggaacggactatccagaaccccttccttgaggaaaaagctagccttccagaactcttttccagacgacaaccaactttccataagatttcatctggatggacaagctagccttttggagctccttttcgaatgacgaccagttccctttcattcaattttgggcccccaaaattacggggcctggggcgtaggccccgattgccccacccttaggccagccctgagtatatagacaatcacagaactagtaaaattgaataaaattggaaaaatgtccttaaatccaacaatctcaatagttcagggaaaatttttaacggctagaaaagttcagggggcatgattttgtatatgtcaaagttcagggggtgaaaatcctaattagtgtttaaagaaatatataaacctcgatggtagagatcttagttttacttctaataatatttttctttgtcattagtatatattctagttcaatatcaatatcatctacatttgattcacagatttagaacgtcacgattcaagtgttcgtgcaagtcaggttgtctacagtttaaatttttgcatagattaggatcgcgtcgcctttcatttctcttgtcgtaattggtaaacaaccttgttgcagaataactcttagattgataactctgagaatcttatgctttcttgatcaccttgatagtgatggcatgtaccttccccatattgtgtttatctttcacgtgcatgagttttagtcgatctgctctgcctatgggtccttgatctcaacccactagcatttgtacttgagcctatttcctaaggttcttctcgcactaacctccatcttcgaagcagattttacacgcgtcccctacttaagtaggtgtatgtgctgtctctattgttgtggtttggcctttgtgagtgtcttggcggtcaacctgttccaagccaattgcctacacccctcacatcgtgctgagaatccttgattcccacgtcatgtttgtgtggcattcgcattcatgcgagatctcagttttcaggttgtacattcccactgtttgtatttttacgggaagttcctaaattgttgggtcgagtttccctatttctagtgtttcctggattttgggggttctcttcatccattgggatatcccttgtgctcctaggttgatcatcctgagtatatgtgggtcatgactacgtgcaacccttgcggtcgctgcttcgcactccaattctgtatttctttgatttgactcatctaatcacagtcgaagttgcctattttctagttccactaatgaaacatatctagtaggatcataggcatcctcacttcgtctctctgggatttcatccccagtgtgctcaaattctctaccatttcctctcccagagcggagagtctcagttgtatttgtcctatgagatttttgatattctttccctagacgttgagttgtttcccctggttgattctcttcgtctcgaggagtatcgtctgccatggatagaaagtttgagtatgtttcaaggagggtattttctaaaaaatttcttataatgctatcaatgaaagcatcaatatgttaacgcagatttttgtaaactaataaataagcctttttgtaataaatatactaaaaaattaaatgaacaatgataataataatagtaataaataaaataggatttttaacgtggctttgaagttaattatttatagttcacgagtccatcttattcagggattaataaattggatacatgatacaattgataaataaattgtatatttaatgaaagactagtataattctctctttctcaaattggtcatcctttgttccctgggtactatccctatttataggagtttagggtgaaagttattcccttgggatcttattgcttgtaaccattcgtgaaacgtgtataatccccacatttcacatttacatcacatggaataataacaaataacttcccataactactcatttaactttatctataagcagttatactgactatgcctcattcttctcgcaatgcaaccattttcctttagacgcttaatcataaaaatcagcgtctaagtatacgtcaagcagtacttttcgcattcttccattaaattaatattgagtggggcattcgggagacgcttatcacagcatgccaattgcgaggtgaaccatgctggggatgttgtctttagtctttcagcatactcacgagtatgtgggtcaatgaagtgcgagctctttaaataattcattatctatcctttctaaacagtcactgtcgtgtattctatgtatcctgagatggaccttctttactcttcgttcatctcgcttgtctcatcagtcggtagttattattcgtagcccgtcattgtctttaagagggtgagttcaaatatttctaccaactgtacttcctgaggcgagttgtctgaatgtatttattattgcataattcaggctgattcatactctagcttcattacacgtgtcaacactatattgctgctcgaaatatgtgtataacaaatactagtttcaagattaaaaaaatatgatagtttttatttttaaagtaaaataacaattataatcatcacaaagtatattttttaatacaaaataacttttccaagaagcacaatcatctctactgaacatttaggtctcaagtcgagtctttaggaaagttggtcgtcgaaaggagctctaaaaggctagcttgtccattcggaagaagtcttatggaaaattggtcatcgtccgaaaatgatttctggaaggctaactatttcctctagaaaagtgttacgaatagtctgttccaataggttttgtgcctaatttgggatgtcctttcagatggcacttcatcagtttgggacgtccttctaggaagcatgatacatgtccaaagagagttcaatgacttggagatctcactgtaaggagccagttataagtcgattaagtcttaaatgaattaactaactacttagttgtttgaagccactgcctttgggattcatatacttgatctataaatgaagccatcctcttcatttcaaaagaacacagcacaaaacaccagaagcagagtacacaagttctttgacagagagttttgattgagatgtagagagaaagaggtacagaaaaaagagaggattgggttttgggtttcttaaaggggaagcttcggtagatgaagaagcttctcaagaaagagtgttatagagaaaataccttgaaagaatccaaacagatcgagaatcgctctcaactatattgtacctatgtttttgctcaatcaataaaggaagtttcgatggtgttccaaaactagagtagagtcatatatcacatcaatctatctgacttgaaccagtataattcttggtgtcgatttttacggttttcttgcattgtttatttatggtttcattgtctctgttattctctcaattcttgaattgtgtttggttgatttttttcatttctaattgtttgtttgtggagaataattattcgccgagtcatgattccctccaatatgatcgaaatattagagtcatttgagttggcttgctatgtgtactaaggcttttaatagtttttctcattaggcatacttgtcacttttactaaattgtcctaaactctataaatagacttagtcacattcattttaatatatagtttcaaatatgatttctacacatttgatgttataataagctagtggtataacggcaaaaattacttggatcaagtccctacttcatgaactacaacttaaactactaagtcaacttgttctcatgtggtgtgataacctaagcaccatcatgcttgcaggcaatccgattctctattcgtgaacaaaccacatcgagttgaagtaaccaagatgacagggaactcaaaattcattcccgttgtataatttagtagaagaagagtgttggttgttgttaagacaaattgtactttccaacaagacagaacaagtaagaaaagattttttgaaactcatcacaatctttcagctgaggttacaaattacaatgtcgattttatgaagaaaacaaaaactaatgaaatgtaccacatggaaaacaaaatcctattataatttttgcttttttatataagaatgctcatgtgaaatgaacaatctcaatttgatataattgaagataaaatctatttcttcatcgttagggagaaatctactttcggccggtaaaaatttattaaacgtcatagttattgaaatacgtctaagtagattattcagctgagactacaaaaacatatataataggtacgtataaacccatatatatatatatatagatttataggtacgtataaacccatatatatatatttatatagatttatggtagccgccttaaagaaaaggtaataggttatttgggatatttaaatttaaatatctatctttattttatggttacagtccagatacttcctattcttgatttttgtctttgatttctaaaagcattaatcacttaattggtttggtttatttatattgaatatatatatggtttctaaagtaaattctaagccagctgatcatcacttcatatatatctagctgatgaatgtaaagattcagataattaaaattaagcttatatattcttttagaccaataccattaattaattaattaattagaatttgttgattcattaatttatttaactcatgtatatatatatataagataccaatgtatagtaacagtaccattagaatttgattgattgattacgtactgtcagattctttgaatttctgcagaaaaccaatccccacaaattaattaggatgatctgttgattttaatgcggacttgtttgatctctttatatataatattagtttcaaattaagtaaattttctggtataaattttgtggttgagtacgtaagctagctatctagagactcgatcgatcggttttaattgctcgaattctcggtccaaatgcatagacatgtatcacgtttcttggatagacgtcccaaactgatgaagcgcaatttggaaggacgtcccggataggcataaagcctactcgaacggattatccaaaaccccttccttgagagaaaagctacccttccagaactcttttccagacgacaaccagctttctataagacttcttccggatggacaa

SEQ ID NO: 43515 - DNA, 1674 bp, Cannabis sativa
taatcccgtatactacacgattgaaagttatttacatataatagtacgtatcagttgctatataaacaccccccaactccaaaaccttcctatctcatcaaacacacatacacattacacattacacattacacgcacccttggaggcttggagtgatacaacatgatggcttcttctaatatggccaaaatactacttggcctcattgtggtaggaaccatcctagcaggagccttgcccaaaaatgtgatggctcaaagtccagtagcctccattgtgacacaagagtttttcgatgggataatgaacaaggctactggggactgtcctggaaagagtttctacaccagagacgcttttctgaacgttgcgaactcgttcggccaatttggttctggttctgctgatcaatctaaacgtgagattgcagcctttttcgcccatgtctcccacgaaactggatgtaagatactatatacataatttagtgaacgtccctgtttcttaacttcaatcagtcaattaattaatttggtttgtgcagttctatgtcatatagaggagacgggaggttcaaatctggagaattcacactactgcgatctgagtatgggtccatgcaacccaagcaagagttactacgggcgtggaccactccagctgacatggaactataactatataggtttcggcaatgcctacaaaattgatgggttgaacgcacccgaaatggtggcgcaggacgtcgtcgtttcgttccgatcagcattgtggttttggatggagtacgttcattctgtgatggaccaaggatttggtgccaccactaggaaaatcaatagtggtgaatgtgatggcaaactgcctgaccttgttcgagcacgcgccaattattataatgacttctgcaaccagcttggtgttgctcctggagacaatctctatttctaattaacgaaacaaataatatatatatattatttattacatgaatgtccatcaaaaaaatatatatgttatatataaataaaaatctttatagggtgactctcatatggtctaaaagggaaagtaaattgtactgtctaattttatgattattatatatatagcataaaagtttattattataggaataacaactttcaaggtgtgtttggaaaatatttgtactttaaaatacaaattgtatttaaatttgaggacatataaattccaattgtattttttggaaaaataaatagtacttatatataaaataataatatttatttagtcaaagtaattacatttggcatttggaagttactaggtagtgtaattgctaaaaagcactagcactaacggtgtctagcaccacttaaagctagcgccttaccattggttagtaaattctataaaaattaatacattaaattatatagggcccgacacgtaattgtacttgttgacgtaatttttcgtcaacaggtctaaaaaaattgtaaacgagcaaaatgaagacaagcactagttaatcaaaataataattcgatttgtgaaagaaaacttaacaaagatgaacacaaggatttcatagtggttcaccccttttcggcgataataggctagtccacttagagtgttattgatctcaatatgcttgaggagagttctccagagttatgttctcc

SEQ ID NO: 43516 - DNA, 4078 bp, Cannabis sativa
ctctctctctctctctctatgagtttctctttcaattttgtagttcaacagttctaaaattcgtacccctcacttaaaaaaagataaaaattcaaatttttcctagaaatcacctcctccctgcggccatgactcgctgccgaaaaatttctgtcacctgattagtattttggccataactttttcaatacaacttagaattagacgattcaagatgttctggaaatctaagaacaagatataaaactttcatgctgcgatccaagtccagatttgcatttaaagttgtaaaaatttgcaatttagttctaccttataaaaccgagctcgccgacttccactattttctaccaaaatatacttacatccctccaaatgactctaaatgcatgattagtctttaaaatatcataaaaaaattataatcacactaatcaataatttaaagaatcaatttaggaatattaatacataaattagtcatatttattagataaatacggactcatcaggcagttaatacaacatgttatatttgtaactgagttcatttgggtacaggcactactcaaactgactatgagctgtggaaagataagactcctaatttgaatcatttgcacattttaatgaatgagatcatctctgaaaattcaatgttcgaagtgacgaaagaatttgctcagatattctataaatagttgtgcatatcgtgtgtataataaaagaacttccacagtgatggagtcaatgaatgtgaaatttgatgatctggaagttttagactcagtccctactgatgaaccttttagtccacatatatcaatgatgcctttagtgtctaatgttcaagacaactgaaacatcaaggcctttctcatctaaagacgtgcagtgtcatctaagaatactgctagcacttcagcagacgcactagctactaaggtctcttcagataatcaaataaccagtagggatcctaataattcttcccatactcggttatataagaaaggacatccaacctagattcaaaaagctcatccacctacaatcatgattggggatccaaatgccaaaatggtgacatgtaataaggctctaaatgtcatcgcatttgcttgttatgtctctctagtggaacctcacaatgtcactaaggctcttctagatggattctggaataatactatgcaagatgagatggggcagttcaagaggaacaaagtatggagcttagtccctaaaccagatggcgtaaatatcattggtagtaagtgcatttttaagaataaatctgatgaatttggcactattatcaggaacaaggctaggcgtgttgctcaggaatataatcaagttgagggagtggattttaaggaaacatttgcatcagtggcttgacttgaatctattcgattactacttgtcgtgacatgcttcttaaagttcaaactgccaaaaatagatgtgaaaagtgcttttcttaatgtttttcttcaagaaggggtgtatgtaaaatagccccaaggttttgaggatcccaagtatcctgatcatgtgtataaactcaagaaggccttatatggccttaagcaagctcctatagcatggtatgacaggttaacttctttccttctttctcatgagtttgtaagaggcactgctgataatactttatttatcaagcatttgcaaccaggtatttatgttgatgacattattgttgggactacttgtgataggaaggttgtcaagtttgttaatctcatgactagtgaatttaaaatgagtcttataggggatcttagtttctttcttggactacaagtcaaacaaactggccagagaattttcatttctcagtccaaatatatcaaaaagatgcttgaaaagcttggcttagaccacactaaacatgcccctacccctttaagtaccacaactaaattgagtaaagacaagtctggtgagtttgttgatccaaccttgtataggggcatgatagggagtcttctttacctaacaaccaatcatctagatatttgttttagtgttagtttttatgctcggtaccaagcaaatcctaaacagtcccatttatcttttgtaaaatgcatattcaaatacttgtctgggacttttgaatttggcttatgggactcgagagacaccaacatgtctattattggttttagtgattcagattgggctgggagtttagatgatcgtaaaagtaccattggagggtttttatctcaaaaataatcttgtctcgtagttgagtaagaaacaaaattccatatccatttccactgtcgaagatgagtctatagcagctgggagctattgtactcaacttatttggctcaacaaaatggtaactgattgtggatttccgtaagactctttggtactatttggtgatagtacaagtgctattaatatttcaaaaaatccagtacaacactctcgtacaaaacaaattgacatatggtatcattttattaggcaaacggtagaatctaagcttttaactattactcatgtgtccacaggtgcccaacatgctgatctgttcacaaaggcattagatgctcacacttttgctcatcttagacattctattggtgtgtggaccatctgaccttgtgaaagttacctctagacatcttcacaatcgtgctcaagtcagaagtttatttgtcaatgattgttggtctttttggttgataggtttaatatattctattattagattttttattttaattatgaacagtatgttgtcctagttgaaaatgctaccgtccatgaatgtattgggaagagctaaccttgtaccattgcgtgacttgaaaagtttggtcctttttcttgttactctttgagaaaaatccatagggtgacggctacatctctatggaagcgtgaaaactgcacctggttggaaaaagtcattgtgtgtagtaatcatcaaaagacatatgttcaaaataatcaaatgattttcttaagagagatgagtgagttaccttgattagttgcttggtctctcacatgaagacacatcacacacttatggtgacattactgttcacatctctatttggattctcgttgacaatatatatgtgatcttgttggtagtttagtccaacttctattgactgactttccttgctcttttgcattatgttgtgtttggtgtcaatgtgtctttctttgggttcaattgagcattaatgtctagtgtctagtgtttcctttctctatcagtaattttaggttgctcattctaggtttttttttcacataatattttaccacatttgattccaccattgctattattttttcgtggtgttttttgtgttttgatcttgagattgttgcccttttcttagtgttaatggacttcaatattttcttaaatgggccaaagggaatttttgtcattgtcttctactgttaataaatatttgaagttaccattgtggttttattttctttttcactttacatttttatttcttcctagttaagtcaaacactcaaccattctgaggtactgttcatcttctttgtgtgtcttcttaggtgtgttcttgaaacttcaattatggggaaaaaggcgtgtcacaaagtcaaaatgtcatctcttttttatgatgcttcatctcattattgaaggatgtgagtccctattcctcactatttgggtctcgttgtaacaccctactagtttaggcgtgttaacgtaattttaacttaattgtccagcttgttgctaaacaacgagtttattgaaaattatgaataatttactttatttaattacttataaatacaaaaataataacatatatataaccgagatctcatttacaaaatatttacaaatgtttcatagtgcataatacaaaagttgtcgcctaaagactatacaaaatacaaccagctgtcccaaagaccgtacgctctaggcctaaccgccccgacatatacaatcttcacccgctcactctcatggctgctcaaccttatccttgcccttacctacatatgcaaataatat

SEQ ID NO: 43517 - DNA, 2470 bp, Cannabis sativa
gggaactggatcttatggacaggtgtttgcactctctctctctctctctctctctcgttaataatgttatttggaagtgaaaaatgcaccaatcgttttcttttcaaaaatcatgataagttgaggttgggtgcaggttgtcattgcaaaatactattagtatgtttagcacttcaattgggttttaactaaatgcagatgttacatgttgaagacattcgtgctagggaagcaataagtgttgaaattccaaataatatatcacaacatatgatgaatgcacttaaacgaatgaacgtgtctaaattgtatagccaccaggtatggtcatcatgttcatgcttactttacaaaacttcagccagttgtggtcatcttgtacatgggttttggtttttatgaagttttgacttgcaggcagaatctatagaagcttccctggctgggaagagtgttgtcatatcaacaacaacatcaagtgggaaatctctttgctataatgtaccagttcttgaggcattgtcccagaatatgtcattgtgcgctctgtacttatttccaacaaaggtaggctggaattgtagcttggggtgttattaataatcatatataaatactagacgcagcacatattgtgagtgtgtgtaaaccaaaacatttcttggatgaaggctttagctcaagatcaactacgggcattattacttatgacaaaagaacttgattgtgacttgaacattggtgtatatgacggtgatacttacaaaggggacaggagatggctccgtgataattgtagactggtaaattgttactttttggtttcttaacattgttcttaggcactctgcatcactttaattattgttgacattatttttgcttgcacacagttgatcacaaatccagacatgctgcatttatcaatattgccataccacagacagttccaacggattttatcaaatcttaggtagtgcattattatggtttgttaatattgttgctgttgtcgttctcttttctggttttttcagttgtcaggcttgtaactacagtgacacattcttcttatgatatcgagatttttgtactttatttgctagatttatagttgtggatgaggctcatgcttacaagggagcatttggctgccacactgctcttgtattaagaagacttcgccggctttgtgcgcatggtatatattctctcaaatctgacaaaatagcaaacattatgtatagttttcgtgtctgtatatacttatttttctatgcatgctggtagtcacattcctattgatatttttcatctctactttgctttgataatcacctggctgtttcatttatatgcagtgtatggaagtgatccatcttttgtattttctactgcaacttctggaaatccccgtgaacattgtatggtaaagactttgagaaacagtaatgtctatttttcttctattgatttcaaatcggtgtagttattattaggttttgcgttgtttattctattcttttcttattatataaacaaaaatttaggctaatgcttacgtcactggctagaaacatgcttctgaaattgctttggtggcctgtggaacacttttcactaaatattttgaatgtataaatacgtaagcattctctaatagtaagagtgggtgttaatcagttggacttttcttcaacttattaagaaatgccaaaaaatatttatatatgatattaccttggattgattagttgatttctcattctgcttgtgttgcaatatgaaaatgacccactccattctcatcaggagcttgcaaatctacccacaattgagctaattcagaatgatggaagtccttctgctaggaagcaattcattttttggaatccttttttccatcgggataatgttcgtgctttgttataaactaatcctttacaattgtcactgaacgatttctataattgatttttagtgttgtttgtaggtgtcaaagaaaacacatgatagcatgaattctatcaaccctgatgttgaaaatactagaagttacaggtatttaatttccatgttaaccctctttcttctaagataacatgctttgttcttgaacttatctctgtttactgggagtaaaaagtattagtaaattaagacataacctctaatacttttactttgatagcaattaactcctaaatcttaaattttagcgacaaaaccttcaaaactcgtattcgcagatatttccattcaaatttttctattaaatgccatgttcgactacttgtacactctagtacacgtgtcaaatttatattggcccatctgatatacttattattattttttaaatgttatatacttatttcaaaaaacataaataaataattattaaacatgaaaacaaaataaactaataaataattattaaccctgtgatttcaaaaaaaaaaaaaaaccc

SEQ ID NO: 43518 - DNA, 4071 bp, Cannabis sativa
aaatgaagaataaaccttatcattgactacacaaattatatctaattgttaatacataagacatagaaagtcaactgaccactctgaaacacagtcctcgcagaagatgtgtttacaacgcaaaagaattggagcatgcattttctcctggcaaatagcacaaagatctccagctgcatttacctgaaacacaaaccttctgacttaggatgtaacaatatttagttgcgacagaataatccatcttaatcatacaaatgctaatacctaaacaatctcagtgcataaaagcaaagagatgacaaaaaaaaaaacactaacaaatccattaaatagcacttagctaggttcttttggttgtgattttgctgctttagaaaaccattgaatatatgatattaaatattttaccaacaccatgtaaatagacagaatcaaagagatgtagagaaaaatagggtaataaagctacaaaataacacatacctaggttcttttggttgtgaacttgacatctcaaataatactaagcatataaagcaaagcgataaaaacaaaaacatggtagcaaaaagatttaaaattgaactcaattcttttggttgtgatgtctaaaaaaatgttaaaaggagaaaaaatgagaaccccatgaaacagtcttgagaggatttatataattcttctactaagcagaagatcatgtctaatctatattaaattgaatgatatttcacaagattcctaaaaatgcaagaatccagtacagtacataaaatataagcatttcattgacaaaaaggctacttattgacctgttctggtgtggcatgagacccaaattggagttccttccgtgtcaatgcctttgcagcagcaaagaaaaattgaacctagaagcaacataaataagttatacataacagatagtttccagtatcattttgtctatagaatgcgacaaataaaaataaagctcggctggatattgtgaataactttaccttctcgactatagatgtaagcttaaacgttagatacaatcctgtggttagtgatgagaagaggcttccattttctttgtttaagaagaagcgataccagacaggtgtaggtaaaaaagcacggtacaacagcaatgcatattcaagcagggttaacagttgtcccttcaaagtgagatagcaatcattaattagctaattgtttaaaatgactaggagaaaaaagaaaagaaagctacaagaaatcaaaagctgtatttctcattaaaaaattgtatggaaaactcttattataatctacaccatattacctgccggcggaagttatagcctctcccattcttgtaatatataagcagcaaacacttgaaagccattgccacctgcctcaccagtgtatctaatgacaatgcaacagcgagtgtaggaattaaaagacaataatgaaagccaaaacatagacaagtgcacagaattacataaagatccattaagagaaaagactaaagatgaagcaaaaagacgattctcatttttcaagaaggaagcaaccaatattgaaaaatccagagcagagatactacccaaccatatatgtgacaaaaaaagtatatatatatatatacatgaatttaaatcacagtttaagtttagggaaagcattggaattcttattcaaagctccatgtgtatcttaaatgtcgaaaccctccttagaaatagaacttgctatagatccactgcatggcactggcacacatctactaacagctccatttgaaaaaaaaaaatacgtgcatacatacatacaatattattattaaaataaaacaatgatgatagacattagaaacaatttaagagtagcggtgaagaaaatttttttaaaaaaaaattcttaccattcactaaaacgatgaaaatagcatgccagaaaggtggtattgctttcggaggaagcatgaccaacggatataatagatcatcattttgaaaccaccagtaaataccaaccacatgaagcataaaagcgctaaaaatgccaagaaggacataagttttcctttctccctgtagaaaccaacaactattcagcctcaatttgctcctagtggaacttgggttgggtttataaaataaaaaactgaaagctgaatacacacctttaaagctgtttgcctccgcacaatatcattagatttaaacataacagctgatatccatattgtaacaaaaaaacctgaagctctccaagaagaattatcaaatgagaataaataaataataacatcctaataacaataggacaataataataataaaatatgcaagagaaaatctacctacaacacctatcttatacaacaattctctgtcaaactatcaattggtgcacgcattgtggagcaggactaatagtcatttatcccaaatgtcaaatgaaactactaggaatacataaaatcatttaaaaactgctgcatagaaagaaggaatcttaggacccaaatatcttccataagtttttcataatcgcctacgatcatcagtatgcaactggaaaacaaaagtttccatcttctgccctagttttactttctacaccatctttctaaactctagcagattgcaaagtatgtcccgtgagtaatcaaatagatacctcattacgcaaacgcacgagcacttaactctcgagactagtttctatattaactcaatgaaacttaaatgccctcgagcacagaaatgtctttttaatgaaccaagttacgtgcatacatgccataactatggggacttcaattttcctgaaccagacctattatggtatcaagcgcatcaatcagctgagtagtgagacatatcgaaagactacatctcaagttagaatttccacaaatgattcgtttttcttgctgaattcgccccaattgtcattagcaaataatgaaattctaaaacttcccaatttgcagaaaagaaacttaatttgaaaattatattataatgaagatggaagagcagaaaagtacctagcaaatgctgacgaatgaagaccaccaacaagagaattgaaaacggaagaatttgctcaatccatttggcaatttgttgaatgtcgtaactctgggaagaagactcatcctgaagagacgaaactccggaacgagatacgggtaccgacgacgaaggagaaaccaggggcgctctcccgctggcctccgcaactcctgcgccgctgccaactcgtgcagaaccaggctgatcatccaattcatgcattctcaacgaaccatccccatccacacctccttctccgctacgccgcggagaagaaacagacctatcctcctgctctccaccgccgataatcctaatcgaaacctcagccgagtcaccgccgctggttccgccagctgcacacggagcaggtgaggtaggcggcgaatcaggagtaacagcgccaacgctattgaccgcttcctcctcgctatcccggtgagttgacctcaccggaagtataccggaatactccaacaaaaacgataacggcgaatgaaacaaactgaggggaggcagatggttcaacatgccaccaccaacaccacctcttctcggactaccactgttttcgtagggttcagaagcgttaccagacacctccattttttaagctttaacctttctctctcctctctctctctctctctctctcttcttttcaatgcttcgttgtgtttgtgatcggttagggagatgagaacggagagaagaaaggagagaaacgaaacggactacagaggttcacaaaacgacaatcaaattaagcggaaacgtataaaacgacgagtgttcatctcagagtggcgcaaaacgaggtctttaggggattttgatttgtgaaacaactttttcacagatcacactttgaggaattcccggaaataaacaaatagcgtattaaaatttacaaaagaaaaaaaaataaatggtctttcttttttgttttgtttaattgtactagtgggttaataagtaatagaagataattaaaaataaataaaaa

SEQ ID NO: 43519 - DNA, 6245 bp, Cannabis sativa
gatttcaaataatgttggacaggttatcaactgctcaagtttattttttgtttatactatagagcttgtctaggggggtaatatagcctaatatgtattccattttttaaacttcattcagatctcttacttaaatgcactccgttttggactgaagaggatattttttggagggtttttcattcgcggacatgcttacaccatggacactatttcggttggagttgatttctggtaaaatatacaacttagatttccagctccattttgatggctctcctttctttttctcctttgcatttattcctatcctaagatgtactgtttttgttttaaaatgatcctttcaggtctaaaggcgaggccaaagctttgttcttaagacatgaaggatttcttggagcgttgggtgcatttgcgagctacgaaaaccaacctggctcagatgacccgatagttcgccagttggtgcaacaatcccccattagtgcatctcataccggctacaagatccatggttctcgaaatggagaatgtaatgataacgaaagtatagaatgtagtgtttacgtctcttagaatatataggcatatcttcttttaggtgtggttactaggcgataagaggcggcaatacatggttgctgcctattttgcaccctgtactagtttaatggttgaaaaggggttaacatatcaaaagtgtaacatagctgaaagttactataggcatataaattcctcaaaaaaatcaagtgatgaaactgagatataactcagtcatagttgcaataaacattttctatcattgtttgtaacatctctatgtttgtaatcctattgggtttgaagcatcgccttgtttttcaataataaactcaacttgtttcgttgtggcaattactatgcacatctagtctcaactccaataattttaagaagcaatttcataatttaacatgatttttttggcagatcaaaaccaattatctaataataattattgtagggccttgtaaatgaataaaaaaaatcatttccataacatagtatctgaaaatataaaactgcttaataaatataaactaaatacaaatcaattagccgtcagttgtttccgatgatatagttttgcatttctcctacgcatggcccatcttgtttttatatcatgtacattatcaacttcagaaagtatatcttgagatgatgattcagattctttgttagatttttgaggacccaaatcacctctgattcttgcagcttcagcaagcagatcatttatcaacatctcagtggttttagcagtaatacctcttaaataccaggatatcggtggaggtggaacgatggctggctgaataagctgctccaagctcacctttgaaccaagccttcctttgcctccagtacataagtaatagtcttcccatgtcttcggtttgaacggaaagcatgtcttttcatcaacaaataaaggttctactttccagcagccttcaaattttttcataaaccctgtttttacttgcttgaatttcatctgataaaacagcaattattacaacagacatgataagaatgctttcctaccaaagaatcttgtcaacaatagcttcattaaccaatgtccatttttcaataatgttgtcaaaatcatatgattcaacacattcacaagaataatcatagttcaaaaagttaaagttgcagaccaacaagaaaagaaatattggaagaagtccttaccgagcgatcttttctgttttgatcaactaaaacatgaacagagatggttcctgaccaccaaagaaatttccataaggctgcttgctccacctcaaccacctgtctgtgaccttcatcaactataacttttcttgatatcacttcctgagcagtaaatcatttctcagtaaatcataaaacataggaaatctattacgaaaaaagactaagaaaaaggggcaattttcgtcaaaatgtatacagttctaaaaaagtcaacgttgctaccaaaatgtgatagtggagagaattacatatcttaccttaatgtttttgaaaaccctcttattatcaggatcagttactatgttgtagattgcatcaggaggaagcccaacattgacatttactttaagattgcaaagagagccttctggtacactaacctacaaagagtaactacattttgttaatatcctgattagcatctttccataagacatgcttagctttatgttaacaaaaacaaagctagattacatatgagccataactaagattaaacatgcctgaacctaccatttttattaacaaaactaaacacatttgcaaaccttaatttctgaatgtgggtcagcccatgatggattttctctccatgcttgcatttgtttctccaaatcagcatcagaagaagaaaatgattcctttcccaatttagattcagagctaatcaatgaatgttgttcatcatgtttagcaaatctcttgagctgagactgagaatataaaaaagaaaaaacttctcacagtcactacaatccataattaacagccattgatattgtctaaactgcataacatatcaggaaattacttaccttcaaacaattttgaagcttgttaggtagctgcaccaaaaacttaggaacagctttattgaaatcaatggagtctcgatttctttccctctcctgaatttcaacacttgcttttgccatctctgtcttagccatttaaactggcattgtttgcaaatcttagttcggagaaaacattgacatttatatatgtatatctgcaaatacttaaactgtacttctatattaagttccatcaaagttaaaaatttgccaaaccaacaatctaaaatactaaaatttgcaaaataacctcaaataatttactctatgcaactatgatggtcgccgcagagtgtaaatctacggtctaattcatggtatataagattattttgctaataaaaaatttcatggctattttttcaaaaccctcattatctattcatccctaacccttttattccatgattataaccaagccaatgaaaacataataaacccagaaaaattgttaaatttttatcaaagaaatcccaacaaacacacattaaagtcccagaatttgcagcaaatttatgactaagcttttaactgaaatcatataaaagagaataatcccatcagagaacaagatggaaaaactaaaactccagacaagggaaagcccaaaagcgaatgcaccataaattcacagaattgaaaagtaatattctaaaaaagatgacttacaaagccggtatgagtatgacagaggaggaatattcatttcattccttttttttttcttgaaagaagaagctgatcccagattcagtgggttcaattattgaggtacccaaatcagaagagtagcactgggcacgtgaggaggaaatatgtataccattcgcacgtgctagaaaagttcctatatctactcatcttgccttgtaaatagtcaatagcaactgaatttgtcaaacgacaacataaaaataaaaaggaaagaaagtaagtaaaacgacaatcgaattgaacttttcatctgaagaataaaatcactgcaaatgagatgggggaagggaggaggttgtgtcataacactcctgaaattaagtaacgaaccttatataattaatttttaagaaataccactaatcaaatcttaaagtaacacctataaaatgtgatagacacttcatttaatgttgtgggaaaaataaagtcaaaaaaggtgtgcttcaaccccactcgttcactccttttggtcccagtgtcacgtcttattaatgttgttttgtttctactaacagtataacttagtattatcactacatcaaatcttctaaatatttcactgtggaattcttttacaaagttcttatggacacaaaggacacattgctcatcttctagttgaagtgttcaaagtgtcactttcacataatcaattctaaatttattacccttttttggatggggtatgaattgtgaactgttattaatgttagctcagttgctcaaagaactccatggaaaattggtgggttgcagggtatccccaacctcttttgggttttgtttaattctatcaaaagtagaggtctttgtcttcaaattcatatctttacttagacttgattctattatttatctaaaattatagcattttagtttaaaagtgacctcatcataacaaaacatattcatcttacaacctcagctcaacataattatttgcttacatagtagaattacaaagcaacgtttgtaatgtataacaattagatgacaacacaccatgggagctgagctgaaaaccatagaaatacacacatacggagcttaattttcattttaactgtttctcaaacccggcggcacacatcaccttcacaaacaaacccctcctttccattctgagcagcatcattaccatttttaccctcttcttcaaccttctccaaagcacattttgggtgaagatcaaagtcacattcctcacagtagaaagaccatccctttcccatttcctcacatgcatcgcagcagtatcctgggcgatgagcacgcttaagctcatgttcaggatgaagatgatgtttcaatttctcaggccacccctttgcaatttcttcttcttgttcctccaaatgtttcagctgctcttctgtaaatggataagcctttgccccatgatccattacgagttccacaacatcctttgtcactgttcgaccagatggaccaatggctaccgctgttggaatgccctcgactttgaatgttcggttcaggagtttcttccttgaatctccaaatggaagggctaaccaaggcatgatggagaagtattcctcgaaggaggactggtctgagtcgctagagatgaagattacttcaaatgcatcgtctttctctttgatttcgttgtatgtcttgataagcttaggtgtgaatcgacggcatggtggacaccagtgagctgagaaatagagaacaacattctttccaactagttcagaaataggtacctaaaaaacaaaatgagagatataataataagtacaagcgattcatatagactactaagaaaagctagaaaacttcatagatctaactatttataactagaaaacaaaaaaattgatcgaaccttggaaccattcttgccaattacaaaattatcatctccagaaaccaataatgactccagcgtttgtgattccagtttcgctttctcaatttcagcaagagcagcaatcctctcttgggtaaaggggtaggcatcaatgccatgttcttcaaccagttcagctacattggagttcacagtcttcccatccggacctagtatgactagtgtaggaatggttgaaatatcaaagtaacgcacaagcttctcagtgatcttatccttgtatggcaaagccaaccatggaattgtttccaatcctttcttgaactcatcctcttcataattcagagatattaagacaacttcaaacttctcacctttatccttgagcttattgtaaacctcaacaagtgtattagtaaattcaatacaaggttcatgagaactcactgagaataagagtccaacagttttaccttcaagctcagagacaggaacctgtcaatacataaatttgaatcattattaacaatctgtcatgtatacatgaaaatgaaacaccaaagtaaagctagcacaagaatttagccatgaaaatttacctgattcccatctttcgaaagcaggtagttccgggagctagataccagaattgaactcaaattttggttcctcttagcttcttcttcttgctctttcaaaaagtcaattctttcgcgagagaaagggtatgcatcaacaccatattccaacacaaccgcggtcccattctcggtcgaaaccttcccatttgaatcaataatgacaagcttcggaatccccctgacactaaaagactccttcaatcgttttatggtgtcaggatcagaaaaggggatagccagccatggcatttcagagaagtaggcattaaatgactcatcatctcgatcagaagacacaaacacaacttcaagctctcccttcgaagcaacctcgttgtagagttccaccaatttgggggtaaaacggcggcacggaccacaccatgatcc

SEQ ID NO: 43520 - DNA, 4517 bp, Cannabis sativa
ctcgtgggatcgatctcactcttttgagtaatacttgttaaaacgatacgtaacttgcgtgttgaaaataccacaaaaatatcagacaaggagaagtgctataataattactaaaatccctagaaccagtgatcacataaaggtggaaagggttaagtggagacagatcccaatctgaactagcagccctatgaaagttagttccatactgtacaatgttcccatagtaggagctattacaacttaattggacatggtgtttatgataccaactattgaacctatgtgcaattaagtcgacgtagttcctgataaagaaattatattggctatccttaaaaatgaactaaagcttttcaattagccctaaagacggtaggagaccatatataaatataagaattattacctcagagagccccatcttcagcttctagagtggttatgtttttagaataatggatgcgagcgacgtagtcacgatcctcttcattctcaagcacaaacacttgttgctaatttgaaaccttggggtatttaaaatcattggtacattggtcctttcaaagaagagcgcatgccttttaaattattattgtgcaataaaaagttaccaactcacaaaccataaggaaggttaagcaaaacctcatgcctctctttgatttctacagttgggatgggtctcctaatgattgttgaaagtataatagaagaccaaaataagttgagtataaaaggaagataataactcaaaactaagaatttgagagaaatttgtacttacgtatgattttgaatctggtaatattgattgggcataagctagtggttcaaaagaagttatctttgaatttattcttgttgggcagcctcacaatgaccctgcaatcatttgtatgggtccctagatagtaaaaatctcttactccatgcttcctcgcatgaaaggcattgaaaaaatagaaatataaaatttttaggggtgtaggagactcccattttaaaatgtggtaaagggattttaaactggtgagaatcctgtaagagtttggggcaagttgaagggagcgatcccagggtaattgtagaactctttgacataatccttgatagggaaatctgctccagcccttatgtgctcaacgctgaaagccctaatcttggaaggatcgctagtgttgttgccttcgtctttaaatacgcattcaggtgagaaatcgctaaattccctctgggcaactaagaggatgaacaatcccttctccttcattataccaaacgaccttaagacatccttgacgtaagggccaatggatctcaccttagattcaatcaattcggccttgaaagtggccaaaggattctatggagtcttagatttgtaagctttatgagccaaaagatcaaattctaagtcacttggtgaaaaagcaataatgactggtggtaaaaatattagctttgctaagggaatattaactaagcaagacgattcaagccaagttgctcttcacaagtaacgacgtttaccctcaatgacttctcatagaaattgcctatagtggttagaagtttcttcttggttagacctaatgaggtggttcctaattttgcatcattaagttgaagtaaagtttgaggcttttaggtttgaagtttatatattaaggcttgaaattgaggacattctgattccgacgattctgggagcatgaattttgggttaaattgggacatgatcatagagaataatgccccaattcctggaaacatagagcacaaataaaacccagaacctgcgaatcacgtaactttaagttttctaagccttagattacccaaaaattcatgtaaagcttactcaaataaattacaaatgcaaaacaatgcacaaaatcaagattgaaaagttaaaaaattcagaaaaagagaaggtcacttacttgttttatgaaaaattcttgtttttgaagaaatttgcgatggaaactcaaagttcaaagagactaggtcttgatgattttgaagtcaaggggtgcaatcgaatgaaattctagaaagaaggtgagagacaatgagggtatctaagttcagagaagaaggtggtcaagaatttttcgagttttaaggatttgtgggaagtaatggaaaaagagaaggaatacttgaaattaatacccaaaagacgataaccgttcgatcacgaaaagagtagatcaaacatatgagaactaatgggaaaggaatggtcatagcattaaatggtgaaatgatttgcttcgaagttttgaactgccaaaataaaagcatgcacattataaattgagaaaatacgatggtacccttgaggcattttaaaagtattttttactttaaaaagtactttttaggggcaatcgttatacctatatttcgagcaataataaaaagttgacacgtgcatcaaagttacgatacgaaccagctcaaattacacattattaaatgtacttaaatgacttgccttaggaaatacagttaatagaaatactaaaacatactaccatatagaacatagtgagacgtgagaaataactattgactgatgagaccagtgaggtaaacaggtccatctcaggataaatagaatacataatgaaactatttggaataggtagataatgagtttgcagcttattgaccttcatactcttgagtatcctcagagattaaagacaacaacttcaacattcactcacctcactcttaacgcgttgaagtaaccttctcgcttataccttactcaacagttaaggaaggctgtgagatgcaccataactcaacacttaaacattttcccacaaagatgttcaagaaagattttatttgaatgacaagaacaactaagcacagtcagcatatagataaagacaaagatcggttaggctattatttataattatctcatgtgtacaaaattgaaacgtaggaaatgtccacgtttcatgaacagttacgaacgatcatatcccaagaaaataactatcaccctagactcctacaaataggaacacaatccaaggaataaaggacaacccaacctttagaaaaatagataatattgtgattatgttatttattcattcctcaaaaatagtattattgaatcctgtatacaaactctcaaatttaaataagatggacttgtggactatgaagatttaacttcaaaaccacataaaaatattgtcatttattgtcgttcttattattaattattatataattaagtctgaagtttatagtaaaggctaattatttagttaacaaaaatctacgttaacaatttgatatatttgaatcaaaaatagattttttttaattatatagtataattaaatttagcatataaattctatttttttattattatttgttgaattaaaatcaaatttttaatatcatggtgccataggtaatttctgacacacaaagtacttttatatcgggtcgattgattttagataataccatggtgtcatttgacattatgcactatttgaagcataaggtttctgggaaagaggggtaatggcattaaaactttatatgagtaaagcatatgatagagtggagtagaattatcttaggtttatgctttaaaaacttgattttttacaacattgggtgcaactagtttcaagttatttttccacagtgaggtatgaggttgttcatggtggttagaggatggagttcattattccttcttgagggattaggcaaggagaccctttgtctccttatttgtttttgatttgtgttgaaggcttttcggcattacttcgtcagtatgagcggaatcaattaataaaggggtgtcgtgtggctaggggtgcttcgccattttttatatgttgtttaccaatgatagctatctttttatctaagctaacacaggaggggcttaaagagtgatagatattctacattgttttgagagaatgttaggacaaaagattaatttggcaaaatctactactttttttagtaggaatgtgagtggagctattcgagaggctatttgaactattttgaatataaacgacgctgatgagaatagtatgtacacgggtctcccaagtacaatcggtcgaaacaagtctattgtattaagctttttaaaagagaagatgaggaagcatatacaaagttggagtggtatactcttgtcacttgctggtaagaaggtcctggatcgtaatgtggctaaaagtcttgcaactttttctatgagcattttccttttgcctgctggaacgtgtcatgatttggaacaactaatggctaaattttggtggaattcatctacgaattctcgtcaaggaattttgtggatgagttgggagaggatggcacgtaggcagaacttggtaatagtccaatttatatttgaagaagtcttattgcggtaaaggatttgattcataagggggcgtggaagggaatgagtaatggagaggagactcttttat

SEQ ID NO: 43521 - DNA, 2614 bp, Cannabis sativa
tttaaaaataaaaaaaaaaaaactccattattttaaacataatcattatataaatatatgaaaattattacatggattatcaatatattttcagtcttgattttgtatagctttttgtatattagaaagtgagcttgaaagtttaatcttaaaataccctagttttcaaatataatttacttaatattctttaattattaataataatatagtaaatttttgtattacatttctttaaacgggtgtacttgtaaattcactatctatttcggtattaaaaagaaatagtttgattttttttatataataatcgcgtacattgtacttatttattaggaccacttgtaaatttttaaaaaatttcgaataatttactgtgcgaaaaataaattcatacatttacttaccatgtgtacatatatatatatatataaaaaaaaaaatcgcatatgtagcaaaatatttttaaactttatttttagtattataaattattcaaatttttttaaaaatttacaaatagccgtaaataattataacatactcgattataaaaaaaagtagactaaaaattatcttaaataccaaaacagataaaaattctatctaaaaaccctttatgaggtgtgtagaaataccaatatatttaatttatacatataatttgtaaatattattttcatttgcacaaacacatagcagttgggtttatgcaaaaaattacatatatgtcagatttttgtacttggtgaaaaaattattaatttaattcaactgtatgtattataatcatttaataagaaaataatttacaactatcaaattttaatacaaatttattatgaaacaaactatgagtacttttatattgatcagttattattactctaccatccaattaattgatcatgatgagctaaaaagtacttgagattatcaattatacttaattattagttggacctatatataatattgttgagtatatatatatatatatatgttcaattattttttaaccttaaaacttgcaaaaaaaattaactttaaatattatttataaattgtcatatatatttatatagattgcagccatataatattaatttcacaaacaatttatggttacaatagtgtatacttgatgacttttaaatattttttatatatttaaaaattgttattatgtgtgtgtatatatatatagataatagattaaatattgtatgtcatatacaattataacactaatattatatatatatatatataaattgcagggggatgcttgtaataatcatgatctcatggggcataaatcgactgtgaaaatcgtttatataattttgcagttcaaaataatcactcataggaatatataggctatttagaattttttcctttaattatgatatatgtattttgtcatataaccacttataattttatattaaaatatataaaaattagatatttttaaaaaattattaaattaaaaattaattaataattaagaaaattatgtaaaactttaaaataaaaaacaaattaaattattttttcaaaataattacacattgacatggtattagtgtggcaactgatgactaagtagtcatgttattattttattagtcacgtgtgataaaacttcacagaaagactaatttacaacactgaaactatttataatagattaaaaaatttaaagccacaatatataatattatataatatatagatcataggtttctatgaagacattaccatctcattaattaaggtatatatatatatatgtgtgtgtgtgagattagggattatttatgtaaagtttaattttatttaattatattaacatatataatacatatatacatgacatgtatagatatatagtctatacatataatgcaacaacatacatatgatcatcacatttttcacttcaatttttaaacttgttttaattcgattttcacatttccaaaatcatcaagtatcttctttgtattcagccctaattgttttattaataatattaaataatcatgatattaactcaaattagtgtcaaaaagttcgaaaaatactaagaagtacctataacgtataatacttttatgagatattatattattattagtataatttaatattaagtttcacttattatattttaatattaattttaaaaaattattagtcattttataggatactattttataatagtgtgaaatattataatgcctaataataatactaatcttatattttttatataattagtcgacaacctacaaaaattatcgaactatattgatcataaagtaatagtcttttttgagacatgaaaaatatttaaaatttactttttgagacagtattaatctcataattaaactgaaatttaaatttttcatttcatatttaataatatctgcacaattatatatttataagcttttatattatttgcaaattactaataagttattatagtattttcatagtttaacatatataccttataaatagaaaaatactaaagaacactaatgatgcctaacactcagatctcacatattttacgttaataaaaattataaag

SEQ ID NO: 43522 - DNA, 3511 bp, Cannabis sativa
caacaactaagaatcaaacaaatacttctcaaagctagctcaattacaaggttaacacgacaatactgaatttttagctcatgccagtgcatcatactcaaagggtccatacaagctcaaacatcaatgactttccaacaaactttgatcatgtattctttgattaatagtgctgtaacccccctatatcatgttggctcattactaaggatgccattttttgtttttaattttttttcgtagaagttcaaacaagagacctccaagtggccccaagttttttgagtctaggggaattcaaacctaggaacaatgcctgtcagcactttcaaacattctcttaaacactagaacaacccttggggttattattaaggatgtcattagttttcaattatgataaaacatagaagatagagatacaaatgccataattttacaagtcccaattaaaaccacacacataatccaaatcatccagaaatttttataataataataataaataactaaaaatcaaaagtgagaaccactgcactgtcaacaataaagaagaatgggtaaaacaaaagacgcagcagtttagatgtaataagcattattcacaataataaatgacaatggaatcaaacaaatctaaaatcacacaaccaaagaaaatccaaagtacaaacaaaatctgacaaaccagatttctattttagtttaacttcaatcctacatatccaaaagcagcagcaatccatataatataggatcgtgaaactacctttacttcctcttaattcagagatcataatagaatacgcccactttacctacaagtcaaaagatacatttatttggaaggatgaacattgttaccattaataatcttaaacatagactcctttaaactagtcaacatctacaactaatgaaacacttctagcagcactacatttgtaaacaaagttgacgctagatctaaagtcatgttttagagctaattagtcatgttccaacttgaaattacaaatggaaaacacaaacaataacaaatgaaattaaaagaatgcatctataacataagataatgtacacagtattaaatcaggaaaccattatgacattaagctaaaataatgtttatagctgattagtgttacaactcaaaacaacaaatgaaaaacacatactagtgacaaaaaaatacaaaagcaataaattatccaggcccaagcgtaatagatcatagacaggtcagcagtatagcagtacactaaatacatcaacaagaacccaatgacatagggaaaacaataacaataagcatatcacaacttctttaaactgcctaatcaatattttagaatttagagataacaaaccccattgctcaaacttcacataccataggctaaatagcaaaaacacatcaccatactaaccaccatggtgctgccacatgccaaccacgaccaagcagtgtgacgttaagatcacaagaaaatagaactattgagcaaaagtaaaaaaatctgggacgttttcaagatgaacgaataataaaaaaaaaccaaagactaatactataagaacttgaaaatgctggttgttgaccatttattagaaaataactgggcaacaaattagtagaagaatgagtgaataatttaaattttccattacttttagggaaaaaagacttagtacaaaagtaaataaacagattattatttaagtaggacgggcaaagatatgatcagatattgtcatctaaactaaaatttaacaagcctaaaacataagaaacattttcaaacaccagcaacaatgtaccaactaccaagttacgtgtatagaaggaggaaaaagtacaacgactacgtaattaactattctgaacgtaatatattagacataaaattagaagctaaaaataaaattgaatcactccattatttatgtaaaaatatagcaaggataattcatagacacaacaagttctatcagaaggggcataaaggcactccaatatctatatatataattgacgttaccttacagcagtagggcacaacagagtcccttgcttgttgatcttcccaactcggatggatacaagcggtatgcagaagcacctcgccagcataccaacttcagccggctcaaaatgctgttaaccaagcaaaacatgtctcagccgtatgtaaatacaccaaaaataaaaagcataaaaaatattacaactgacattctagaaatgttgtaattgattaactaactaaccctcctcaccaatcaccatgccgtagaatagtaaacacaggttttccaacaatcgccttaccataccataccatcgaatcgtaaaacaagttttccaataactgaaacactgatatttctgtaattataatggtagtcgagctctcttttaaatttcatatacatgaatatatatacatgtagatgaaagcatatacctggcttaagtgagcaagcaagcgatcttcagcagcgccgttggaggcattcattttcaacaatggttttaacctctcatcggttcgacaagcaccgataacttgcatatcaagcgccatcagccactgtaacaccctctcttctctattgttttgttgaagcaacagatcgccatctcgttcctcgacgagaatctccgtcaaacgctcctcgagcccaacctcgctcctcgacgcagatccagcaccaaaggatgccgaagaggaatcttcgtattcaacgccgtcgtattgatcatcaacaccatttctatcaccgttgttcctgtcgttttcacaaaaatctcggtttctagagtcagccatgtaattttttttttctcagaaaatgaatttaaatcaattttatatccaaaatcactataattattcaatcttttcttcctttgtctctttaattacagaaagaagtaaaatatttcttagtcttctgggaaaccctaaaatcgatcagtgttttgggaagaaagtctagtcgagtcgaatccgtggttgatgtgagaaaaagataaagagagaggccctctcgtttgtttcttgggagagagaaaaaaatatctaccacgcaaaactggtaagaagaatactagtgcgaggaaggtttttcttataaaacagctggaggaggggtggggccagaggggcacacgtcggactccacgggcgtttatcaagtctgattttgagtccgttttcagatccgggacacttgtgattgtgattgggatggcgtgacgtcagccttcttctacttcattagtgtgggacccactgccttcgaaccatgacaatgtgccacgtcagacgatttgccgacttttaccattttatatgagctataacctataagttgagttttaatcccaaagaataaattgatatctgcctctctagtctcggctatgaatatattcttttttttttttttgaataaaacttgtgctacaaagggaagaagaaacaatacagaataaaagcacaag

SEQ ID NO: 43523 - DNA, 1501 bp, Cannabis sativa
  modified_base (28)..(50): a, c, t, g, unknown or other
  modified_base (1318)..(1323): a, c, t, g, unknown or other
attgcataaaatacaattcaatataatnnnnnnnnnnnnnnnnnnnnnnnatacggcgttccaaacgagctcttggatagtaaaactatgcatattatagtaatatgatgatgaagaatgtatatataagaataactttattttgtttttagtttaattagaatgtataaaacgatcttgaaatgtccaaattaagggattcttgtatcaaaaattagcaccattcaaggttttgggttcatcacctcttggaatgaataaatgcccaaatatatgggttttagtttcctatacacttctccttttgcttctttttttttattttttttttcttgtcacaaacatataattccttataaaaagatttatcattgcaacaaaaataattatttataattaaaataaatatttgattacaaattgttattaatataattttttttaacaagaatgttactaatattgttacaatttattgtatatagtcatttaaaatttgttgtgactaaaaacactagtggcaacaaatttatttttgtaacaagttttgttgtaactgaatttaaaatttttgataatgataaatacctatacttatattaacattacggttatttattgtcaacttttgtaatttttattgttgcagttaataaaaaataatttaattataaattatgttacttacatttattaatccaaatatagaaatgatagttttttttttaaaaaaaaaaaaaaaaaaaaaaccaacaatattgaaaggattttaaagtttttttttttttttgtgaaaaattggaggaaaattcaaaacttgggaggagaggtgtgaaaccgactatgcccacttttttttttttttgatgtgctatgcccgcttatttataaactattgacataacctaacggtaaaataaagtataactacccgagttgtcatgagttcctaaaatttatgaaaaaaattgcctaaactcaaaaccccgggtgggggctgaggcaagtaaaaaatgtatgaaagccaaactactttcaattaagggcaagcgggactcaaacccagcaaacaaccaacctgtcaagaaataagacagtgcccttgtgcgagccagcaccccttttgactagaatacaagtaattatataaatacaatttctaaggtgtcgtttggtaatacttttttaatcagttttctgtttttaaaattgaaaaagtgaaaatatttttcaaaaaacatgttctataaaattgtttttacttttttattttttaattgagaatcaaaattttaaaaacaaaaaaaaaaatcacttnnnnnntttttttaaacagttttttttttcttaatcaatatcttagactttgatcaagacccggacccaaatccctccacggccgcgctgaacccagcctctaacttgaacccaaatccgaccccggacctagacccgatgtaaataaaatcaaaaaataaaaatgaaaaatgaactttacaga

SEQ ID NO: 43524 - DNA, 3431 bp, Cannabis sativa
cattaattttataatcttcccttgaactatggtcaatgtgtcaacattgcccccaattcccaaattaatttcccattttgaaattcagggggcacatttgatattgcaatccctggggatttataaaatgtatccttatttttaattgtgattaattctattttgcagacaacaagtgtatggggcaatcgctggccttcagttgggagaagcagcacaccgtcttgttaagaactccctcaatctaaaatctaatgattcatcctctgggtcttgggatcaatcaccatctagaaacttccctggccactaccaaggaacagccagatcaagaccagctggaccttctgggtatgaaaggggcttccggcaagacccaaattcttactatgataattcttataatcctcagggaataatgagtaggcctagatatccagtctcaaatggtagaatgcatagtcaagaacaacaccgcaacttgaggaatggaatggctactttgacagtggaagataacgcgagaaacagatcgcctgttgtaatgacaccgagaatgccaaattcagcaaatttagcaaatatgtctcaccaattcatgccgaacatgggtgtactcccagcaccacccccgaactggattgacaaaaccacaaatggtggaatgtataattataggcaacaggaatacatcccaggcagtacacatgagaagcaggggaagatgacttatcaggttaaaacacaaggtggtcaaggtttttctaattctggggaccaagagcgcttgtaggggattttgttcagttatctttcttccgttgtccctatcctgtcaaatacatttcaccgaacaaaccgttccaatgacagggacctgtgtaacaagaagcttcagccagtttgatgaaacagaaacagatttatttgttgggagtttgcatggtaaataggcaatgcttttccaaattatgtatgtggtttactgatcgatgctgctattgtccgaagcattgttgagaattgcaaccttttgtccctggatgatttatacttctttcccagttggacaagggtcaatttgagaggtgtattgtgtagtcagtcattttatacaaataagtatttcatagggaaaatgtagtaaaaatacttagatcttgccttcgaaagggaaaaaaaaaaagaaataaaaatgctcatcttgcttaacgaatatggaatcccacttgtaatcaaagattgttatttattgttttactgtttactccttgatttacaattattgcctttgcaaattacttcgactggaattcttaggcgttgcttttgttgctgctgttttattctgaataagtagtgacaataagccgtggaaatctagccaaaccctctttgttttgaattggtaatcttttaactttagagcatgtcattaccctctttattgatatcagctctcagtagagtgaacatggttcatatttacagtgaacaatattctgaagctgctgatcgactattaatttacaacttagtattattagcaggcagtcttcctctaccagatcaatctgatactaaaatttggcaactgcttacaaaatgtcaaagtccagtacatgcaatgcaatagattatagaataagtattatgtattggggtacctcatatactataatttctggagtagtaccttgagcaatataaacacttctagattaatcacgttgctcaccataaaaggcatgaaccaaatttacaaaacaaataaaatgatgatagatatggctggctttgcacagataaatggttatgatactgtttctgttttattggacagagtggaagacgatacaatgttgagaacttatacaagtttgtatacttccttagagaatcatacaagtatgcacattctatttgaatatatagtaaaaactaaaagatacctaatctaagtagctcaaacggtcagctcccacagagtctgaggtttcatttcagtctctcctttgtccttagtacctatataacaacaattgttatagtttcctcctgaccccaattattgcaaggccttaattccaaaaagggaaaagataatttagtaaatgggaaaattggggaggtagactccaaggctaaggaggatcaatattgtcatcattttactttgtaatgtaattatgcaatttaaatacttattcttaaatcgttcaccatacttgcctataaaacaaataataatccaaactcaatcacagatctccaatcaaatgttcgtttttatattcatggaaccaaccttattgcttacatggtatcgagagcatgccataaattaatgaacaaaatcttaaaaagcataaaatttgtactatataatcttcctattactcagatgatcaacccgaattctttatacttcacatgtagaagaagaagaagaagaaaacaagaaccgtacctcatcatccactattgaaggaagtaaccagacaagaaaagtacaaagaagaacaacaaagttccatatataagaatagctttctgcccagaagtgagtgtattcccaccaaggccaaactgctggttctgagcaaaaccagctatttccacactcttactcacaaaaaagctcttagaagctccacaagttgagcacctccaatcatcaggcaacttgtcaaatggcagtcctggcggtataggataagatggatcccctactgattcatcatatgtgtaaccacaagacctgcattcgaagattccagtattcaacactgcgaacttctcttcaagccggcgtttgtcgaagctctcttgctcttccggtgacagttctggttctgtttcaggttcaggttcaagcgccggagtcggtgggggtagaggagctgaagtgggttggtctgaagtgggtttgtcttcttttgagacatcaatggagtttggaatgaatttgaagggtttaaggggcttgtggggaagtgaaagcgagaaaggtgggattttggggagaagagtgagatgggttttgaattttggaggtgaaggttgagagaatgaggttgagatgtggaaagaaaaggtggctcttgttgttgcagaagccatgaatggtctttcttcttcttcttcttcacatataaagatcgtagtttgtttttcaaagtattcagctgtgtagaaaagtgttgtttttatgttttatgttttttggggtgaaattagttgattcttttgattatgtttaggtggttgtttgcatctgggtggaggagaaagaaatgggatccatggaagagcatatgctgcgtgtcctgtcgtggaagattgttggataaggtggtggtggggaaagttttgtaagattgctttgtggattatgttgattgggctttgcttcctttgttgggttacat

SEQ ID NO: 43525 - DNA, 2094 bp, Cannabis sativa
taaaaagtactcatatcgatgcatgatcagagataagaataagatgctcgggcccatgggctggtgctgtaaaccgattcttctcgataatgatgtcgtaagcccaggcccaaatcaaggcccaacaaacaaaccaaataaaaaataaataaataaaaaagaatgagagaaggaaggctttatcttttgacaggtgaaggccaataggccattgaggttcattataaataggatagagactcccacactcaaacgatggtagccattgttgtgtccttggcttctacgttattcacagtagctgctccttcttcttccacctctttcttaactaaattgcgttcttctcctactctcagactttcttttgcagttacacccttgggttctcgcagaggaaagctcatggctcacaccattgctagggccactcttggccttactcaaccttctcccattgaatccccaaaggttctttctttctctctctccttttatcaaactccataacccacttttgcattttgttttctttagtggtttcttgaggattttatcgagttagaattatggtgaaagtttgtggatcatcagtgtagtaactagatcattttatttttgatgtgttatggctcacttgggatgatctttgtttttttgtacaaacccttaaatatttgctaaatgggttttcatttctcatcttgaatcctgaattttctttctttctttattgaattatcttgggtcgttgttatttgatgattttggggtttcatttctgtattttatttatttatttttgaatctttgaaattgcctattaactgtttgtgaaatttcccgtgaagatctcttttgctgcgaaagagatcgatgtgacagaatggaagggagatatacttgctgttggggtaacagaaaaggacttcaagaaagatgataacagtaagtttgagaatcccattttgaagaagctagattctcacttgggtggtctattggctgaagtctcctctgaggaggatttcagtggaaaggttggccagtcaaccattgttagacttcctggtcttggatcaaagagggttggtttgatcgggcttggacagtctgcttcaactacagcggcttttcggggtctcggtgaggctgttgctgcagcagccaaagctgctcaagcaagtgatgttgctatagtgctggcttcatctgaggatctttctgctgaatctaaactcaccacagcttcagctattgtatctggtacttgttcatgttgttttggcattgatctttttggtgctaaactttgtggcttgacttaatgtttgtactttgttatggatatgtggtattttacttagtggggttgcttaattttgatgtaggaactgtgttgggatcccatgaagatactaggtatcgatcagagtctaagaaatctaaccttaaatctgtggacattcttggtcttggaagtggtcctgaattggagaagaagctcaaatatgctgaaaatctttcttctggaataatttttgggaaagagcttgtgaattcccctgccaatgtacttacacctggtaagtatggatgttgtcattgtgctcgctattaattttttttagtcatgtagtatttatttatagtgataggattttgtgatccatgcttgttgttgtgtcttcacttcacattatttttacttaatcttgacgattcttattgttgatcctatgattattactattactataccttaggggttcttgctgaagaggcctcgaagattgctgcggagtacagtgatgttctgtctgcaaaaatattggatgtagagcaatgtaaagaattgaaaatgggttcctacttggctgttgctgctgcttctgcaaatcccgctcattttattcatttgacttacaagccttcaagtggacctgtaaaggccaagttggcattagttggaaaagggcttacttttgacaggtaaattgtaaattctatcaaacaaattgatttttaaaggcaaaggaaaagtagaatttgttgaagaagtttgtagtgactcaaagtttcgatgcagtcgta

SEQ ID NO: 43526 - DNA, 3994 bp, Cannabis sativa
acaagtcaccaaccatatgctgagctgtcaaaaatagttaattctgtttggctctcaaagtagttaaaacaccaacagcgtatttctctgatttgatcattaaaaaaaccaacagtaaccttgttcaaaaacttagtggattgattctcaggcctttccaacccttggagtaagactatctaacattgagatatgatttgaactaagtaattttggtcttcattgttttattttcttcctttgcttttgatcattaactatttgtgtttttgtttatctttggatctttgttttgtattgcttgattttgtttaaagccctcatgaattaattcttgggtaccttctcaaaaaatctcataccaataaagatattgttcattcttatatactcgtgatcttttctatttctaaacaatgtaaaactttggttactcacccaacactatctaatccatcgatcactgactccttatatgagggtatataatactatttattcttagcaaaatgaacaaattaaatgtagaacttgatatgtatatgtattcgttatgaaaattggtactaaaactagaaaatgggagaatatgtcgtgtaaaaaaaatgtgaacaaagaaaaaagagataatgtcctcaaaatgaagttggggtgtgacgatagagttttctttcttaaatagttaggattggttaattttcggcccatgtacttgagttctcctacatttcaggcccaacactgtctttggtattattcattatagtgagaggacgcaagagatttggtgcatgtatatacatgttttgtgttagtctctttccttcgctatttctttcttaatattttaattgatttgatacatttggattcttcaacatgttgtctatacctaaatttatcaatttatatccaataacaaaagggaatttcaaattatttcaccaaatatattttgcacgagttacttatgtagtactctttttttttttttgtaatcggtatattactattgactttgttcctcatttttcatgtttcttaatggaatattctccaatttctttgtataaatgtagtaaacacaaaaagggcattattttgattatgaatccatgaaccaataaggaccaaaggcaagcagagacatatattatgaagctaatgtttggtgcacttctaaccccaccaccacccatgaaatccaaaactgaaggattctcttgtgctcccctccaaaatgactattccaatttccatgcaagtgggaaaataacttgcaaaatacatacaagattcttgtattaattagggactaagtttgaatgaattatataaatgctatcttacgttttataaatttagctacgaataaagtgtagtagagaaagagaaagagactattggaagtggcatttggcgtcattgtgcaatgagattttgtatgtggtgtttattttttatttttctttccaaggatagttaattatagagtccttttctgtctcctactatggatctctatctctgcatccccacacaaagtggctctaattcaatctctactcttagctgtcttttagttatacataggcataacccaacaaaagcaatgcacaccccaatatttttcactcccactacaaaacaaaccttccatattttttttttctttctaaaaagccctactgccttgcattatacaatcaatatcattgttcttaggaacacttttcatttttcattcctaattaatataattattacatcagtaaattatacaaataatattatgtattcataatgagacttgatttcaaacataaattaatccagaattctgtaacatgacatgttcagattattttttaaaaaaaaatccactaatttcattgtcttataatgtcattttagacattcttttcacttttgggctcttttaatttagaatgaactaaaagatcttatgaatgtttttattcatggaaataaatattaaggcttttgctcggagttgggattttagtatgaaaacaggaaaatagacgaaagaatgaaagaaaaggcatagaaaattcatgtttgtcgaggagtggaaaaagtgagttatattttttgttctgaacgattactgtagtagctaatactcttggtaaatttacatttatagctactgttaatacaacctagtgacttggatatcgaatttgtaacaggataggggtggcaaaaaagggtttcaacacgacatacgaatacgaacacgaatgttacagactgagatcaaaaaaatcagacacaggtcgactcgacttgatacgaaataaaaacatgtcaaatacgacacaattcacttaccgcgaatttggagaacaataaagaaagaaaaactttggagagaacaataaagagaagcagaaaaagttgtatatttgttaggcaagaaaatagtgtggaagagaaaaatgagtgaactccaccaaatttcatccttctaaacttcgagaaaaaattgagaagaaaaattccataacataataaaaattcaaattacttatttaaccttacttttgataaaaaataatttatataattttattaaattgtaattttactgctatcattctttccttccataacttattttcttttcattcttctctattttctatgcttcactactttcctttccttctacttttctttccattcaaccaaacattcaaaaaatctccaaacgccaaaaagtgatctccttaccactttcaaattgtaggagttcattagtttgtggctaacaaagggctcatgtagcacattgtgctaccttatgatagaattgaatctttagaattggaaaaatcttttgtttgacatgtttcgaatatagttttttttttagttaggtgttaagagtatataatttcaattgaaactcagtcaaatcccatttctaaggttttactaaattataacaataaacatattagaaaaaaacaaacaaacagcttgagagtttgtacactttctcatcaataacatatgaaaaagaggatttttaaactcatcacaatatgtttctaaacaccaaccacccccacccctaccccccaaaaaagaaaatgttacttcatatgattataaacaaaactttacatgtcactattaaggagaattaatgtgagttacttctaagttctaaccaaatgcctaaatatccacatagtgtgacttgcggccacttcgatttttcgacaacactgatgtaaatcaatttatactgattgattccaaagccccaccaagcatatctgctataacttacaagagactaagaacaaggagcttcaactactggggtttagggtgctagtatatgaaaaataccttctataattcctgcaactgtataagcttccctaaagaccagactgtgtttgatgaacatgacgactgtcatctttggtgaggtatcagttggtgctgtttggatctcattggtatagaatggtgtgatggctcagagctacctgaaactcctatttgtgttgtaggtatatgattggagaaggttccctgaacttgctggtcaggaggttctggtgtctctgagaaaatcatagtaaaaggaagttatcagaatgcaaacagactattaagttcgaaatctgtctaagccccctaaaatgggtgcataccaaacaatgtcttgatagatggtctctttggtttgttgctctttttcttcagttcagctgcagagatcaataattatggaatcaaaaagggaagacatttcaagcagaataaccaatcactcccgtgcttgagaaatagatctgttagagcttaaggaacgggaatgcatagatcaaatattcaaacaaatagaactaccagtggagggtgtcacaaggaagtggctgtaaaaagtacctaggccataaagctttttataagccatttttaccttaaccataatattatcactaat

SEQ ID NO: 43527 - DNA, 4304 bp, Cannabis sativa
ttagttacaacaaatattgtgactaaaaatacatttattcacaacaaattgtgatttttgtgactaatacatttagccacagacatcttagtcatatcgccaaaatgatgatttataattagtcataacttttttacttttagtagttacaagttttgttgtgactaaaagtaaaaaaaaatcatagtgtaaaaagtctcataaaaaaagaaaagaaaaagagaaattaagagaagcaaaccttgatccattgaatgtgtgttcagaaggatggtgccaatgacattgtgacaattcatagttagtcccattgatgttaatttttccagcattgcctttccatttcacctgaaaccatataatttgtttactattttagttaaaacactttgaatatttgagagaattttttagtttaattttcttatattcgtctacgttgtagttattttatatatcttgcaaaattttgagagattcaaaaaaaattaacacgttgaaaacaagattcaaacagccagttacacgaatgtgaaataaattatttgaactttattttcggcctgttaaattttttttttttaatttcttaaaattttacaagatgtcctaaataactaggaatcatgaataaaattagactaaaaaattctcttaaataccgaaatagataaaggtgtatcagtggaccccttttaaagttaaagcttgtatagtagaggagcttactgtaatatcatgtcccctatttatgagagtagcaggagctggtttgtaatctgttttaaattcaccaagattgggaaaatcttgaaccttttgatgaagaagatcaatgggagactgtaattttccattgttacaaattttccaatgtgggtcaatgtgaccccacttctttggtcctttaccacttccttcattgtaagaaaatgggctctcattatctgctacaccataaataaattctcatccacactttgatattaattatatatgtcaaaatgattgaatgagaaagaccaagtataaaatgtatagacagaggagattaggcaacttttcaagacaaaaaggaatgatagtcatgcaacattaatggtttgtattagattattagttatatatattattgtttgtagatagtgttattattcatgtattttataaatatatatatttaaaagaagaaataagtttagtactctttgtttttaatattgtttatttgatcatgtattcgaaaattgtatatataactagaatagtttggtcgaatttataaaatttgattgatgaaatttaaatttagagtatcaactaatacatatgtatggttttaaaaaaaatgttatggaaatgtaaagtattaaatctatatttccattaaacaaaataccaaataccaactaacacctgtggagagctttctcttggggagtgatggcagttttgaactctggagttcgtatgtaggattgagtcaaattcttatggggtttggagtctaagggagtggaggtcaaagagatttttttgtatgcctcggttgtgatggacatgatttggaaatccactaataacaaggctcataataattctatttgtaacatcaaacattgcattgattctatttctatgtcttacgtagattatagttcttgtctttttcctgcgccggtgacagctgagcctactgtttggtcctcttgaaagattgggtcaaaatcaactgtgattttaaagttggttgtgattcaatgtgtgtggtagcactgactagggaccaaaatgagtcgattttgtgggtagctactagattgctcaagttctctaatccgctcactggggaagttgttgtctgtctgttagctatggaatcagcgatctcctgaaagcattcctttgtgttgatcgagagtaactcagagacggttatcaatgcactgaaggaaacttgtttcgtttggggtattgtaactatgttcttcattgcaaataactctctaatttgtttattagctataattttgtatttacttcgagattgtataattttgcgactctatgtggctaagtgaactttcgttagtggtgtaactggtatagtaaatcattcttctatactaaataatattttatgtattgaccgtgaggtctaattttattttggttaatatatttacgctaattattcaaaaaaaaaaaatgccaaatgagtaccatctcttaaacaaaagtaaaaaaaaataaagaacaaagagtaaaacaaaagatagattctccaactcaaatgaagaaaaaaaacactaaatttaataacctattgcagtctttagaaaagaaaagaagctaatgcttttttttttcttcttctcaagcaacacaaaatccacaaagaattcctaaactgcgaacataaaacttttttataatcaacatcagtggatcacgtggtgtagatagaaacggctctgaaatttagtaagttataactcataagaaaaaaaatatttttaaacctttatttagaattaaatatgatttttttaaaattaataaattaaaaatatgtcatgttaaaaaggagattttttttactaggtaagtcctaaatacaagcctaatttgtttatgcataaggtgcaaatcactttttcatttctttagtatagcctagacaatttcataaattacgtgctagctataagagttttatacttcattttctcttaattagtcatcaatatatttgtctcccaagaaacttaacatttacgagacaaactaaagacatccctatcactacaccatgtaaattgtgtttattgacatgtttattagtcatcaaaacaaattaataaaaatatataacatttccagttcaaatcacaacataataaatcaacaaataaatatgaaatctataaatctcattgaattgttactatgatccattttttttctgaaaagattttaatcaataccaacaattaagcaagtttttgaataaaaaaatgaaaatgtgttaatcccatccaaatatatgattcccaaaaaaataaaatagtcaaaacacttatactaaaaataaaactataaaataaaaaaatgaattgcaacagtttttattgaatataagtgttgtttaggttaattttgacatttaggctcctcgtcgtgtctctaacgacagagatgtttcgattaaattacactgataattattaataaaattacatgatttattataaaaagaacaaaactataaaataattaaaaaatgaagagaaagaaccataaagcttgaaactttaagcactaattaatttgaagaaaactcatgaatgtatctccaaaaattaacttgtgaaaatgcatttataattgaaataaaagaaaagaaaaactcactactttcagactgaagagctctgcaaatgatgaaatgaactgtaatgagaaagatgaagctgaaaaagcccattttttcaatcaaacccctttttttttttttttttttgaaaatggtgaagtgttgcagaagagaataatatatataatatatataaaaaaaaatacagaataatatttattttcgttttaaggtttatttgtttggctttaatactaaatatttattttcttaattaaagaatggcgcattaaagaaagatataaaattaagtaaattagggataatattactacttttatatatttatttatttattgtaaagatactacaatgatctatcaaaaaaaaaaaaatattacattgccattgataatcggggtatttatgtttatggtaattttagaaaaaaaaattttaaaaaaaaactctaacaaaaagatacctataaaataaaaataaaatgtatttaaaatattaaaaaaaattaaaaaaataaaaaatatatcaaattctattagaaaaattacacattattttgaaaaaaaaaatatgaaaataaaatcaaaatgattattgatattaagagaaaataaaatcaaaatgaaattttttaaaaaaaatatcaaaattaattttcaataattaatttaagttaatttttttctttttaatagtgaggtatatttataactttatatattataagaaaattttatatatgatgcaaataaattttataaggtgtaaatagaatttgagaaatgctaaaaggactctctacgtaggggtgtttattggatcacatctaatgtttttaagttatccgatccaattatatattggatgttaaattttatcatccgatccgatccaattatatattaga

SEQ ID NO: 43528 - DNA, 1249 bp, Cannabis sativa
  modified_base (1120)..(1120): a, c, t, g, unknown or other
tactattttcaaaggtatatattgactcaacaacggatttatcttaatgtggtgtcattttaaacaaccttgagtaaaattgtttgagtttgacttgtgtgttattgttgttagttaatatcaaccataatgaatatcaattaacaaatataaaatacttataaaatgatggccacatatacatataaatatatatttggtatatggaataatcttccaaaacggcatgactaatacaccaagagcaaaacataatcagaattagttaagcacaaaaacaagtttagctagataataagcatataaaatggttcaaccatgaatgatcatcataacatgtcttttggagatttaattggtagtacctttgtatgttcataatattattcccacttttgaaacattaactcaccatattctcattgttttttatttttttcttttctaaacaaaacatattacatatatattctcattattgttaagttttcaccaaactgggacttttaagatttctctaacatcgattatcagagatttttatgagagctaatcagaaacagattctattccattgacacttaaccatttgtcttttaaccaattatatcgcacttcattctttttgatcacttgaataaacttaaatcatatctagttggttgtttatttaagctgatagttattggtggtggattttgttaaatattcatttgatttggagacctataactagtataattttatttattgaatctttagttgaagttgttgttgtattattcttgattatgctctatgagctataatgaaaataaatgagaaatggttttaagatttaacatttaataactaatttaatctaattagacatttaacttttgacattcaatctaattcaattgtaattagatattcaattacaaattaaattggattaagttgattgggttgaatcgaatcatgtgcaaccctacttaacattacccttacaagaaataggacttattatttgtttaagagaaatgttaaaggacattagtggtacctagcaccctcctatgattaagagaaatgtgtcaatatcgctattgttccaattaagtatcgggtcccatanaatttaatataataatttttaagtaaatcgcaacacgacatgtcgagaatgtactaaatatcattggagcctagtaacaatactctttatttaaatagttttttctcgtcttatcctcacgaagtatga

SEQ ID NO: 43529 - DNA, 1034 bp, Cannabis sativa
aaccgacgccataggggtcctatggcgtcggttatttcataataatcgatgccatagggtttctatggcgacggttatttcataccccattagcgtcatccgaatcagcgtcggtagcgaatttcgccaaaaccgacgccgaaaggccttaaaaaccgcctttgaagcccaattttgtagtagtgttcagagaatatcgctaaccacgcaagggccacctttagaaagtactaagaaatagtgtccaataataatgctcatcaacaaaatacgtaatggattgaactaaaagaatctatacttgtgcgggtccccttttgatgttgaaagtaacatccaatataattcataatttatgtataaatatgtaagtttaaataataatttaaatgcaaaaatatttaaatacaaatagtaattttaaaatgttgatatatttactaaaaaaatatactaatatattaaaacttatttaaacaataaaattatgctaggtttttctattttttaattgaaattcaagttttttataattatcaagtgaatttaataaacaatttaaataatgtgaaaatgttataaaactgtttgaacagaaataaatttactatatgagaaactaaatctgataggtcaaaataatagagaagaaagtaaaatgacacgcactatttttatgtggtattaatattcttgtgaatactcctaatctatgaggccacacttagtgaataaaatatattagtaacatctctaacaattacaaaagtatctaaattatacaacataagactctctcttaatctgtacagaaagaactcttaaaaaaataaactacaattacattttcaagaaacgaaagaggtaaccatctcgctgctattttaggtgttatttatagggataaatgacacccaaaatgtaatgaccgctttaataatttggattagtaaaaacaattagcactaatttttgatatttttataattatttatgaatttaattatttatgtgccccattattagaaatgggc

SEQ ID NO: 43530 - DNA, 4461 bp, Cannabis sativa
agtatcataagctaagcacacaattaaacagtttcaaaacacatagcaattgatctcaaatagtctagcatgtcaatcatcatcaaagcccataagtcatgtagtcacatcttagtctagcatattcatccaaaataacaaaataaagcaacctaaatactacccaaccaaattatttcccgcaaacttaaaaaggataatggccagagttgttgatggttgataaagaacttagtgactcaaaacagttctaaaacaaaaatgaacaagcaacataagaccctgagtaatttacataaaaactatatggaaaaatgagtgagcccaaactgttttcattagataaaatgttgctaactagaacaaagctatgaattatctgacaagttaatgctaccaaatggtgtttttacatacaggcatgcatccgaaacatcaatgttaaggcattttggattcatgtaaaagccaccttcacagaaaactatagttaatagacattattttatgtactaacaacaagagaatgtaataacaatacctaatattaaatgcctctttcagctgccccttattgtcaaaaggaatgacctgtacagcaggaaattaaaccactcaattttataactatctgatggaaattaagaaactcgaacgagcaatcctttcgtaaataatatagttataaaattttatcaggacacgtgccttgaataatccatcatacaaatgaagcccaattaatctgcaatctggatcaataattccaatctgcagaaaaacagaaagggataggaacgaatgtaagttcccatgtaaaactagagaatggttcagatatccactttatacttgaagagaaaatgaaaaagaaacaacatttaaatagcacaagagtttatgagcaagaagacacactacctgaccattgtctgtaggacggcctatacgatctgaaacatcccccattgctctacatggtagtaaagtaaaacatcagtgaaaagtataaccccagataatagccactaagatagcaatataatactagttcaatgtcaaacttaaaccttgtaacaagctcagatgcttcagcatcccattggagaacacagaatttgtatctttcagttgcaataaacagaagatcttgagtttcaccctgttcaaaaataaaaggatgaataaaccaaaagcgcataaaattaaatcaaacctttggatcttaaaaataaacactatatactcacatgagggcggaaaagctcaagtgtggcaattcttccatatattggtacatccagcataggctgatagaaagaaaataaattttacatcatgcaattagaaattaagttcagatggaaaagggaagcaagagctaaaagttttggacaagaaagaagaatcatcaaggaaatttacattacattaaaaaaacattgtacattaattgctaatgtttaatgttgccattacaattatctatgaattgtatagataaaaaaaggaaaaaagcttgaaaaacttaaaaaatactcaattgataagcttccacatcatcaatccaaacatgagtataatatagataaatagattggagaaaaacaggctttcaggttgataaccataacatagtttatatatgccttgattaattatgctacccatataaactattgagacacttgatttttttttttttttggaatagagacaaaggtcacatgtccatgagtgacctactcccaaatttactgagagacctcacttgtgtaaaactgtggttgcaacgctaacacgagtacaaatataaattagacaaaactaaaagtacaaaacaaaaaataaaagtacaaaaagacaatcacaaaacagcagtaaacttttacaacatagacatgaaagacaatctttacaattaaaacataaagttctcccaatttctacttaaatcaaaaatgataacccttcgaaaccttttgacttataaacccaagtttccacccaaagcttaatcctttcccaaagattgaatgttctcatcagaagtaacaaaagacaaatagaaaatctacagttctcattagattttgggaggacatgtggttggaagaaagaaacaactatggctgatacgttccctctactttatagaatgccagtttgcaaaagagatcaggaagatcttcatggggacttaaattcattccagtcttaaacaagatggagatgatacgtgttacaaagctgatctcgacgttagattcttatgggtgttgtactttagtggcccatagaaggatatggacgctagaagctctgaggcattttcttgtaaatccatattcgaggagataatgtaggaatggtcgtactagtttcaatcaatgtcagttcatataaaaatctttagcttcaacaaggataaaggtgttttggatagttggtagctctgaataagtaaaacgcttgtgagaacttatacttacaaaaaccatttatattgacttcccgaatgtatgttaaagtgcaaaagaaactctaagtctagttacataatgcaacataaggaacaaatggtaagccatggggaaaaaaaggaagaagaagaaaataataacactatggattgtggctgtccaagtgggttctttaggcagtttggttggggaaaaataatctttaatgatgtagaagaggatgtggtagctatttgggataaggttaagcattgagtggctacataaatattcaagaataaagaatttaggtatttctcttttcattgcctttgtgggattggcagttgaggctgtaatattgcagttgatttatgtattgtgtgtttgtctttgccttatatgatggtttaatttgcagcacttctagcttatatactagcattctaggttgtagtttaaagggcagacccaatcatctttcactaatacatcttttgtttccaatttatggtaaaaacctcgttccggtaacaaaaacagtatctaacaaaatatataatgactgtaaaagagctataacaagtttcattaagcggataattctataaaccgaaactactttctttctaccaaaagggttaggtcaaacagtacgatgtaagaaacagcagaaggccataggtcacgaaactcatttttaaaactgaagactatggttatggaactatgaaatacaagtttcgaatctgcaaaaaaaaaatgtatctttcctctttacactacaaaacatatttacttcactaggagcccttaacattccaagaaaatttagctgcacatcaccacaataatcaaataacaaaaaagaacaaaattgatattacctgcaagccctgtgcagtaagtaaatgaatttcaatacgagtgcatttcctgaaaacaaatcaaaatgcattgtgactatcaatgaaaaatcttgctaaaaaaagaaaaagaattgcatagaactaacataaccagttcaatgataaggccaataaattcatttctaacacacatttaccagtgctgtcagcgacttttttaacataagcgacaaaaatggttacgctaactaacataaaaatttgtgctcgtcttagaaatccaaagaacaaacatacagtcaatcactctatacaaataccaaagcttcaatacaaagttccctagatcaaatattgcttaatacaaatggctaaatatagtgtattggaacgagaatccgagaagccaaacagaaaacaagatagaaaaataagagtaaaagcaagagaagaggaaaaaggtttacgcaataatgaggtttagctcgttgggagcggtgaaattgccgacacaggagtgggtaacattggtaggcttgtgtgctgtaacgacatagttccagatgctcatcttagtcttctaccgtaagcgagttcgtggccaccgatgggtttgccttctacggctacagagaaatttgccctaagaagctctcggctatggcgttttttctttctactactcactcagcgcgctacgcttctcttttcttttgttagcggtgcgagagcagggaatgaaatgtggaataccacgcagagtataagtgctctttcacatcattctattttatccatatttatatgaagttacccctcgtggaaatggaagttcattcaaccaaaaaaaataagtaaattaactaattaagggttatttgaaaagttacgatgtaattaaatttatgtttaattagaggtaattaaataatttattatatttgtttgatcgtataattacactttataattatgtaattgaagataattaaaagtttcaacaatctcgtttcaaactaattaaggatcttgggccaaaaaatttaattacacattttttatagagattatttcacaaaaacatatacaataaaaaaaattacaaatatacggtttcacggaattttaaa

SEQ ID NO: 43531 - DNA, 4008 bp, Cannabis sativa
  modified_base (682)..(682): a, c, t, g, unknown or other
gggcataaaacccaacaaaaccttcttaagactaggtctcttatggataattttctattcttcacttttgaattaaagtatcttgccactttcctttggtacgcatctagatgaatttgtgggagggaatggtactctctactgggaccattactttgcatccttacatcattgaaaacagagagtgtcctgtggttgtccgggcagtagttctataagcccaatgtgttaattttatgatctatatcagagttataaaagcgaaagcagaatttcaatcaaaatagtttttatccaatatgaaccataagcccaaggatctcaacataatatatgtagattaaatctaaactactgaaagaaagattatacctcttgaagcctattagggtattcttgtttcttttcgtataattatcgaacatctagtttaagaactttgttgaagaatccactccttgattttccaagccagcctcaacactcaagaatagagtaggctattagatcttattggatgaacaaatttaggtattatagtgtgtactcaaatcatgatcagacactgtaatagagttagggttttgatctcacacacacctggataggtgtgtacatgtgtgagacaaagagagagagagagagagagctaggcgtgagagagagagggagagagaaagantagggagtgaaaaatcaatcctatgtttctctacttttagtttattatctgtctcttaattgcttgtattagttgttaatttttaacactatatatatcctacatataatgttataaatagaccctgtttaatcctttatttataaaataaaagtaaatatttaattcgatttgaattagaatttaaattcaaatataaatataataatcgaatatcaaatatcagtagatcttttattttaataattatcattttaattaaacaattatcaaataatttatttaattaacaattaaaagatagttaacttaacataatttaaattattttaacttaataaaataattaaattaatcacaagcctttatatgtcacccttatatgtcaccctacaggtgtagagtgggcgtgtagagtgggcctatagagtgggcctacacgtgtgggccatattttaaggtctaaaaattaatttctcaattttgccataaataagatttattatttattctactaataaataataattgattaattctcattaatatcttaattcacatggattaaaataaatattattttctctaaaataatatatttctccctttaattttatttaagaataatatcatatctaactaattaatacagttttatccaataaaactaaataataaaatactattaattatacaattcataattatcataattaatcaaaataataatttcacaaattaaaagaaaatttctctcctattttctctctagactttcagctcccaagctgctgcaacggcgaagactaggtcaaaagggataggaaaacagaaatctagcaccaagaaagtaaggaagaaaggtccgagattatttgtagaagctcagattgataattccatggacgatttggttggtgttaagctgatcgtcttctccgatgaggaagaggaacataatcaagaaaatatgggatccaactttaatccaatgcttcgaaatgtgtttcgttctcctttgtcaccaagaacctttctgagattgattatatagcaggatgaagcgaggaaggactttgagcattttcttgctgctaataactaatgtaacagtaacattgctcaaggtaagtcctcaaacccacctattttgagatctggaactataatttgaagcttagaaccatctttcaatagcactaataagaatcctaaagtcaagatcactatggaagatattgaggatgcggttgaattctgaaagccttcaattgtatgctatgtccttggatccaatcctccactgcatatacttgagggttttgctaacagaatttggaatggaaaaattgatagagttaagctcctatcatatggaatttttataattcgattccagagcattgctttttcgagatgaggttctcaatggaggatatatatttttcaataagaggctggtgattatgaaaatttggggtcctaatactaatttcaaaaaagaagacataagaactgttccaatatgggtgcacttggaggacttggaactcaaatactggggacaaagatccttgttcaagatcgttggacaaatcggcaaaccaataatggttgatgaagtaacaaaagaaagagagagacttagttaccccaggattctaattgaggttaacatgaatcaggatttacctgatatggtggaatttgaagatgaaaatggttctaatactcttgtagggatacactacgaatggaaacctgtaatatgcaagcattgctcgagcttaggtcataccactgatgaatgctggaaaaatagagagactaagaaagaatgggtgatcaaagaggataaaaggccaattgcaagaacagaggccccaaagattgataaggagggctttcaacaagtaagaaagggtgggaaaccaaaaaacaaaccggagttaaagccaacacagatagggaatgttttccaaccattggaagaggatgagcatgctgaaatcattactgatattctggcagatgaaaccgtggaagaagaagcaacgacatgagaaggggggagatccctctcttgtcaatggataaggttttatggtggaatgtgcgaggagccaacaacccaaaagcagagtcaaattaagcaattaattttcgctcaacaagttggattggttagcctcctcgagacaagagtcaaggctcagaaacttggagccttgtactctaatatctttatagggtggtgcttttccacaaatttaccctggcacaaaggtggaaggttagtaatagcttggaacccgatggtgtttcaggtgaatattttaagatgtactagccagtctatgcatttgtttgttcagaatgtggggggtatgtttacttcctatattacctttgtttatgcctttaatgataaaaaaggcaggaagctattatggaaggagtcggaagaatgcaatacattagaaagatggcttatcatgagggattttaatgatatcatgctaacaaagaattcattgaatgcattgaggggtgtaatgttgaagatgtaaagtactcagggttctattatacctggaacaacaagcagcagggtgaggatcgtatctattccaagattgatcgagttttggctaaccaatcttggatggattctaaattgaaggtacatattaaaaagtgtgcgtgcactgcccctcttctcccatggcaaagaagaaacgagtaggctgaaagccagccgttacaatttccacagtcaacagtgcagatgaggcggacctccctttgatccaagagtcgatagctgacctagaaggaggtgatgaatttcacaatccgtgtgagaacctggggatcgagattgaatctgaaggttgcaaagctgagaagttcgttcgtgatgcgtcgattccagtcagctgggcagaggaagtagaagctgactttcaaatcagtgctagagatctctggagtaaatttaagtcgaatcaggtacctacaccttcctccaaacttacatttactgaacctatgagaatcggtgaccaggtggtggctaagctagaccttgaggagattgaggttgaggcctcattttggaaaaatgatatagtgtgtattgttctaggtgcaaacccaccgttcagggtgtttgagggatttatcaagaggatttggggtaacctgggtatagagaagattgtgaggatgcattcaggatgtactctggttaatttttgagatgaagctactcgagatctcattcttgaggcgggtgttatccatttcgataagaagccagtggt

SEQ ID NO: 43532 - DNA, 3435 bp, Cannabis sativa
tgttagtaaatctagaccctggtaaaataatttccaacagttttctcattcccacgattgatgagttgctagatgaattggggtggcgcagtagtgttctctaaacttgatcttcgagcaggttatcatcaaatacgaatggatcggcgtgacattcacaagacaacgttttgaatgcacgaagggcactacgagtttttggtaatgccttttggcctcactaatgcaccctccacttttcaagctgctatgaataaactcttcaaacctgttatcagaagttgtgtaattgttttttttttttttgatgatatattggtttatagcaaggatgttcaagaacacatgatccatttgcgaaaggtcttacaactacttcgagaaaacaaggtctatgctaacggaagaaagtgtcattttttccaaaccaccattgactacttgggtcatgtagtaccagctaagggagttcaagctgacccaacaaagatcacaacaattgttgaatggccccaaccaaaaaatctaaagcagctttggggttttctcgggctaacggggtattatcggtgcttcgtggctcattatgcaaccattgctgccccgttaatagaactactcaagaaggataatttcaaatgttctgaacaaatggcaacgacttttcaacaattgaaaaatgagataacaatgacgctagttttagctttgcccgatttctataaggaattcattgtagaaacggatgcctctcacacaagaattgggggcatccttatgtaggagggacatccaattacttttttcagcaaaaaattaggacctcgattccttggcacatcaacatataagcgagagttacaagctattatcacagcagtcacaaagtggggacaataccttcttggttgtcattttgtgatccgtactgatcacaaaagcttaaaagaactccttaatcaagtcatacaaactccagaccaacaattcttccttcaaaagctgatggagtttcaattctctatccaatacaaggcaggaaaggagaataaagtagcggatgctctgtctagacagcatgagcactcactttcatctcttaaaactaccatcacttctggatgttttgaatttttggaagaactaaaccaagaaaacattaccaacccaaatttgagacttattcatgaacagttgaaggaagattcaactactctatcagggtacgaggtcagagatgggttactttacttccaacataagttggtggtcaacaaacactctcatctcaagaggcaattactacgagaatttcatgattcgcctatcggtggccatgctggcagccaacaaaattttcttcgcctaagcgctaattttttctggcatggaatgaaacaagatgtctacaactatgtgagacaatgtttagtttgccaaatcatcaaatactcccctacaactccttatggtttgatgcagccacttgaaatgccaaaaagggtttgggaggatcttgtaatggattttattgtgggcctaccaaattctaatggggtcactaatattttaatggtcattgagaggtttaccaagtatgctcattccggtgctcttttagatcactactcagccgctaaggtagctgaacttttcaccaacatggtgatttgtttgcatggggtaccccgaacaattgtttcggatcgtgatccaattttcaccagtaatttttggaaaaagttgtttgaatttatgggtacaacattgaagatgaattcagcctatcatcctcgaaccgatggtcagacggaggttaccgatagatatgtggagcaatatctttgagcttttgccgctgagaaccccaaaaaatggagcaagtacctttcttgggctgaatttcattacaataagagctttcattcagccatcgacatgactcctttcaaaaatgtgtatgggagatctccaccaacaattccagcctatactcgaggctccacttccatacaaatggtggaagacaattttctctcaagagacgacattctacagagactcaaggttaacttgcaacaagctcagatcaaaatggtttaacaagctaaaaagaaacgcagagatatcgaattccaagttggtgacttagtgttggtcaaactctagccttaatgtcaatcaatagttgctaaacgcctcaatacaaagctttattggcgttattttggaccatttccagtggttgcctaccggggtccggtagcatacacgctgggactaccactcgagagtaagatttatcctactttctatgtatccttgctgaaacccttccatggcaccgcagctcaagtttcttatctactgcttgaaactagcatagctaacaaaccagtgatgattcccatagctattctagctgcccataccaagctcatcaacaacaagcccattcgacaagtccttgttcaatggtcgatgtcttctatagaagactccatttgggaagattttgaatcatttttacagctctatgatttacacaaccttgtggacaaggttgattttgaggaagggagtagtgatagcaaggcgcaaaataaaagcccactgctaatttacccaaatatcttgcaccaaaaagtaaaagagtggatggaccaagccactccttcagtccaggatacaagcaaggaacaaacttcttcaaccaaagaaaacaagaagaaggagaagaaggaagagaaccaagcagctacatcgcattgaggaaggatgcgcgtgaaattgaaatggctcaaatacttcgtgatggctgtgcgtcgttgaggagggaaacttttggtgccaactgaattctgttagctagggaattactttttctttcttgttatttaatataaatactcttttgtaattggaaaaggtttggctattgaatgaattagcaataatttgcttgggagacttgtcctgtctcgaagagggtagtttattctatcattcacccactggttctttcttctctggtgatactaaagcgcaaatgcacagaccttactaaagtgtgatggcttagaatagtaatttttgaagagctcttgttgacgacgtcgatcgacaatcatgaatccgctgcaaatcattttttccaatcggttcttcacgatcaaccggttgcttagcactaggatcttcttacacctttatcctctgttcttagtgttctccatgatgaatgtaccaaatcagtacatttcattattgaatgataatttttagtttccattatatatcaaattgtttctattcttctatgttaattttatgattatcattttaatcttgtttagatggccactaaattaagttttactttaatctaccgtcattttagaattattattcacctaatagtctaggattttaagt

SEQ ID NO: 43533 - DNA, 2204 bp, Cannabis sativa
cttgtcttaaacagtgattgctttcttggtcagatgcacattttaccatgtgcacgtcgagcatttcagtttgtcttatattggttatccgttctcaattttgcttacttccatagtttcttctttggatactgatatcgataattctttactgttgcattaaaaagtctttttgtccttctctttttgattaaacctattttccaaacagcacgagtgtcttggagtatttttgctgcaaattaaagcagttgatttctctttctgtttgctgtcaagattcatctttttctcactatttcttacatacaaaacagtattcacgtcctctacatctcaggatctataaataatacagtaggcattagaatatatccaactgctggtgcttagggattctctaaataagccaaatggtttttcaaacaatagtgtagtgtgtatgaacgataagctctttatcttactgacaacgatgtaaatgttgtaacctgcagaggcacaagaggctgaagaaaatatttgtggtgcttcacgaagaattgaaggttatccttgcaaactttgttgaccctctaaaatttcaagctttatgaatttctagaaggccttctagaattttgctttaacttttcacataactaattttgtacatccatcttctatctcatttccttacagcaccttaagcagagaattaaagatttcgtcctttcttatggaaaagattgaagagaatgatagagaactgaatcggaagattttattcattttccaaatccagaggggtgcttggaattggaagttgatggaacctggtcacaatcacaatgttctcttctcacatatgaaattggttcccttgaccagtcgagtggattgatttagtgtctctctcagttgcagttgcagcttcagccccagaagaataccacacccatctcaatgtgtacattcaattttcttctcttttttttttttgtacatttccttatctaagtagttgcacctttgggttcaggctttttgtttttgtttagcctgaccttgtttttttgatcgtttgcttttgaaatttaccatttttgatgaggtattgttcatacttttgtctatttagtgaattcacaaggcatgaatttgtagaggattataggagtcatgtcatgtccatatccatgtttatataattttttttcttagaaaactgtcatcttcacatttacctagcactcttgtaaggtgtaatattgttattagcgcaatttaatatcgggtattgcatattttactttagttaagattataaaaaattgcctttgtcgattcaaatttaaaaagaataactcaaatagtagaaatatactttaatctattggtaggtatgatatttgccgtgatgatcttaggataatcattttccaataatacatttttttttttaattttctaataagttttagtatttttagttttgcctttcaataaattagaagtactatcacaagttatttgaagatttcattttaattggaatttggttacacattttatagctcggtaaaaatatttaatgactcgtaattactgattttatttagatcaaacttagaatagcaatacacgtgaaccatattaaaaatttaattcaacattgtagtgtatttgatctcatttcgtgccctgttaaaatttcttatgcttatttacaattttagttgggagtgctctcttaaggaggtgctggggtttggataaggttttttattttgattaattagtactataatgctattacatgcaataatacttgttagtaatcccttccctctatagatatctactatttttgggcaagaatattttggtgcggcccttggtagtttaaatattgattaaaatattttaaacgtcaaaaattaaattttaaaaattaatgtcaatgatttatatattaatttttttgaaaagtcaatgatttatataattaaaggagtattttaaaagtaattagtttttttaattatgtaatgattttaatttttaactgctatattaaataaagttatatgtaatttatttaaacaaataatattattatattagaaaattaaatatttaacataaattttaaataaaaaaatatataataacaataaagttttttcatccaattgtttattgactaaaattagatgaactct

SEQ ID NO: 43534 - DNA, 2312 bp, Cannabis sativa
acaaatattaattattatttgttttaaaaaaaatttttaaccaaatataaacataaaaaatcaaatttccccttgtgaattataacatgcaatagaaaatcttttctaaaaaataaagtactatattgtgatttgtgacttgtaggagggatggaattgtaattatagttatttgattgtaacggagcatatgaactgtccatgcagaacaataattggattgtgcaaaacatacctcatacgatataagggtaaccataatgttatatattaattattaagacattgtttggctgtattttagaatagaaaaaaaaaattatcattttaaaaaatataatggtatttggctatttaaatctatttttagatttctttttactaaaaaaaatttaatatcatataccataccatgacatgatcaactcatcatatctcagaaccagaccctggagctagatctaaacccagacctggaccctaaccgcagacctcggacccctgaccggatccaaggtggtctgaagtctggggtccagggtccgagcctggggtccgagtgatccgttatccgaggtctgggttagtgccggggtttgggtctgggtggggtttaggttcagacccgggtccaggtcgaagttcgggttcaaagtctgggtatgtgagaataaatgaaaaagatactatattagacgaaaagaattgttttcgaaaataaaaaacaacattttgatgttttctaatttttcaaaaaaccgcttttaaaaaatttagccaaacattccatattagtttttaaaagttgttttctattttttaaaaactgaaaacaatttttaagtttgactttgtttttgttttcaaaattgtgtcttttgagtagagaatattttttttgacattttaaaaaatttcatggtgtttggttcaaggttttataaaaaaattttaagatttttttactaaaaaaattttcaatatcctacatcggaccaaaccttgtacccagactcaaacctggaccttgacccaaacccggaccgtagaacccggtctgaacccagacttggatccgcacctgcaccctagactaagtctgaggttctaggttgggtctgagtctagggtccgagtttgggttccgggatacacgtccgttgtccgggtcttggcacagggtctgagtctggggtccgagtccatgtcggtattcagggttcaagtttggggtctgagtcagggtctggtttcagagttcgggtccaaaatctcgatatgtgagtaaaaatgtaaaatataatatgttacacgaaaaaatatttttaaaaataaaaaaaaaaacattttgaagttttttgtcttttagaaaaattgtttttacaaaatttggccaaattaatttttcaaattattttctgtttttaaaaagtgagaactatttttaagttaaaacatcctttaaatttctcaactttttgggttcctaatagtataataatactgctcaaaacaagtaaatgtatactcattcattaagttcttgagaaaataaaagtcatgcaatttatttgtaactagataaacttattcgcgagtaggctgctacaattaataacgtttatgtagaattaagtgagcaccatattgtggctgaagtgtaagaatggctataggagcatgagcataggagggtgagagttcaaaagtgaagcgttgtagtatcaaggccatggccattttggcttcaaccatagcaaggttttggccgacgcaaatccgaggtccccaaccgaagggaaagaaggaaacttgccctttggtggccttggatactccttctgcaaatctctctggcttgaactccttggcatcctctccccacaactccgtatcacagtgaacaaggatggcaggtaatgacaattctacccctgctggtattgatatatttccaagctgtgttttctcgtgcacagtgcgattgataaagattgccggtgggtaaagccttagaacttcataaaaaatcattgtcacctgcatcagtcattcatatgaatatacattcacaaaattacactaaaaaataatcaggtctggcattttttttgtttagtaactcactcaagataataaaattgacaaacaagttttttatgagcttaaaaattttgggacgctttatttcctttactattatttctttaaacgaaattctaaatttttaatgaataaccttatgcattttatattattatatatatgacaaaatatttttagatagtacttttttaatatactcatcacat

SEQ ID NO: 43535 - DNA, 2708 bp, Cannabis sativa
gttcctgaattagggggtggcaatcaacctgctagagtgagtctagattttctcttagctgactcttagtttgacatatgaataaacgccatattaatttgtgtgctccaaatgacaggtgagtctttatcaaatccccagtaaagaagaacttagacagaagaatttgttcagtgttagtgattgcaaaatgtactggcaatccaatggggattaccttgcagtaaaggttgatcgctatacaaaaactaagaaatcaacatacacaggctttgagctattcaggataaaagagcgtgacatcccgattgaggtgttcgagctggaaaataagactgacaagattattgcctttgcttgggaaccaaagggtcacaggtttgctattatccacggcgataaccccagacctgatgtaagcttttactcaatgcggagcggtaataacacaggccgtgtttccaaacttaccactctaaagggcaagcaagcaaatgccctatattggtcgcccactggtcgttacattattctagcgggattgaaaggaatgaacgggcagttggaattttacaatgtcgatgaattagaaaccatggctactgctgagcattttatggcaacagacattgaatgggatcctactggaaggtaattctataaaaggcgatcattgttatccatctttatcttggatttgtttcttcgatgatctgaccagttctatttgtaacaattaggtatgttgcaactgctgtgacttcagtccatgagatggagaatggatttaacatttggtcctttaatggcaagctgctttaccggatattgaaggatcatttcttccaggtaatttcattattcccctaaaaactttcagaaatgaatgaactttacttgcgggttcttttgtctgaatatcttacgagagagatttatttgacatgattctattttgtatttgctacagtttctgtggcggccaaggcctccacctttcttgagccctgagaaagaagaagagattgcaaagaacttgaaaaaatacagcaagaagtacgaggcagaagaccaggacgtgtcaatgctattgagcgagcaagatcgggagaagaggaagatgttgaaggaagaatgggagaaatgggtggccgagtggaagcggttgcatgaagaagagagattggagagagagaagcttagggacggagaagctagtgatgatgatgaagaagaatacgaagccaaagaagttgaagtcgaagaagtattggaaacaaccgaagagatccttccgttcgaaatttgatcagaggagtaaaaccagtattcttgaagtgaggttttcataaagaaactttgaagaagtgaagtctttttttgtctaggaatttttgttttctttgaaactgagttaaaaacaactttgattattcctgtaatatttttgttccaaattatttttgatttaatagacttagaattttgctgagtgttattatgcacagaacatgggttattttagaacacttgaaagagatttcacctcggcaaatgtctttttgttttacaaaatcctttgtatactttactatgcataacaattactaacatggtcttttgcaaaatgataatgtatatagaaagtgtattgtgaaaagcaatttataaattaattaaaaggatatttttgaaaaatttctttagttgttgattgagtaacaattcacacaagaataaaaaaatcctaacttattgttcaaaatgaatcaattgatatatagcacatagatttgacaatacaaaaataatattaacaatacctattaaagtataggtaatatgtataatttaatatgtcttcatcaaaaaaaacagtacaggtaatatgttgtttaaaaaaaaaaagtaaaggtaatatgcactatagagaggtgtaatgaaatagaaataatatcaataaaaaaaaaagaagaaaaacttcaaagagaaaataagtagacttagcctagctgaccatacagtgaaaacaactacataccaatcacgttagaaataaaataaaattttgattttggtaagtaacaatgtttttttaacatgtattaataattgtttatgtatatattttttttaaagaaaaaatagctttatatggtaaatgtgcacatttcaactaagtaaattttattttcaatttcttgttgggatgtgtattcatacatgtcacattaataaataaattattttaaatttatattaaatgataatatgaataaaataggaagtaatattaagtatatatattaaaatgagatgagataattcaacaaccgaccttagctcagttggcagagcggaggactgtagttggctttaaacccattagatatccttaggtcactggttcgaatccggtaggtcggaatttttttttcattattttaattattaacttttatatatttatatatacttaattttttttattaacagattacatcttccacatataaatattattttatcttctaatatttgtcatatcattcttttcttccaattatgatgataaagatgtttatccatcaaataattatgtaaggctgtttgatttttattgacaaaaaatataagttttataaggtaataaattaataaaaattataaattttatgggtttcagataaagataagtgaggataaat

SEQ ID NO: 43536 - DNA, 1071 bp, Cannabis sativa
aatcatacattgttgtaatggccttattgtagctaataataataataatggtcctttaatttggaacccatgtactagaaaatacactaaattattaccttatgataactcaacagtaccaattgtaattggatttggttacgatcctctaatagatgaccataagttattaacttacactataaagattcttgatgagattgatatttcatgttctttatgtgaatttcagctctattgtgtgaaggccaagacttggaaaaaggttaattgtaacaataatgcctttgtagagaattatggttacgagttatttggttatgcaaatgttgagaattgtttgtattggatagtgaatccaaggttgaaaaaggacaatatttcttttattttcgggtttgatcttcaaaccgaaaaacacagcgaattggctctaccatttgatcataatgatgaagcttcacttctcatgtttggacctcctgtgggattggaaggctgcctttgtgtgactcgacgagtaatcgatacgcgccatcgatggaagtttgagatttggggggtgaaagtgaagaattatgatcatgatcatgatgatcacaataaacaatgttggagtttaatgttcactttggtgcctgatcatcctagtagatttctatgctattttgatattattcttccaataaagaatttcaggagtacaaatcaacttctcttagatgttaatcacaaactttttctatatgatttggaaactgaatcaactaagcctctacatgttccccttttggatgattcacaaaatttcgaagcatttttgggtgtgcaaagtcttctttgatgactctttagatttgtttttattatttttgctctaattaattttcactcattcttgtatgagttaattatttttatttatattaaaggaacaaataaagatttcctttcaattcaaattacaatttaataaatttgtcataatagtaaattcaaaaagatttaaaagaatgtttgctcatattttaacgaccttaaaaatttagggggcatgatttagtatatgtc

SEQ ID NO: 43537 - DNA, 5778 bp, Cannabis sativa
tttttttgccgggctcagagtaattgagtttcacatgtttgtattatagctttgaatgtttgcacttccttccataaaactatgattatgttttagttagtttacgtctgtgggttggcttgtttattctgttacattcaggctcagacatcaactggtcaaggggacggtgatgcgcctggttgggctcctttacgtgataattatatgctaacgaattccaagttgaagggttgggataagatgccggtaagaattttgctatccaatttgtcatagatgtcaaattgtttcttcagtactcattctatatatattcagttttatctttcttcaaataagactcttgttttgaacttgttattaggataacgatgcaacagacgacattgggagaatgtcagaagatagtagttcagacggtgatgactaatttatagcagttttacttggagcaccaacatttgttttcatttgtgctattgttgctattctggataggagtttcccaacctcctttctaaagttttgtagaatactttatattattgatcattataaatgaatggcttgagttaacctattgttttgttcatgtaattcgacacttcttctgttaccattttttcaccctttatatagcacaagcaaaaggaattatttgttcattttgggggatatctagttgtagatgttcttacaaattttcaatttcatatttaactgagtttgtcttaccatagctggatttaatgcagtcaccataatagttttacattactatctaggtaggcatatatttttaagtgaggatggaattaattacactttatagttattgtaaaaaaaatgcatactatagtttgtcttttgagtgcaaattaagggtgtctaataattcttagtgcaaattaagggtggctcataatatctcaaagctggccctctaactcaagaattaaggatggcaattctttattttaattttattcattcatgtattgttattaattttattatagttcgtgtagtgttactaaatcttgttaattttatatctcatcgtcatcttgtatttgtcccagtttgacatgatacgattatacttaatacattaaataagtatcataaaatataaataaaaacatgacaaggttatataaatccgagacaagatacaattaaaacaatatttaaacatatcatattcaggttaataatctatcaagttagcagatttgtgattttcggatttagtagattaacctgagttttaacttaaaatttaattgtgtttaacctattttgacatgtacttatttctataatattttggaatcatgtaattgtgacttttatcaagaatcttattaccaaaatagtaagaaaatgaagtgtgttatcaaaactagtttgattgttttcagaacttaaagttcaaaccaattatttttagctttcgatgttatagggagaaagagagcagtggagtaaacaacttgtttgataaatttcaattacacatcatttatcaaagtatcaaaatcttatcatgagttaagaatcggttaatagttaagggtaattttctaatttttaatattactttattttaaatattaagaataaggatgaagtgcacttgattaaaagtttaaagactataaataataatttcataacctattttaaagatttttttatttatttttatattagtttaatttttaaaaattactatgagaatctgcattcaaattacacttaccgaaaattcttcttgcaattccaatagtttaactccagaatacactcatataattatttagtgaattgaatgacgaaataacacattattgagaattttataggagtagcaattcatgttcttgttgtgttaaagattttaaatttattaaaaatttacgaacaaaacacaatttgtaacatgaaaaatttataaaacaaagatgcgaacacgatacgtataatgtcaaatccttaaattctccagttgtattgacgtgttgtaaattaaattgttgattgtcatctctcacaaacacacaaacatgaacacaactcaaataaatttagtgtcgtattgaacttgcaaaatttcttatcatgttcatctcaaccccgcataacgtaacccttattgccacccccgacaattttacttctaatacacctatacgatgttaatattatggtatcacagtaatagtcataaggcaaaataataattttaaccaaacaataatctttttattcaatgcaacattagaaccttcagaataaaccaaaaatactccactctattcagcgtatgaaccattgtacctcttgatacctcttgatctttacagttccctaacatagaagagcaatctgtatccattggcagtggcaccaagattcaaaaacaatggcaaaaagatacaactagagatgatcatgaccattagtataaaaaattactatcctctttaaaccgcatatgaaatcatcatgtgctatacatgcccatgcaaaagaaggagaacaaaatatttacaactgcaagttcaaagtctgaccctgcagcgatttcagcccgaacatcttatatcctctactacatacataaagatcctgtaactatacatgtcatagatgtcaagacccaaatgaaacaaaaaaggaaaaaggacaatactacaaaccccaagccttccggaggacaaggccattgtgagttcagctactcatgatgcctttgcagcctcatctttttatgtatatgactgactttgactgactggtggaggaggattatttagttgagataatgaatatgtataatggtgcataattatgggaaaagagagatcaataatgactctccttttttttttttgtgaagagtatgaatcagataatgaagatgaagttgcccagagatacagaggaaataaaggtcatagcctaaacaaggcaaggacaaccaatctggttggatcatgtaggcaatcatcagatcttttatggagatatagaatcaaacatcggcttgtccaaattattggtgagacatcagaacaggctttctacattcacgtccaccttttttttgccaattggagaaaatcaaggaccctgtgatacattacacagcttgtcacgcacaaggaaaaaatgcatcaatttcatccattgtttaggtatgattgtttccattcaaacagcaagagtttctttctttcctttataaagtatctgtactcagcagcttctggtttggtttaaaggatcgtaatcatagacatcaccggctttcacaaagcgccccttcactctctttcttacatcagccctcgccttccgagaagcatacctcacccttttatcaaacctaaaacagcaaacaagactgaggtaaatttcttgaccagtggaaggtaatcaaacaaattggaagttttgaaatacaaccacatttagtcagaatgaagagaaaatatgtacagaacaatcatcataaatggcagaagatggaaaaggacatgctaatctgcatttccttgatattttctatgtgtagtgtgcatatatcgtgtttcttaaactccaatgatggcactcagtgagacatgtaatatattaagtacagatggaaaacatgtaaccaacatgtagtgttcatgtgaaatatagaaacccaaaactctaagcagcaaagttgatatgcaaagctaagaaagttgaatgatcagaaaatatacttgcgcatcttcttcttttccttgtatcgcataacagcatcatttcgattggctgactggagagaagcatcctggcttggaggacaccatggaggttcccccaagagaagcattgaagaagctccacaatcctgataatctccagcagtcgtttccccatttgggcctgaaaatgaaaggcttgactgctgcctagcgaagcaaagaagtggttctgttttagtactcattgcagaatcagcagatgcggcattgctgcatgctggcattgcatttacctgtccaactgatccctgaagcaacatatcattaattaaccagttaatttcaaaagcatgcattagaaacattatacaattattgatcatttcaagtcaaaagtgcttcagtttgaccatcatccaagacacaacatgcataaaagagttgatcagtcttttaggctatcacattcacatgcatgaaaatatagtggtcaattggcccaaccattgtgatgggaccagaataactgaaagaaacaacaaacataaggccccaattgtaagagccagactagatatcaaagtttccttttaattaatctcttacaaacattatagattgctcaacacaaagccatgaagaccctgttgtagttccattgatgaatataaaataccatataaacaatgaaatgtaaactaaacaagtctgttatggaaaaggagaacaagggtagtgaatttgagataaaattacctcagcagcaactgcactctgacaattggagtcggcaccagacatttcagttgcttcgaataagctatcaatacctccattctcaaaaagctcttctgagttatttagagctaccccaaatagctcctcgtagttttcaaaattcaggtccacctcatccatgtctaaatccgcataaagatcatcatttgcactaagagcagggcctttgattccaggaaagcttaactgtaaactattgatattaagcttgtgcatttcataatgaaaaacaaatgatacagacatacttaaacacagaaacaaacccttacgttttcctattcaagaaaaaagatagaaagccgtaacacaaagaaatccacccgcctacactacaagtaagaacttcaaagaatttaacagtaactgggctacacaaaagtaatactactacagtgcaccaaatttgtttaccaaatgttgtggcattatctgataaaacactgcaagtaatgacactagtagtacttgataatgcgatgcaagaaaaatgtaatagcaagaaattattttaagattagcaaatcagactactcagactataattaacaagtttagcaagaaaatttgcctttgtgctgaagactacctaaacataacaaagtctgcatttgataagatgcaaggttaaaattagttcatgaactggaaaaaagagcgactgaccaagattctgaagaactggtctcaccttaataatttagatgggcaatacaggccccaagaagaagaaaaaacatagtcaaaacattatatagtacaaagtgagaaagtcaagtgcaaaaactgcctcttacctcagcagaaataagataccggtccatgtatcccattccacactagcagtacttctgggttgaatttaactgatttttagtcctttgaaaatcaattcaacctagacttttttaaaaaataaaacaacctagactctcagcaaacaaatagttggatagttgtaataagagggtaatacatgtgatttccattaatgtatgggcatatattagcagtcaccaacaaacaatgctagacctatatatcaagaggaatgacagaaagaacaatctgtgattttcgctaatttatcttttccagagaagtttaatttagatcaaacctctaaggtacgcaatatattgaatacaattaggaaagccaaaatctaatataggacaatgattacaacttaatataataaataaactaaaacaattaatatgtagct

SEQ ID NO: 43538 - DNA, 1009 bp, Cannabis sativa
tttcaaataacatagaaaaaaactagcataaagtttaatatacgtgactcgcacgtagatttttgctagtatatatatatatatgaatattactactccataaccattccattgtccatttcaaaattattactttctttttttgagtaaagatatatatcatagatctcttacagtacaagtacacctacttataacatattcagttcttgtttattattttatttactatatcaaaaaaatcagatattctcaatctcaaacaaaaaaataataggtcaatgcttcataattttatgtttatttattttttttgtttgaaacaatttttatgtttaatttgaaagtgataaaatgttctaatattatcagatttaaagccctccagtaatttttttttttatttattgaaaataataattgaaaaaactaaccattttcatgcactacaacatttatagtttatattacattcaattatgggcatgacccattaattcttgaaaaatttacataaattattattttttgtaaattttttacaattttttgtttaattttttttttaatatttttaaggtatttataaaagcaaaaaaaaaaaaaaaactatataaaaagaaaaataacatccaaacaacataaaaaaaaaatacatacaaacaacaaaaaaatcaacaataaactacaacataaaaatacattaaaagttcatattttatataaataaaatttaaaaaattataaaatattaaaatttggtataacaatatttttatattattttcgttgcttttgtatatattttttaataatcccttttataaaagtgtaagttagaaaataatcatttatgggcctgacccattaattctatttcttctttgtacgtacaaaaataatcaattatgggcctaacccattaattctatttcttctttgtacctataagaggaaattacattttatatcttttttatattgtcctcttttatttttaccctctttt

SEQ ID NO: 43539 - DNA, 1696 bp, Cannabis sativa
  modified_base (1625)..(1631): a, c, t, g, unknown or other
ttctttcattatgtaacttgggttacctttcataaaaggtctcctgtattgttgagcttgttgggataattatttgtctccatggagctgcaaagatttcacatagagctcaagctcttgtatccattactagcaaatggcatgctttggttacatgcaactctagtgataatccttctcaagttgacatttcagtcaccaatggcactaacaatgaggctgatattaccggaggatcaatacccgtaacctattcggaaaatgatctggaatctgtagactttgtaccagtgcctacaaatgctcaacttgcttcatccttgtccttgtaccacaagagacaagctttcggttagtagactcgggtttaagaatgttaatgaagttgttagtgtttagaattagttgcataggtacttttgcttgaaatttactgaaacatggtgttgatttgttttgacagttacttatatggagtcgaatctcgggggagctagcgtatttggatggagaattgatcggacactggtgaataccatcttctttattgagctttctcttgttctttttgtactagggaaaaccataactttcactactaaatgagtttgttacttttgagtaaaggactgacctttttcactgcaaaaatgtacattttagcatgtttttgcaaccaaagtgtaagatacaaaaacttaatatagcttgcacaattttatttaattattattgtaggtataatacctcaaatctataaatattagtaatatatatatttttagataatatatatatatatatatttgaataaattaatattaaatatatatattttgaaaatgaatattagaaatatttcaagtgcatgaaatatgcagctttccattttaaaaataaatatcacattctaacatgaatcatggatgtgattatttggtactttaaagtgtcaaatgctaaattgatgtagtgtcgtaagtaagtggtagaattgattagcagttctttatattatttattaaatgaaaatgaatgagtttctatattaaaatgtaccaataatagtacgccactttttatattatttattaataattgattagcgggtgttttttttacattggaaaaaaggattcgaacttggaacttcactagactaaatctatgaccacaatattatggataacctcaacacaaaatttcatttgtccctcaattttcaagtgttacactactttgcaagcaaacccaataaccataacaaacggccccttataattgaacgagtattcaagttcgtctgcactcttcgtcccaataaatgctttatttgtttgttaatttgatttttattgctgaattaggactaaataaaataaagtttgttcgttaagaagtgcgattgaaatggtatcgctatttggtcaagttattcaagaatgtaagaccttgttgtctgagttgaaaactgttattgttttatttgttaaacgatcagcaaatatggtagctcataactgtactcgagcttttatattttttcctggttgtactttcgatatggaatttgttccattcgatttgctaccgtctttggtagcggactttgatggttaataaannnnnnntttccattcaaaaaaaaaataaaatttgttaattctctcattaattgtgtaagttagattgtaac

SEQ ID NO: 43540 - DNA, 1272 bp, Cannabis sativa
aatttccagctacaagattagttgacgaattcttaccatcaacatttagtatgaattattgaagttgttttaccaaaattaatagattcaacactaaattatttaaagatgtacacaaaaataggacaaccttcagaaatggttttaataagttccatttaccaatataaaataattggattggagctatttataaacttggggactgtagccctcccttccaaaataaaatcatatatatttttatatacattctcacatgtaaaaagaaaataataactactctatctatttattaatatttctttaataattttccaactcctcccttagtcaatgattgtacttcgttttatagcttcaatcatattattgaatagttaaattaatccttaattttctatttaaattcacatatattggtagtatagtatgcttttcccataagcaatcatataatggggaacatgaattttataaatttttagcatgaagctaatatggtccatattgtcaaaagttgacatttaattattctatagcttttcatataaaaatacatatatatttaaattagttaatcttagactcttagtcaaagtatatagtagctctttcaaattaataatagattccaaactatattactgtgtgtaatgggagctaagctcgaaaaaaaaaagagagatgaaaagcaatgaacatgtgccatggtttaagagcagcacatatagaagatgcttcttaaatgtatattccaaaaagaaaaatataaagaaataaggagcattttaatattattattattcaaatcgagtatataattaaagtggcagagatgagcagtaccactgttttactaataatagttaaagatgattaattacatatatcaagtgatttaattttcgataattttcagatatgtaatattaattaattacaaaattaggtggaaggcacatgcaaatttaacagtctttctataaacatctcatatttaaatttgtggtctgaatttgtgcgcacactactatacagaataaatatatgagtgaatatttaatagttttattaaaaattaaaaatataatgattatagttacattttttcataacttgctataataaattattaacaagtaaaatttttacttttagatttaaaataattatatattaaaaaaattaatatttataattttttatttaagaaaataaataaaattatgttagtatcaagttataaatttatgggtaaataccattttg

SEQ ID NO: 43541 - DNA, 4775 bp, Cannabis sativa
accataaacaaaaaccaaacctttaatggtgaagatagtggaaacccatctcttataaatgaagagcaacctagtggactctccatggtgtgtgtcagacaagagaagcttacagggtcttattccactgctcattgcatttaaataacaatcacaaaaaaatggtaataagatggagttgtctctttgcccattacagaaaaaagtaagcttagctagttaaatttactgacttggcgtgcattatggcattgtggcacaaagcaagtgtccgaatcatagctaattctcttcccctattcccatacctctcttggcaacgtctactcctcaaagtaacattatgagcaccaatgagtttgagttgagttgttaccaattcaatataatgaaatgaaatgaaagaagaagagtacccttttacctgtcctcaaagaaatctccaaaatcatcaacaataattgtgtcaggaaatgtctcatgcaggtgaaatgcagcaaagtagttcttaatagcttcatcattatccacatacctgaaaaatctataattaatcccaacaaacccattttgttattcttaatcttagtgttatagttttagtttttctagtatagtatatatacacatatatataaaggagcctcgcttacttcatctgaatccgttgaaaggcattagaagaaggatcaataccctgaaagttaaagttagacaaaaaaactcataagaattgaatgtaagatgtaaatgaacaaggaaaggatagaaagggaaaggtagttacttgggagagaaaagggggtttggtttgtaacttgtggcgattgcaaatgaagacgactttttcattggtaaagttggtggcattgaatgcaaactggaatagaagagaagtctttccactgcaaattattcaccataccataccataaaactcaacacaattcaagtcaaaaatagaataaaaaagtaatgaaatgaaaaggtatgtagggacctagaaggagggcctgagagaaggtgcatagtattattagttatagattgagtttgagtgtggaggtccatttgcctctttgtctctgaggagattaagaagaagctctccaccatagcttcagctgcagcagggtctcgctctcagtctcagtctcagtctcagaccatcaccagtcaccctcttcttcttttagcaggccaggcctagcaattcaactcttgtcttctcttttaaggtccattctgtagtgggatttagatcccccaactgaggaaattacactacccaactcaactcaggccactaatttggcccaacttgaactatttctgattcattcggatgcctctataatttaacacctaactaaatatttaattctcagcataataataataataactaaatatttatttaaaagaataattttgtaatctaagtaatctatatttctttctttttttttttttaaacaaaagtaatctatatttcttaactataaactaattaataattgagacaaataatttttttttttcccaagtgaacatgtatataaattggccaagtcattgagtaatttttcgtaaaaaggaaaaggaaaaaccggtctcagtttatttctattattttaactttcagtgagaaaataataagatatcccgggctcctttgtattatacaatatttttatgtaaaactatatgtggtattaatttttatggacacttaaatatataataatttagtataaattaaagtttaacatagtattatataaaaatatgatatataatctaattcaatataatacaatacaatacgacttaatacaagccctaaataattattttaacagtctcagttgaaataaaatattactaaatgttttattgacctgctactcaaaaattaaagatatgaaacacaataatattcaatagatgtatacaataatttaatttttaaatttggttatattaaatcaaattttattattatgttaaaatactagcattagagtaaagtgtaatatgcatattaaatttatatctgtcatggtcacactgtctattacaagaggccaacagcacaaccaataactttttgcaatgtttcaacttggatcggaatgaatgataaaccttaacataaagaagaaaggtatttaatattagtattggtattagttgaccaacacgtcacaaaggtcatctgccaaggacccattatcttctgttactttaccactctcaaagaaagtctggtgaagggcctcaatacatctttcagcttcactatcatttacaatcaatgatatgttcacctgcttagtagtagtagtagtacataaaaaaaaaataaccatatgatcattccaaaaaaaaaatatagatagatagatgaaaacaaaaaccaattatgacaaaacacaccttggatgccccttgtgagatcatttgaacattgatatcatgtgtcctaagaacatgaaatgcctgtaacaaagtatgtacttattgttattgggataaaataattagtgatagttttctctaattccctgacccaaaaagaaatgccatgaccttctcaagaatcaatgaagaacgctgaacattcccgataagagagatgattgatctatgctgcaaaagtttcacgcgtgcaattttctcaagctcttcctctacattgtcaagttcctgcatgagaaggtaacactttatttgatccattgaaataaacaatctgaggacaggtttatgtgcactagatcggaaaacatcatatgcttgcctgctggattagatctctgctccagagctttgcaggatccaatgtcaaagataaactaacttcactagtagcaacaacatctacggaaatgcccaaatcctcgaagattgagaaaacctgtaaacaccatgcaaattgcagttaaatcaccagaataaggcatcatagaagcaatgtaaaaatatcttattctcacctttgcaaggaacccaacttgaccaagcatgcgtgtactcacaatatcgagcatcgtaacattacgtttcaaaactatgctggttagaacagcctgaaattttttatttaagaaaaaaaataaataatcaactacattttaaagttatccaaatgcgccactttgaacgctgacagcaaattcagccaccacaaacctctgtcatatctctggttttagtgatgagcgtgccaggagcttttggattgtacgaatttttgaccctaacaggaatatcaccttctctggctggtctcattgattggggatgtaaaacctgcacattcatagtaagaagtggcttagtcaatagtcagtcaagagtagcccttgttttcttctattaattccattccctcaaaaactttagttaatcaatgtgttatttcattccaatattacagccaattcaagttaaatagaaaacatgaaaaggggaagaaaaaaaaaagagtagcgttaaacagcagcatataccaacctgagcaccaaagtatgcaagttcagcagcttcatcaaaagtcaaaacaggcacaggctttgcactaggataaatgctcggatcgcaggtcaaaacaccatcaacatccttccacacctattaaaaaatgtgaactacgctggtagtttgttcatttatcaatattgcaaaacaatgttagcataaaaatgccacaaattaaaagaacggataacttgtatatagattccccggtatgtatttcccaatcttagcaccatccaaagaatagaagatataaatctaatagaccttacaaaaatgccagcaataaacaatgcgtatcggttctactctaacctgaatttctcttaagccaagagctttaccaatagtagtggctgacaaatcgctaccgcccctacccaaggtagtaactgcacaagatttccaaccctacagtaaaaacatacgatccattttatgatcccagatagtaaattataaacaagtgtagtgcaattgaattatgaaccaagtctaagctagacaaacagatgtagcagctaccaacctttccaaggaagccagtaacaactggaattgcaggatcagcaatccaatcatcatgtaaccttttagccacagcagggtaagttgcttctaatatatctgcatttgtgaagtcgtctgtagttatgaaaccaatgtcaaatgcatcatactgcaaaacacaaacaaaccacaagggcaatggccattttagagttagcttgggccaaatataattagttcatcgaataactccttaacttaattgcattttcttcaaattatttacacaaatgaatatgaccacttaaggattcataaatcaaaaagtacatacttggcgagcttttacaccaatcttattgagataagctgcaaatattcttgtggacatgcattcaccaaaagaaactaaataatctctggtgcgaagagttaactctttcatcatagctattcctttcaaaagttgctccagctcttccaaatgttctgcaaacaagtatttataattccaagattcatttacaaagtaaagcaaccttatagatgaaaggtgagaatataaatgttcgtatataaaatggaacacaagtagcaatagcattataaatgtgaacctcaccagagataacagagcgatctactccaagctcatcaacagtcctgaatagaagaaagaaaaggagggttctacagcttaaatcactatctatacataataa

SEQ ID NO: 43542 - DNA, 1248 bp, Cannabis sativa
aatcaagaccaccaatcctctccgtccattattaattccttccaagtgttccaactgtacgacccttcatttacattggctttggctcatcctcgacctcgagctgccatgctatagtcgagtcggacctacctcccccgagcatggtgtgtgaattgaaagagaggggccaccactcacgagaatcacccgtggcccagacattttcctatgaaagaaaaagtgtgctgaatttgtactatgttcatgttttaattggttgtttctcgttttttccgaaatgttttattataattttgttttattataaattttaattgggttttcgtcgtcgtcatctcctccatgagtgtgagccaaaataaaatatatatataaaaaaattaaaaagctggggccatataccgaacttgaaggaaaaaaataaaaatgtagtagatacctgtggtcctcagtcatcacttactctcactttctttctttttcccactttatattcttctctcacctacggttccaccacatcccaactcatgaaaatctctatttttttaaaaataaataaatttccactgtgcttatttatttagtgttctgttctgttagccttgacttttgttgggtctttaatggaattgggtaaaattgagaggaacaagaggatgacggtgagtgggaaagagaagatggtggtgaagagagaggatgaagatgaagatgagagttctgagcaagaggataagagaaagaaaggacttttggttttgggtgttggtgttggttctgggaaaaaaggctcgagtggtgctggaatgaggtgttgtcaggctgagaagtgttcggctgatttgagtgatgctaaacagtaccatagaaggcataaggtctgtgagattcatgctaaggctcaagttgtgcttgtcagcggtattaggcaaaggttttgccagcaatgtagcaggttgggaacctcacattacttttatccttttttttttttttctagtcaatcattactcaattggatggtttgtttggtacgctatgccttacctgtttgttgttctacctttgactgtttatgccttaattgcataattttgaatggttgcttcttgtggggttgagttaaactttctgtagcaggacttagttaatgaactttttgaggtgttattcaatcgatgatcaacattgtaagaaaggatcatggttggttttgaatgattttaaatcttttaatggcct

SEQ ID NO: 43543 - DNA, 1824 bp, Cannabis sativa
  modified_base (1760)..(1761): a, c, t, g, unknown or other
tccatgcataaatcaagaatcgaaagaacaaattattcacatgatgaaattggattggaatggaatggaagggtacaaaccatgccatcctccacctcgtcgggtccggcagatgtggaacctaacctggctctctgcatagctttgtaggcttgatttttccccattaccgcagcaatcagcgattcagatacaccggaagaagacgaagaagaagaaaaccaaaaggaaaataattaataattaaaaattggaattgcgatccaattggaagcttgaagtttctcttcttctcttatctctattatccctccctccgctcttcgtttcgtttcgattcgatttgggattttgttctgttaagaaagactgcgaccaacctcgccttcatcacgtgtacgcttcttattggacccgcttcccctcctaatcggcccattaatgctattccccacagcccaacactgatgggctttcaattgaaggcccattcataaccgcgggcttaaattagagaagcaaaacgtaaagaggtcttttacacctgtgccagtgccagtgctacttaatcatgttttttcaataagagcactgctattagggcatctaatagatacacccaaaaagagtgcccattaataacaactaattagcttttattattatttagttttattattaggtgctaattattagtgtcaattcaactatatagacacaaaattgtttttctttctctttcacctcatctcatttgggtatgacaaacattttgtgataacatatttaacaccatataaatatttggtgttgtaatttagaagttttttatgttatttattatatgtatcctttaattttttttctttttaatacgttcgatatggaccttgtttgtttgtttatttaactaaagataattttcttttcaaaaaaataaagaaaaaaagctaaagaaggtaattttgaagtaaaaaaaaaacaaaaaacaaagaccgtcaaaataataataggcttttagtaaacaatttatttatgatatggtaattatatatgcaaattatagtccctttagtttgttgttttgtggttgtatagtagagtatttttatttagtgatgtatgtaggaagaggagattaatgttatgatgcaggcaaaagataaaagttggttttatatatatggatggattatatttaattttatggaatgaatgaatgaagtgcaagaatatttagagattcacaatatgtatgtatcataatttaacatatttcatttcatgtagtgatatagtcttgtgttgaacattccttccaatgttgtcgtctcatctattattatttattgctcattattacataataattaatattttttagatatctgtctgtctgaccatttatttgtatattggagtttcgaggaggagcaatgagttatgagatattattttgtttgtcattgtgattgtgaataataatctgcatttttcatttcccacctattatgatatgaaaatcatattgatatttcaataattgtattattatttgattcatccacaatgtttcttttaattatttatctccatcgtcccataataaaatactcttactcatctatatatatatatacatagaaagagatttgaaattcaaatttgaaagacaaacaacatgaaatcattttatttagtagaaagagagagggttgggtttaactttaacacaagggaaataataataataataatannaataataataataataatatggtgaaagtgagaggcatgaatcgatcaggtatattatatatt

SEQ ID NO: 43544 - DNA, 3212 bp, Cannabis sativa
  modified_base (43)..(51): a, c, t, g, unknown or other
ttagatctatagttatacacttataattatatgtaatatgttnnnnnnnnnaattgaattttgttgttgcatattttatgagtgatatagaaactaacagtggtcactaattttgtgtttcttcaataaaagtttcacttagcaaaaaaaagaaaaaaaaagaaaaaaaaaaaaaaaacatttcacgtggagcaacgttatactcgatacaaccatttcagtgtggagccacgactatttaaattgattctttcttcctaataagctccaattgtactgtagaattttcaaaaaagtattcttttatatatttaaatgtattattgtcaattcttctactttaataatttatgtgattaatcattcaaaaaataatttatgtgattaaaaagattatacttatttgtacaaatgactggacaattacagcacggaagtgagatctccaatagctggagaaatatatttgtatgagaaaacataaataaagaagctatttaatctccatcaaaatctgcattaaagaccttacaaactaatggatgtaaattaatagtatgtccaactaaaattggttggaacacctatatgtctaatctataggtaatgtttcgtgatagtgatcaatccatagttacctagagagtagattttccaccatcattgaccgattcctccaaatgcttcttctatgctttttcttcccaactggtccctcttctatgggacaaaatagatatttcttacagtagaggatagagatccctcgcatctataccaactaaaaaatttcaaagtgccaattcttctattcttaactttaaatttaatatttttactcttcaaggatagtaaaacacataagaaaacaaagacaaataactttataccaaccacacataatatactaaactatacaacttagtttattgcagtgcttttttgactcttgccactcacatattgatgacttttcttctgagatgtcgatgaagctcatgctaatcttttcctgacctgatatttttgaaacaaatttatataaaattagataatatctaacaatacatatgctccgtgcataggcttgtattgattttcatccaataaggtgtatcgtttgtttttttttttcaattgatgtgtgacaagatacaagaaacacatcaattattgggatcatttattagtcaaatgaagttatttccaattatttatttgctaagaatagtcaaaaagaaagttattttctcttatattgtggaattttataccttatttgactagatagttagtggtctatagctatactctagcttttttatcacaactccttgatgattgaaaaatacatataaacaagggcaatttcattattaacaagcaattgtacaagttacaacataagaaaggcatcagttgacactaaattaataaatttggaattattttccatggcttttgaagaaaaagagcttcattttctggtgtttcctttaatggggccaggccatatgaacccaatggtagacatagcaagaaagttggctcaacgtggtgcgatcatctccataatcaccacaccacataacgcaactcgtttcgaaaaaattatagcaagggacagagaaaatgggctcagaatcaacatattccagctcaagtttccatgtgaagaagtgggattacctcaagggtgtgagaattttgatttgcttccttcacttggtttagctacaaaactcttctctgcagcttctatgctgcaaaagcctgctgagactttgatagaagggctgacaccgcagccgaattgcgtgatatctgacacttgtttgccttggacactcaaaatagctcgaaagcttaacattccaaggataactttcagtggaggaagtgggtttttcttgttttgtatgtacaagttagcagtttttaaggttcttgagaatgttaagtcagacaccgagttctgtgttgtccctgacttgcctcaccatattgaggtaatgaaagagcagctacaaggaccaagagcttcaactatgatagaacttaatgaacaaattgtagaagccgatatggggtcttatggagttatcatcaatagttttgaagagctggagccagagtatgtcaaagagtacaagaatgtaagaaaagtttggtttgttggcccagcttccttaagcaacaaagatgatttagataaggctcaaagaggtaattacaactcttctcttgatgaataccagtgccttaaatggcttgattcatggaaatcatgctccgtcatttatgtttgtttgggtagcatgtgtaatttaacacctccacagttgatagagcttggcttaggcttggaagcttcaaacaaaccattcatttgggttatagggggatcaaggagtaatagatctgacgaaatagaaaaatggtttaaggaatatgaattcgaagaaaggattaaagaaagaggtgtggtgatccgaggctgggctccacaagtactaatcctatcacaccctgcaattggagcgttcttaactcattgtggatggaattcaaccctcgaagcagtatgcgccggggttcccatggttacatggccactgtttgcagaccagtttctgaatgagaaactggctgcacaagttttgaacatagctgtaacattgggttcggagtatccaatggtatggggagaagaggatcaagttgttgtaacagtgaagagtgagacaattaaggctgctatagagaaagtgctggatgaaggagaggaaagcaaggagagaagggaaagagttagaaagcttggggagatggctaagagagctgttgatgaaggtgggtcttcacaccacaatatgacattgtttttagaagatattgaacgaatgggaggcagtaatgagtataaagagtaagaaaagaaaaagaaaataatattttcttgtttatttggaagtcatttgtaataatatgttcatcgttttatttaaattgcccaaatcattgcttttcctggagtattttgattagattaactaaacatgctaccaaaatgtatactcctatagcccctatccctataaataaaatttcattttaatggtgcagaactgcgttgcaaaaaaattgatatcaccacagaagaagcatctatgtccaaattgtatagattgtgcaccgtaaaagagtgctaa

SEQ ID NO: 43545 - DNA, 1929 bp, Cannabis sativa
  modified_base (27)..(36): a, c, t, g, unknown or other
ccactgtaaggtttctaatactttatnnnnnnnnnnttcatatcattttagaagttcatatttaggatgttaataacatgttagtaaatttagatcctggtaaaataattccaacatgaagtccttgcttactcttagtctttcttagtgaaagtcgaaagttggctgccatgggattcgacatgatctttgcctaaaaaacccctacgctacttcaagatgatgacaatgtaagttaaattctttactaattcattcatatagtattttaaatgtgtgtctaatctaatagaatgagatgcattatgaatgaaaggaaaggcatgcagtaaagatggtatagtttactttaatgtggttttgagtatttttttatttttattgatgaattgatgctcgaacacttaaaggcctaattgttcatctttgtttttcaacagtcacaatttcacctgtcttttactttcaccatttaaatatttacaatacttgtctgctttagttaatagattggaaccttgattatttgggggtattttcgtttttcttatttagtgtatcattttttttgatgaattagtgaagttgtattgctcacaaacaagatttttacaaactaattgcacccctcaaaggccaagaataactatacaattatcatctatcaatatctatcaatcttactcttatttacaatcttttttacaacttttgagaccattctttgtctttttctttcacacgttttggccaacaaagtgaaatatgttgcttcactgtattcttgacttgttgaatcaaaagctctgaatgtacctgttcttggctccaaattttagcatttcgggctctccatagtatgtacactaaaccagtaatgcaggcagcataggtttgcttccggaacttgctcatttttgctcttcttatccacctaattaatctaggcatagcagtatcttgtatcatttttaacaagatataaaaattagaaaattaaatacactttttaaaaattctcacaggttgctaagtaattatttttattattatttgattcatatcttatatatctctttcagtattatattttaatttcttactttgtatgtgtctgatcttttctctatttgtagtgtataaaacacctttacaacatggttgacactctcactaataacttcagacaggtaaattttacacccacatttattttgcatacattttcttgccatctcataatagttttaagaatggattatataactatatttgctttgcatgtttttttttcttctcatctcataataattactttaattatataatattttaactcttttgaaaatttaggccacaaagcaatgacctgaaatacaaactaatacctcatattaaaaggggtcaaactaattggacagccaatcgtagttgaaaaaactcctccacgccaattcaaaaactctatcaaatatcagaatttgcttctaattgatccacaagtaaaaacctattaatatatttttattttagttaatgcctattaatatttattgacctatattatatatataatttttgtagggaacccatattgaagcaactatttatcaagctgatattcaagccctgcatcagacattgcacatgacaaaagcatacacaatttctaatgctaatgtcaaagattgcaaaatggactacaaaaaatatagagatctccaatgggtcataactggaaaaactaaaattaaagagcaccaagaaaattttgatgatctgttaatgtctacttacaactttgtgccttttagtaatgtacaacagtatattgatcttccatctaaaaaaaattagtaagtttccacacttagctcccttttttacaatattacacacttttactaattataattttggttcttctta

SEQ ID NO: 43546 - DNA, 2707 bp, Cannabis sativa
tttcaaaaaattggcatattttttatagtgtaaaatgtattggtttaaaaaacaaatttttaaatttaataagtatagaaaatcaaatttccccttatgaatttaactatgttttaaaatatatatatatatatataatataaaatgtagttatataacagaattcttgaaggtcagtattcatttagttagttaaacctaaatataattaatctacctaaaatgttgcaattaataataaatttgttcatattgtttattttttatcaaaaattattttcaaattttaatatttagaattagttaaattttaatattattttaaattaaatttgaatattttgatagtttaactagatgagtattttcattaatttcgaagataaatttaggacgagtaataatatttttttaattactattacaaagtataatagtaatttttttttttatttaaatcactattatactttcaaattttaatgattatcactatattgaatattattaattttaaaattataatattaaaaaaaactaaaaactaaaataaaattaacataggtgacttgtcacataacatctatatagtatatatacaaatctttaacacggtgtaattatgcttttacaagaaaatttacacaataatagactaaaaattaaaaaatatatatatatataaaaaatatatcaacacagaatttttttttttattatttttatgctttaaatttttttattgttgttgttctataatttatctatagttgtattatagatgtcataatataattttttttattgtttcttgttattttgtaattgatttatagttattgtgagattgatttttctttattttcttactttttgccgagacaagtatatttttgtaatttaaaatttatacgcgtatttttataaataaaaactttaagccgtaaaagtgtacacaaaacataaaaaaaatagtattttttgaaaattcttcatttaacgatatatggtatataaaacaactaacaatttattaaggtagcatttggtaatacttttgtttttaaattttttaatcacaaaaataaaagtaaaattttattttttaaaaacaaatgtgtgttttataaccagttttgctattcaattttaaaaataaaaaatgaaagtgtgttttgtaaatttcactttcatttgttgattttagaaaagtcaggtctgggtccaagtctaggttcgagtccggggtgacgtccaggtatgggcccggggctggggtctaggtctgagtccaaagccgggggtagggtccgagtcgggtccaaggtccagggtctgggtcggttttgaggtccgagtccaacgttcggttcgggtcaggtcaggtttgagtccaggtcgagatccgggttcgtgttctaaagtctaggttgggatcgaagtccaaaatattgataaaaaaactgtttaaaaaattttgaaaatgactttttattttgttttcaaaattttcaaaaatttaattctcaattaaaaaattaaaaagtaaatagctttatagaacataattttaaaaaatatttttacttttttaattttaaaaataaaaaaaaaaactaaataattaataattacaagataactgaacttatgataattgtggaccaaataaggctttaatcaatcaaaatcttataatctatcgtgcaccaccatctaataatgtttggttatggatgctattctcacccaggttaccacttgacaaataatgcctaactaacttaaactatatagttaaatcattctacctaatgagattgtgtattttgattcggattgaacataaatatatgtatgtctgccaccatagtagcaacataggctacagctttaacaaaggtgaattggatattctgataagaagatcaagagacattatcaactgaaatcaacttttagccaatgctattatgttaacaagagattattttataggattaagatttataaaaaattcaattatagtaacatgagaattatgtacctttcccagcttatgaagtgaacgctcagcacataaagagatgagaacaatgacaaagcagacaacagcaacaacccatgttggggtaaactctaatgagttactcagttgttcctcctccgccattagatttttttcaccccccaaattgatggatacagctcaatgtggcttgcccaacttcattataaagaggcatattaatgctgtttaaaacacaaaagaatcatatgaaaatggtaatacaactgttaaaaaaagcatatttctttgtgagggcaaagcatagcatattcctagatcataaaatggagagaacatgatgtggatgataattgtaagaaagaaactaaaatgagaatcatggtaatacacgctatttattttacagcataaaacatgacgagtaacatgatgaattcatttggcataccgtaccgtgttgtattgtattgtattagtattaatattatttaatagactacttatatttggtattgacttgtattaataggttatgtaaaattatactatctttactataaacccgactccaatcgcgatctcggcctagaccatgttttggaactgggctgggtttgagtgcaggctgggtccactttcgaattcggggttcgatgtccgggtcgagatcctagt

SEQ ID NO: 43547 - DNA, 3638 bp, Cannabis sativa
tggaggcttgaagcggggacgttacaaggagacatcatcctctatttcaagaaccttggaagtatcaagacaatatcccataaactactgaaagagcacgtaacacccaggttgacatatgacctagcgcattgggttctacttatccaattctacttctgccttgagcgtttgtctagtttttcatagtaaacaagagctatgagctcagacaagtcaagttcacaacttcatattttctcttttttggcaaaggaacttagtcacaaattgggtagtttccagtctcctaatttcgcgaaatagcaacatctttgagaattggtaaacgacttcttgaaaacagagaaattaactaagtggtgtcaaaataacacttaggcttcaaaaaatacatctccaacatgatttctcactcacaaagcatcaaggttgacgtcatatgttaagttgggcgcaggatgtcaacctagtgctgggatgtcaacctgggtgctggtattagagcagccttcaataaacagtcataactcactcaatattgatctgattgacacagtttaaattgtgttttaaagatatttgaatgctctatcaagttatgtcttacactcaaatcgaatttctaaaagttagtaagtcgaaattttgtcctcaagagagttacgaatttaagatacaacctatctaaggtgggtcccacggacgcgactcaatctccaaaaattgaagactaaccttcggagtcaatttcaccgttagatcatcatgaacaatcaaaaatagcctaaatttattttttttatatttttttagaatatttttattattattatgttaatagaacctctctctttaaaaattagagttttcaaacttagtcatttctcttataattctcgtgaaaaataaaaatttaaagtcgacgtaacttcattattattgcaatatgggaagtgaacttgtataaattctgtgtgtccctctatttactctacccatctctatttttatctcaccaaccttgcaagctagtattggccaatattattaagtacaccctaaaattttaagtatatttttatcctttagtaaaatcacagaaaaacttccatggagtcttgatcatctctcttcaatactattaattttgtttgatattcgagggtgtttttattaaaataattaaatgttttttttttaaaaataagatgggagtaaacttaattatggaatgtagttacatttttgtagggacaaatataagtctccttataataccttccattgatatttattacagtttttccctttggctatttaatgccaactatagctgtttagtgttagcgaagatccatgtatcatctctttattaaaacatgtgttaagtgattaattaattgcctaaaatatattttcaaaataattttttaagtgaagaaatacgtaaaagatgacatttaaaaattaaaaagcctcctaaacaaaaaaagaaaaagaaaactaagaaaatcatcttcggatctccatcttttctttcctttatctctttcccaatcatcatggatgatgagatgagcaggcagataaagaggacgagcatccaacaaggttggatgacaagtaacaacccattaactcgaaccttcagatctcacacctagttctaccttcaatggagatggatctctcatgttgttgatgaatttgaaggttgtcatggataaaaaagaagctcaacaattccatccatgaatttgtggattcgaagatcctctagaccggcctcaacatatttcgtaattacatattagtgcaattccattcaattttaaaatacaatttttgcattacacttttcttaaaattaagtatgttcttttatctaaaaaagattaaatatgttctcatataatgtcattttaatatctgtgttaataaataaactttgattttaaatgtagccataaattttcattttaaaaacaaattaatgaggttaacagataattatttaacatgtgtatattgagtaagaccaataataatttgatatgtagcataatcattcaaacattcttggatgttgtgaataagaaaattatttatggtataacaggatttggaacttgcaatcatgttaatgagaccattaccattgtttagcgacgaggacatgtccaaagagttaaccttgagcgaagacaaatatgggtcagttgatcgagtctatatcatatcagagaaagataaagtgatgaataaagatgtggaagcatggatgcttattaacaatcaacctaactatgttatcacaatcaatggctcagatcacatggtcatgatgtcgaagccaataagtctttggaatcaccttcaaaacattacaaacaagtacaactgattagaaaactcaacaactattgtgagcttcagttggtttttttttcttttagaaaaaaataataaaattaagaatgttatcatctccattgcaataataacgaaaaaatggaaatcttttatatgacagactttataaccagagctgtctcaaggtgttaaacctatgaccaaatttgaaatgaagtttttttcttttacaaaaatttaaaataaatattattaaaaaattctataatgcacactcttaaaaggtacccttaaaatcaccttttattatttaaattttgagaccatatcaattttaatttttttattttcatataacaaataattttactcgcaacataaattaactcgataaagtaatgtttaattatatatattttagcataaaaaaataataaataataaataataatagtatgtgaaaaatgtaagaaataatggtgaatctgctcgtgagttagcttgccttggtggcactgccagagtgtccattctgtctagaacattcccaggccgttaggatttttgttatgccttggattatgagaaatcgttagcattattttttgcaatattctttttgtctaatgcttacacttggtaattgtataatccttctaatgctataaaatatcaatacagccgctcatgctcattgaactgagatttcattctttctgccatgttttccttttttttttatggttttttcttcacttggtataagagcataaaaggccaacaccatggcaacagaagaatctcaaactcctggaagggccatcgatcaagggacactagtggttaattgtaaagagacatagttttaacttgaaaattagtagataattagggtttaattatgaaattagaatattatttatgatttattaatttatggagatttatttgaatttagggtgtattgtttatgatatatatgaaattttatgtttatgcatgttttgtgcccgttaatattggaatgcggtgtttggccagtaaaatcatattttagtattttagtagtcgcgggacaatacagttagacattgaattagtcgagattttaaaattgaccaaattacccctaggaggttttgagactttttggtttaagtgggggcaaaataatctttggcctaaattaaagttttgtcttccagtggcttttagttagtaaattaatatgattttatttgattaattaggttgaataacat

SEQ ID NO: 43548 - DNA, 2827 bp, Cannabis sativa
gtgtttggaagagaatgttgtggtgggcactgctctgattgatatgtattgcaaatgtgggaaagcggagatggcaaggaagactcttgattgcatgaaggtgaagaatgttaaatcatggacagccatgattaatggttatggtatgcatggacgtgcaagagaagctttggaagtcttttacaagatgattaagaatggagccaaaccaaattacataacctttgtatcagttctagctgcttgtagccatgctggtctagtagaagaaggctggcgttggtttcattcaatgaagcatgaattcagcatagaacctggggttgagcactatggttgcatggttgatcttcttgggcgagctggctatctcaagaaggcttatgatttgataaatgagatgaaagtaaggcctgattttgtagtctggggttcccttcttggatcttgtagaatacacaagaatgttgagcttggggagatttctgctagaaaattgtttgagttagatccaaataattgcgggtactatgttttgctgtcaaatatatatgctgatgctggtaggtgggaagatgttgagaggatgagagtactaatgaagaatcagggacttgttaaaccacctggattcagtttggttgaactgaaaggaagagttcatgtatttttggttggagatagagagcatcctcaacaccagcagatttatgagtattgggaagaactgattgtgaagctgcaagaagctggctacaaacccaatatcgcatcagttgttcacgatgttgatgaggaagagaaggaaatgaccttaaaaatccatagtgagaagttggctgttgtctttggaatcatgaattctattcctgggacaacaatccagatcataaagaatttgagggtctgcggggactgtcacaccgtacttaagttgatatccaaagttgttgatcgagaaatagttgtcagagatttaaagcgattccatcattttagtggtggtctctgttcttgtggagattattggtgattttgcagcttcaagaatcaaaatgttctttctacacaattgagtagatttctcaaataaaaaggaaaattctcattaattaagtatactaacaaacaaatgaacaaagacaacacatgaaactctcttgcatctgtaacttaaagaatatgcacagaaagattatatcctcttatatatatttatatatatagaataaagttctcaacacagattagcatgatcaacatttggaaagcgaaacttaagaccagcctaatgagatgcccaaaacgtgagagaaggaacccccaagtggtttgacttcgacgattatattcaatgaatgaatctaaggagactaattggtctatgtaactgaagtactttaaattctatttttcatttttaaacctggagcgttgcgcttgggttgaatggtatgtatgtataatggctggatagtaatgcagaagaataaaaatgattgtgattacagttcacctttctcacgtcttcatcatctatcttctgattctttctcattttattctctttttctcttgtttcctattactgtatcagttgttttgtagtattatcttgcaggtgcatacaaaacaagagatgaattccgatttcattgcgaaaggctcgtaccattcatcgaataaaagaatctccctaccactcattcacaccataatcacaattcaaattaaactgaagtacatataccaagttatataatttgatacaaagaagtcaatcagttgataatcgtcgtttaacatgatatatattattaacagttgtgagtgattatgaagtttttaagtctgtcaccaaaaatcttggtcccaatgttttgtcttacacggtcaggcaccaagcctttctcaatcatttctttactaaacttgagagcaatatctgttttttcactcttcatatagccttcgaccaaggtgcaataagaatcaaaatctggcagaacaccttttgaaaccatttgttgaaatatctcttcggccttgtctacttctcctagcaaacaatatcctttaatcattgtattataaatcatggtatcaggctcttccccatgttgaatgatttcctcaaatatattttgagccttgtccatcattcctctttttgagtaagcctctacgagtatagtgaaagttataatattgggatagatattctctctcaccatgttctcatacaccctagcaatttcttcatagtcacctgaatgactcaacccacaaagtaaagaactgtaagtgataatatttggtctaacttcccactgagtcattagatcaagcacgttgaaagcatccttcatctttttatttctgcaaaaagcatctatgagaatattgaatgtcacaagatcaggtgaaaccttttgttccttcatttgagctaacaacatgaaaacttccccccattcacctgaatgacacaacccatacaataaagaactgtaattaaagacattaggctttagacctctattagtcatttttcccatgagggcaaatgcttcctttgtttttcctttcttagaaagggcagtaatgagagaattatatatgacaacattaggttctacaccttctttagtcatagattcatacaatgaaattgctttctgaattttctcttctttgcaaagagaatcaatcactataccataagtatatacatctggtgaaattccagaaccaatcatgtttgtgaggactccattggcttcaacccaatcaccaaatttgcataatccattaatcaacgaattat

SEQ ID NO: 43549 - DNA, 1778 bp, Cannabis sativa
tccattttcattatgttatgcttatatgccccatatataaaaatttgatgaggaaataaaaaacctctagtgctcttctttaaacataaagacaaatactctctgtacttacataacaattgttataattatttgggtctcaaatatagttagattaggccgtcgagatcctaattgtaaaaaagacaaatgtaagtcctatatagctagctagacacccgcctcgaccctgggcgtagggcccacctacttcagagattcaaaaaaattattcttttaaaattataaatgatttttaactaattttgaaaaatatcatactaatttctaaataagagtctaattttttttcgtatgacccactaaattttttaagtttggccttagctacacataacttattatgttgttatcaaaatcttgaatttattgactttgatcttcttgtgaaagactttcatgaggctttaaacatgttgatgtaacaattaaggtttggttaggcacgtcaatcactattaaaattgcctaattttagaaaaatattacttttttctataagcatggctatggggtactagtggtgcttaacacgtctagatatgtcaccttgcgacctaatagttattacattaaattatataagacctgatacttagttagactaatagcgatattaaaatttctctttttcgcttcaaaattttaaaaattactatttgatagtgattgaggtgcctactattagctaaagacgagctaggtctgtgtcctaggcctagagcccacaattaacaaaaacaacaaatatttagcttattgttttctatataaaaaagtctcaaaattttacaaaaataccatcatatatataaaatattacaaaaataccaaaattctccttggaacccgaacgctatcgctcgcgggtcggatctacgtacggtatccacattacattgttgatcttgatgattactacatactcatgcatgtctttggccaaaaaggagtataagtatacatgcatgtgtgttgtatgtatgttacacaatttgtggtaaaagtgttaattatcaaaaataaaaaggctgtcctagtgtggaacataaatccctagaagtgatatcattgttgcttttcaatggtggttgcatgagaaaaatgattggggtcccctatataaatatatatatatattataaattctatatggctatatctataaattattgctcacgcatgcttctaccctattttctttatgtgtttgtggtttgttgttaaggttctctatggactatgatcattctcatgcatgtttcaatttgttcatttcttcactttttgttacttagtcaaaagaaaactatttttgtggaagtttgtaggttgcttgagaagtttacttctagtcaatagagaaatgaatcttatatcattattatttattcaaaatctctatcattttgatgaattgaagtttgttgtcattcataccaacccttcttatatataagagggaattatttagaaaattacactatatatttattttttattttttattttaatttttatcttttttatttattactctttaatttatatccagtttatatctttaattattatgtgcgttagagactctaattttaataagttatgtgagattacatttagtactttgattataaaagagagtatttatcaattaaaattattttgcagttatatttgattaatatgcaataaaaaaatgataatttttaacttat

SEQ ID NO: 43550 - DNA, 2838 bp, Cannabis sativa
agtaagtcagtatgtatgatcacaacaaaactcaattacaaactagagccaatctcaaaaagaaacaattaattacaaatttttatgagtaatcctacccacttttgatttacactattaaaactttgtacattcatatattgtaatttaaaataaatcgaatgaataatattttgtacaattacatatataaattgctggaaatttttgctcccacaaaataatatttctatttttctaaataaaatatactactgcagttataatgcacttgataatgcaatattatattaacttatatatattaatctttttttagctacaaatttctagtaagattgcgtctcttcatcaaaaatattaattaaaaagctcacacttttatttaattaaactattgttaaactcatcaataataattaattgaaatacacgagggacaacaacttattcactcctatagtcctttaaataaagaaataattaatattaccaataatttagaatgatgcaaatcagtttcaaatatttacattgtaattaataaatgcatgaaaaattgaaaattatatatgtggaggatatgacacactatatagtatatacagtacttcttctttttttttaattaataaatggtagttggtataataaatgtgtggttgtacttttttcctaatatctatatatacataatgggaatttattgttagtgcggattttaagatacgatttcttgttccaaacttcaaaatgcttcctcctgcatgtccaatattatcttttatctctacagtactagtatttacgtacggaccaaataattatgatcaatggttaacattcaacagccatgccagttggatgccttaccgtacaacagacttaatttctttcacactctcccctccccctcccccaaacttggaatttggtgcgcatcaagaccaagtttgtgacaaaacacagcaaagcgagaactcaagataggcttagtaaaagagacatggtgaacacaaaccagctgttgagagattttttctctaacaaaatacaaatccaactcaatgtacttagtcctagcatggagcacaagattagcagttaataggactgtactaagattatcacaccatagtgtgggaggtctgggcagtcgtattcgcaactatgaaaacagagaatgtaaccatgtaagttcggtgactgcttgagcaacactggtattcagcttcagtactcgatcaagagaccgtgtgttgctttttacattgccaggcaatcaaacttgaaccgaagaaaatggaaaagcctgatgtgtagcttctatcgtctgggtcactgacccaatcagcatcactaaatgttgtgatttcaagatctgaaattggtttaaaggtcaatccacgagacacagtgccacttaaatatcgtaatatccttttaacagcgttccaatgtgtgttgagtgggtgtgccatgaattgacacactttattcacattgtaggatatttcagggtgtgtgatagtaagatattgaagtgctccaactatagaacaatatagttgtggatcagggacaggatctccctcatgagcagataatttcaatccacttatcataggtgtaggcataggtttggatccttccatttgtgctctagccaatagatcgtgtatgtatctaccctgagataggtgcaggccagcagtaggttgcacttcgattacaaggaaatagtgtagctggccaaggtgtttgagagaaaattgagaatgtaaatccctgattaaagtagtaatgagagtagaatcactacccgtgatgatgatatcatcaacatacactaagatcaatataatagaagaagatgtgtgcttgatgaagaggctatgattagacttagaagagatgaagccaagtaattcaagacagtgatgaagcttttcaaaccaagctcgtggaacttgtttgagcccatataaagctttgtggagcttgcatacaaagtgaggggcatctggaagttcaaaatccttgaatatcctgttcaccaaatctagttgtcggagcattaattagtttaaagacataaccagagatttacaatgaccatacctaatatgataagtagtccttaagaggtcctcctctcagattcttaactaaggataacccaagcgaaaatcaatcttagagaggattatcttttccttaaagttaattgaacaaaatcttgatcctaggccaagagtacttgtttttaattgttaacttgtttacttcttggtagtcaataatcatatgaaacgaaccatctttcctttatataagcaacactgggattccccagggtgacacactaggtcggattaatcctaggtcaaacatccctataaattgtaactttaattacttaaactctgttggagctactttatggggagccctaaaagccggctctactctagatactgattcaatgacaaggtccatcctctcactggggtggaaatcttggaagttcttttggaattcatccaagaactatagtaccactttaatatccttaggcaaactatctcgggctaagtggtacctaataccactactacaaattttatacatccatctcgtaatagatttctagcttttaagattatgataactggagtttgagaactctaacacgataccataatacaaatggtcctttattttttacttttagtcacaacaaaacttgtgattaaaagtgaaaaaattatgactaattataaattataattcctatgttgtgactaaaaggttcgtggataaaagtattagtcacaa

SEQ ID NO: 43551 - DNA, 2145 bp, Cannabis sativa
tctctctctctctctcttaataaagagaaagaaaagaagaagaagagagctctactactaatcccacacgctttcataaaataaaaaaaaaccccatacactacacaaaatgaccatttctctcatttcaccactccacacactaaaacaaaaataaaaacactatatacaaacacacaaacacacacattcttttgcttcaaacacaaaaatgataatctcttcttcttcttcttcttcttgatcatcaaaaccccttctctctttttccaaaaaaaaaatggtattgggaatgggaatggggagaaaagtgagatttgctatgttgttgataggaagagcaataaacgacagtgttagctttgtcgtttttacaattctagaccttgttgatctattcctctgtttggtatacagagtagctgattttttcatcgaagcagaggtggaaatcttgttattgctcttcttcttcatcttcttcatcatcaaatagtggtaagatcttggtatctgaacatggtgagtcaaagattgtttctttaagttcaactaagctcagattagaggaaatttcagataccctttatagaagaccttctttgttgactgaggtatctaagttgactattaatgagcttaaaaggttgaagcttgatgctaataataataataataataatgttattaataataataataataaaggtacaacctttatggttaattccaccattgttgaaatgcttcaaggaaaaattggtggaaataataatcataatcataatcttaattctcatgttcgaattccaagatggtctgattgtgattgtaagttttgtacttgttggacttcttcaaccaaagaaactctctatgtcaaatcagaagggcctaaatcaggtaaagatttaatctttttttattattattattattatttgaaaaaaaaaattgtatgtattcatggggttttgtttttggtttgatttagatttggctgaagaaaatgaaaatgtgttgtttattcatggattcatctcatcatcggctttttggaccgaaacggtgtttccaaacttgtcaaatgaggcaaaaacaaagtatcgtttgtttgctattgatttacttggcttcggaagaagtccgaagccaagtgactctctctatacattgagagagcatttggatatgatcgaaaggtcggttttggaacctaataaagtaaaatcattccacattgttgctcattctttagggtgtattttggctttggctctagcggtcaaacaccccggttcggtcaaatccctaactttacttgccccagtaagtttttttatttatttttttaatttcaacactactacgagatgacatcttaataaatatgtcataacatatttttcatatttatggtagccatattttccagtaccgaaaggcgaacatgcgactcagtacgtgatgagaagggttgcgccgaggcgagtgtggccgctcatagggtttggtgcttcacttgcgtgttggtacgaacatatcagccgaacaatttgtttagttatatgcaaaaaccatcggttggtggagtttcttgtgaaactcattactcgaaacaggtaataattataaagataataaattacacaaattcgatcaactattttcacccacttttttaaaataaataaataataataagaaaaaaaaaaagaagagttcaatttatgggatttgttgaacgaccttgggatttcatgcataaacatcctcatgacgttaattaatttcaatgataattatttgctttatattattattattataataataatatatatatgtgtatgcatatatatttaaattaaaataatttgaagcaacaataacgttcctaataaaattattagaggaataataatttaatttagatcaatattgtgtgactttcccttctaagaattattatatctttattttgctatgcttttttttttttttttgaaaaaaatggaacctatatgatggtgatacttatatataaaaatgaaaaaatatatgtttttttttatatataaaattatttttaaaattgatgtggatgtgtaataaaaggaaaattacttcatatgttatttttaa

SEQ ID NO: 43552 - DNA, 4302 bp, Cannabis sativa
aaaaaaaaaaaaccttaaattataaattattactattatggaagctaaactcttggtttaatagcggctctgagagtgttcttcatgacgacggtgaactcggtctttccggtgaaatccatctcagtcccaggcgggtaggcgctccactcaaactcctgaaccattctccccagcatcaactcaatgtgaaccgtcgccatattcaaaccagggcatatccttctcccaactccaaaaggcatcatcgtaattcctccatttccaacagccccttccctttcacccaaaaaccgagtcggatcaaacttttccggctccctccaaaacctcgggtcctccgcaatcccagcatggaagatatccaagttcacatccggtgagatatcatacccgcccaaggttgtcggctccgtcacggcgtgtgtaagagaaaacggtgttggaggatgttttctcaaaagctccttcaccaccgcctctaggtacggcattttctcaatgtctttttcatcgatcctacgatcgctgccgtggcctactactgactggatttcttcgtagatcttttcttgaacgtctggattagcgatgagttgggcgattccccattctatggccgttcccgttgtgtctgtacctccattgaggaactcggagcagagagtgactaattcttccttcgaaggcggtgaatctctcccttcaactttaagatcgaagagtgtgtcgagatacgaaaacgacgtcgctgaattgtccgatccagggttctcaagagccctctttctctgttgaatgaaggggacgatgaaatccatttgctgtgctctaactttcagggctagcttcctctgtttggagaagaatggactcagaatcgggagaaattcgtctattctcgggtccacagtaatgagtatgctcttcatgagctggtccattttctcgacggtctcctcatccatctctatcccgaagcacatcgtaacaaggatgcagaacactgcgaaacgcgcgtttttcagtacccaaacgacgccgttctcgtccttggcctcggcgcggagccgatcgatgaatcgatccatggctcggttcctgacgccgcgaaactcttttagccgactcgagctgagcatgttctggaccatgttccgcctcaatgaccgccatatgggaccgtaaacggcggcgtttacggtgaacttattcatactgaagatatttttggtcgggttatctctgggcctcgtggagaaaacggcgccgttttcgattagagcctcgtggattaatttcgggtcggtaataattatgagggttcgggtgcccattttgagtgtgaagatggatccatacttgtccttgagatctctaacgtattggtaaaagggctttcccgagcgaacgacttggaagaggtttccgacgatgggccagcccggtgggcccggtggtagattgggcttttttgatttggttttctgtgttaggaagaatatgaagcccgaaattatgatcgctaggagggtgaagtagaggtgagagtatggagttaaaagagaagaagagaaagagaatgaggaagccatgggagaaataacttcctggttagaacgagagaattttcagtgatagtaagtaatgatgaagtaaagagtgagagtgtgtggagggtataaaaatgggaaattggcatgaaattgcagttgggcttcattaaagctctttcaatgggagtctgagcctaaataagtaaaaataaataatttatcttaaaaggacctttcataaaactttgcattaacatcaaatgctagtacatataacggtggatatcatgtgattgaactgacatctggcttttttatatattgtgcgtggaactcattttgatcaatagttaagtgaacatccaataagactattgtttagttataatactatctatccattccgattaaggataatttctgtaacagttgtcttaatcttatttcagtaaataatgtacgttattttggtgagttaactatgtattaaattcaaccccgtacgtgcagccgttaaaaaaaattcaatttagtttataactaatgataacggaatgtatgatatcgatggagattttacaaagaaatatataaaaaaaaaaaagaaatttatgaaattttattcccttgttcaattcactttcactttgtatgattttttttttttttttttttgaaatggcactttgtatgttattagtagaaaatcttataaaagaatttaaaattatatctttgtctacaattaattgctccgaaagcaatcaaatgagagtgatgttttttttaaggaaaatgttaaggtgccaaatacttaaaaatgacctattgtatattatcattggtgtgttttaaaaattagatcagtataacaatactctttttctaattctgtgcaaataatcatgtaaaagaaaaatatacttcttgatattctcttcttttttcatttttcattgcacgtaggtcgtactaaaaaaagttggaagataaaagaaaaaaaaagtaacttttaattgcattatatcatagtccttagattggatgtaaatagtggtacgtaaaaaaactagaagaagaagaaagtagaagggggggcaaatagtgatggtggtgggtagttgggtattgacatagctgtattcgggtaggaagtagcaaagacagttgaatattaatgctctgtattcattaatgcttgtacaagtacaactaccacctttgcctacccatggaatcaaatccaacaggccacggggagtcaattacaattactcattctcccttccaccattattattagagaaatagtaaaagacaataccactttactatgtgttaatattgctattggttcaattaactatcgagttcaatataatttactataatagtttttagagagtattattagctaatcgcaacgcaacatgtcgtaaaagtgttagacactactgctgtctaatagcaatactcttattattattactatttttattattggggtttgtaatatcttgtaagaaattattttttttaaaataaaaaaataaattacattgaaataatacaaaattcctatagaagtaaatatatacacgtatatttttttaaaaaaaatatatatatacacgtatattagaaataaataataattcaactgatgaattccaacaagaaaagaaatttcctctccccatttaattcagggatatgaaaaattattctcatattcccgtggcgcttcattcctacctttgcattttttttttattttaattttacatcaaattttttttaattttttaattttttctattataagacagaatttttttctaaaatattattgtgtattgtgttaagtttttatgattgttttacaatttttttaattattctattattattttgttttattgttacggttattttataaaaatataatatttttgtaaaaaaattcgtacgataataaaattataaatttgtagtgaaaatataatatttgtgtaaaaatctttcttttttcctaaaaataactcattttcgcctattaattattattaattaattaacgtgagaatttcatgttaggaacaatcatatgtgacaactatttaacatagactaactcttctaagttactagttactactacatgaggtggtgaaagtaatctgactactgactatatattttaatgacatgtggcttaccttccacttcagtcatgactttcattattgtattaaagttacacgaccatcatttatgtgttacatctatttgaaactaatagatttattttttttattattaaattattatgaaagaagggggtgtagatccctttttacttttttttttttttagtgatttagataattttgggaccatctcttagttataagggttttatattttattacctaccttacaagagttctaccatagcaagctcgcctttaaaggtcgagtataatcttgcacaatgaagattgtagtaaaatttaaacttttgacccaaataaaaaaaaaatacccaataaagatttctcttccatatgacgtcacactatggtattattattattgaagaacaaaatttatatatatttttggaattataaatgttctacatagaatatattaatacaaaatttaaaggttaattagtaatttttctctccgaacttaagcatgtattaaatcgtgccctgaacttttttggccattaaaaatt

SEQ ID NO: 43553 - DNA, 2626 bp, Cannabis sativa
  modified_base (27)..(29): a, c, t, g, unknown or other
actaatcagattgtaaagagttttatnnngggcataaaacccaacagatctatccatgacaccttgggcgcccagcttttcatctaggctcaagatggttttgtttgtttcctgaatgcacttgtatcttcatcgtagactaaaataagggaaatgcctagaaaaattctttagaaatatgtaatggagtgccctaggttgagatatgtcaacgtgggcacccaatgcccatagtggcctaggggcttgcactaggcgcctaggtgggggaaaagtctccagaatttgcctcgtttatgtttaatatcttttttcttgaaaagtactccacaaattttagtttcatcaaatttttgcgggaaatactcggtgaaacaaaattggtgcccaggttaaaatgtcaacatgggaacctatagtttgacttgggattctttgggatgtcattggtgaaatctcatgtcctagcattgtttcttgttggatttgaggagtcacagtcaaaagaagttctcaaaaacctaaaccatagccgttgtgcacctagatcgactagatttcaacttgggctcccattagggctgcaaagtaagattggaggggccggctttcgatcgaaattcctgggtgtcatttcttgtaaacttatctccaaagtccaaatctttgtttaggcatgtctttcatgtatcctcgagcaatgtctaagcagaacacccatataaagttgttgagaaccaaaattgatgcaagacagcgcacaggatgtcaacctaggcggctagtacagctactagatccagcttgaccctcaagatgtccacgtgacatcatcagcctcatggttcattattttgtggtcattgtgacttgtttgctgaagaataacacaaaaaatgactttattggatcttggtgcttacctaggtgcccccagtatgtagataacattgccttatcctgggatgcaaggccctataaattgtattcttcgtgtcaattgtccaaaatagtatccacgttaatgtcatcaagctaactttttgattaaacaagttacttaactaaatatggaaaaatcatcaattgtgaagttatacaattacttagccatacttgaaaatgaataattgattgtcatggtaactaattatttagttttatttggaaaagaaaaaaaataaaattgatgtggaaaaaaattaatagtggtggtaaatggttagtaaggaatatttggggcgagcgaattagatttaataataataatacggaaaatttgcggaaaaactctttttatatttataattgttataaatatgactctaataaaaaaaaggtagtggccaaagaatcttatcttatgattttgttgcaatcgtagtatttttttgttgttaaatatgtcaattaagttcgttaagtgtttgctcaaaaccatgtggcaatatatttttttaacttattcaatacatagtccaataacatgtcgccacgtgtttttttatgacacggtgatcaaaatcacacatgatgaacaaagcagcaaaccacaatcggcggcggcacctcctcgaaccaggatagctcatcgtctaactgaagagcatgttttgccaaaccatgtgctgtagaattcacatcccgagccacatgggacaaaactactcccggaagtttagacaataaagctatgacatcctcaagtagcacacccagctcattaaagaagacccttcctttgtgtacagctatgactagagacaaagaatcagaaaaaaaaaaacctctttaatatggattccgcatgaaatagcccaattaaatccaaccaaaagagccaaggtctccgcttgtattaccgaaatactacctgaaaacataaaaaagcagaaaacaccacaatgataagctataagtagaaactatagtcagaaactacaacgagaaacgcagcccaaatacataaaaaaccaacaatgtaaagaaaagataaaggaaaaactagccaaagggataaccctttggctagtgaaagaaaccataaaacacaatacaaacatttttctcaaaaggggcaaatcatataaggcttgacacatcatagcctgatacaaatgtgttgccacgtgtttttgatttgacacttaatggccaaaaatgtacaattgtaacaaaattgtaagataaaatacttttgcatctattttttttattaaaattatgtgtaacaattataaatattaaaggagtttcgcggcaaatatccctaataataataagattgtggtggtgagtggttaagcagatttgaaaaaaaaaaaaaaatcatggtggtaactgataactttatatttggaaaaaaaaaatcagatttaagaaaaaaataaaagaaaaattaaattaaattaaaaaaaaataggaaaacttacaaaaatactgacttttttcctactctttacaaaaatactacaacacggcaaaaatttcttttatactgtctaggcccatttttttttcttttatactacccaggcccatttttttttcttttgtactgttaacgttaacaagggacaaacgacgcctccttcctcgttgggaacggacagagcaacaacacaac

SEQ ID NO: 43554 - DNA, 2620 bp, Cannabis sativa
ttagggttttggatatgggtctaattatgggtggaactcttttgaggaaagatttggattctgctgttcataaagtttcctccaaagctagggtttctgaagctcaaggtgtcagtaatggctcttcttcttcgaaatcggagtgtgaattggttcacgacggcctcaacaaggcggaggtgaggttcgtcttccctaatttttgtttattaggttttcaaagattgcattttgaataaatactaattgtcctctccaattacaaaaatcattactttagttacattacagtctaacgatgaattatgaaaatatacaatgactttcttagatttcgagtaaattaatgttgttatatagaaaatgattattcggaaagaatttttgtgtttacattcttcgagttaatgtttataattttaatgctaataaattggattttggatagttcatagttgttaaatatatcttacaacgtaactaatgtttatatgtttatatgtttaatttcaataaattagattttctgtaggctaaagttgttaaatagactctcttcgaacgtaaaggagcatatttagtttaaaatcctatgaggatcataatttaggatgaaaaaaatcatatttattcttgcatttttattgatatataatgagatagatatgtaataattggtttggttgtattatcacattattgtagattcttcaaatgttgcctgagaaatcattgtctggtaagacagtggtgaaaaggtctggtctttctatggagggatttcttcgtgaatatctgttgaatggattaccagtggttataaacgatgccatgactcattggccagcaatgacaaagtggaaagacttggattacttaaagactattgctggggatcgaactgtacctgttgaggtgattaatctttcctcagttttttcataactttgatgaattttgattattcatgcaattcagtattgaatgtttgattgattttgtttttatgtgatttgcaggttgggaagaattatctatgctctgaatggaagcaagagctcataacgttttcgcagtttcttgagaggattcgagctattagctcttcttcttcctcgtcttctgctgccccgacatatcttgctcagcatccattattcgatcaggtaaataaattgtaatgaactgatgtgaactcatactgttgtttatgtaatgaacaagtagtaattgattttacttttaaagaacagataaacgagctacgaaatgacatatgtgttccagactactgttttgctggcgggggcgagataagatctctaaatgcttggttcggtccggctggtacagtgacaccattacaccatgatccacaccataatttacttgctcaggtctcccctttggcatactttgttttgcacatttgctgaaaccatagtgagttaataataataataataagatgttatgtatttgaaactctttaaccatatgcaatgtgttgtgcatcatagttaatttgttatctcatagagttttttaatagctttgtgtttataggattcgattcgtgagcaattcaaatacatggttgttgtttaatttttttcggttgttttcaggtggttggaaaaaagtatgtgagattgtaccattcttccatttcggatgagcttcatccatacaccgaaactatgcttttcaattcgagcaaggtaactaactacattcaaacttgcattattggcatgaattcccatgagttttttgctctgttcaaagctctgaacatttcatattgatgtaatttattttggttggtcttggtaggttgatctagacaacatagacgagaaagtatttccaaaggtgcgcgacttagaattcgttgactgcattttagaggaaggcgaaatgctttatatcccaccgaaatggtggcactatgtgcgatctctaacaacaagtttttcggttagcttttggtggaatgacactgaaaattcaacagattcttgagttttcattgcttccatggcgggttttgttccctttctttttcgttgtggttaattagaagtttaggtggttatggtgagtgtagaaaccagagcgttttgctatcttggatctcaaatagtttattcttgtgtatatagcatttttcaacgctcaggctgctagacttttacatatttttattgattaaaaatggaaatgtgtgaacttcttaaagaagtatgtctttgctttaataatatcaaatttcagtgatttgtattatctttttttagcttgctcaatttgcatttggtaaaacatatttaatatgttcattattttattgaataaaaacgttaaaatgattagactttctgaatataaggtaccacgagtattattaaaataacagattactaaatttgtgtttagataaaacataataataataataataataataataataatacaagtacaacattgggatttagaacataacaaacaatttaagcactatcccaagttgttttgatttttatcttaaaacaagattttgatattattaacaaaggtctatcatgatattattggaaccttttcaccattctta

SEQ ID NO: 43555 - DNA, 2023 bp, Cannabis sativa
cctgattagcctgtgctgaaagttgaaaaattacattttttataaaaaaaaatgtctcttttaactcgatcatatacacaggcctcataagcctgtgctcaaagttggatctaggcgtcgagcatactcgacaaaaaaagaaagagtaccttctatacttgacgggaacaattccagatttgtaaagagcaatgcgttggaaaacaggttgagcaagatcaaagtgatgcaaaggagggttgcaccacccaccattggtgttgcttagagccaaattaggaggacaaaaattagtagctgtgattatgattgagccaggcaagcaccactttttgtcattaacacatttcatctcaaagcaagcaccacaactcaacccttggttgaatagtgctgtgctcaatgcagctgtgttggtcccatacccttggctgtacaagttcccatatccacatgccccacctataattaattaaatacaaacataattgatcaataagtaatggagtattacctacattagaatcagaacttaacagaaagactaaataattttagggtttgtgataacttacccatggttccggaagcatcaccaccaccatagaaagtggcatgagcattggtccatgattttgttggtgagccattgacacacttgataatgagaaaaatgatgagtatagagtaatagttgttgaaaacacccattactactacaactaattaacaccaattaatgtgttataattaaatatcaaagaagaagaaataaagaaaatgagagatgagtaagagagaatattaattaagatgggaaaggagtggtacttatataggcaaaggcaagttgagattacttgagagatgtcatgtgaatttatggtgaaatgaaaaggacttgaatattattattatatgtatgtatgtatatttgtgtataaagtgttgtgttattaaaaaaatgttaaaattaggaaattggcatagtggtcgaagcaaattttgggtatgagtgcagtcaaagtcaactaactggcctctctctctcttattgcttttttttgtttttagttgatcatcatattattccaaaaaccaatataacactactcttcattgggaatgaatatatttgcaatgtttgacagagaaaagaagaagataagagagagtgtgagagatgtgaattcaaattcataattaagaatttaattagtgaaaaaagtttgataagttaatatatttataataaagaaatgggattggagaatgtgttgtggtggtcatgagaatgaatggtagtacttagtttgactaatattgtgtactattagtagtacttaataataatttgacatgtaatactacctataatttatagtcaaacatattattaacctaagctataatagtacaaaagttttcaacttaatcaattgcttggaaaatggaattaattaatttggagtagctaattaattagctagtttttgattaaacatatatattaaaagcatgtataatgatagtattctttgagagtgtgagagtgtcaaaaacttccacatccacttaaaaatatattattttattttattatttctttcatatcattttttacacttttatctaaaataatctaataataagtatttctaaaaattattaaaatattattatattattatttaatatatattaaataaacaaattttcttaccttattataaaataatataatataataaaaaataaaaaagagaaaatgtaaggatgctatggtatgacattcttttgtgacattttttttcatttcgatggtaaacatcgattaaaaaatgttaaaaatttatccatatcctcaagcattcttcatagcatctccattagagatgctctaatgataatgagcattgttattgggtatcagtggtgcccagcaccttccatataggtgacgtcgtacgattagttagtgatattattccctaaaagctattttctttaagttatatgggac

SEQ ID NO: 43556 - DNA, 1639 bp, Cannabis sativa
acttgaggatttagcttctctgaggaaaccaaaaccgcggaaacgacgacgacgaagaagaagaggatggtggttgcgggtttggatttggatttgggcgaaatggggataattgttggagaaaaatggaaatgtaaggttgaggaatgaagaactcattggagaaaaagagacacaatttgacatgcttattattgttatttatttcagaactgtgaatggccattgagttttagcaaaatcaaatcaaaaaatttgaatggtgacctctcatttatggtggataaaatttctcataatgttgtattttcttttattatttttttttaattaattttttttgctgaaatattttttaattaattgctaaagatatggtttcatatagatttgtgttttcattacagttttacattcgggacagacttttttgcatggtacgacacaccatactatgaacttaagcttaagcttagcgccacatagaaaatatggctttaaacactttacacgacaataaaagcacaacacaaaagtacaaatatacaagtacaaaagcacaaattatatttataaatataatcttttatattttaattatgtatttaattaaaaatatatatatataaatctattttttaaggatatttaaattattgttttaaaaaaatgtctaaattatttttaaatatatatattgtgtgttaatttaatgttgtaacaaagttattgttaacttagtttttagttaacgatgtagaattaagatttacaacaatataatgatgttattatagaataataggattaataataaacgaaacaagagatttatagaggtttaataccagttatttagtaatagcatactctcttttgattggtattacttgaacaatgagatcacttgaacctttgtcaaatgagtttcccaattgttcttaaagattacacatatggtttttccaacagcatagagctctcacatattccaaatatatatatattttaaactttattttatttataaataaaaattttaaaactcaaatcaaaattattaaaaatttaataaataatttaaataaatttagattttatcaaaaaaaaaaaaatcaagcttatttatatttacaaactcatatattaaacaataaaaaaaataattagaaattcaataaaaatataaaattatttttttttcttttaaaaaaattaaaaatttaactaaaaaaatattatgttttcttaaacaaatttagattttcagtaaaaattagacccaattattcccataaaattagttttttacaacaaatttttaatatagtatttatatctaatggaattattttataaaaaaataattatttttaaaacacttaaattagttttaaaagttcatttcaaaaaaaaaaaaaaatagttttaaaagtttggtttcttttttaatattcttaatcaattagaataatttttttaagatctaaattaattttttaagatttactaaaagagaatgttcaatttttcttatttttattttaaaggaatatgatttgatagttgtcaaagtttagaagtcaaaattactaatttacaaagatatgttagtatttaaacagaataatgagatgaa

SEQ ID NO: 43557 - DNA, 4044 bp, Cannabis sativa
  modified_base (38)..(46): a, c, t, g, unknown or other
tattgtatatcgtagaaaaaaaatcatttaatagtatnnnnnnnnnagtttatggtatattcatattggtctaaggtatattgtttgtatgttatattatgtaccatgaaggaaagaaataaaaataaaattaaaagaatacatatcagtaaaaaaaataaaaaatgacataataacttatattactctaaggtacagtatttgtatgttatatttatattactctaaggtatttttataataccttttatataatgaaggatattttaggtattcaaaagtaaaaaaggacatttgtttaattattttaaaaaagtgacattaactatcactaaagttagaaacagagttatttactaacatttctctttaattcaaggcacgacatggcacaggcataagctcatttgggatgtgctgggcttctttattttcactacgggcttgctcggtccgacccactaatttatacgggccaacacgccctaacccactttttttgaaggcacaaaaatgtgggccgtgtcgggccaggtcgacccaaatttacagctctaatcctagatgatgtaaccatctagataggggtgttcattagaaaataaatacttttagccctatctagatctgattcaattataagatggatttttataaccgattcgatccaattaattttaatacatccaatccgatttgatctagtgaatgttggttttgatcgattctatgccatgaatgtattttatgaatatctattcgataagttaggatttatctaatattttaaatccaatatttttttttggatcggatcagatccatctaatgttttagatctagtacattttggattagattggattgatccaattatagttgtaaatacttgcgtgtcatgctagtctgacccatattttttcgtattttttaaaatataggttgtgttgtgctgggccataaaaaaatatagaccatgtcgtgccatgccataagaaatatgggtcgtgcaataattttatagggtaggcttgacaagacccgcaagtccgataattttgtactatgctcggattcgtgtagtgcttaaattttcttaaatatatcaacttatttttttacacgggctcaaattcgtgctctatatttttacatttttattacaatttatgatctaaatactaaaatatatgtgtattttatattttagttacttttataatgtttttgaataatagttacaaataatcatataaaaataattataataattataatttgaatattattatttattttaattgataaataaatatttgtaattttttatttttataaaattattagacattttaatgtgttgtgctttcgagctaatctattcatgcttatgtgccgtgctttcgggcttgtcgtgtcgtgacgtgcctaagcccatattttttcgtatcgtattgtgtttaagcccatattttttttttgtgtcatgcctaagcacatattttttcgtgtcgagtcgtgctcgtgccatgtcaaaaagctcgatccatatttacagcactaaatccaatcaacaaagaagaagaagaagaaaattttaatcctaaatttcaaatatacatgtatgttttaagtataataacgtaaaatctaattgctcatctaaactaaattaaaatactaattagttcaattgaataatggattatattagatttccagatacctaatccaacatccgttatgatccaatcggatattaagaaataacgtacaatccaatacaatcattattgaatattaaatgttaaagtaagcagttgtaattggatggaatcgctttatcttaaataagttaagcatctacatagaagaggttacatcctagattaatctagattgttacacatattacatagaatgacttacaatggatgacttacacatctttaatgggttaacttactgatggatgagttacacatttcagatgggttgactttaaagttgtacatttaggttgggtttatagcacgacacgaaactgctatgagcccgggtgcacgagcacgatacgtcacaaataaatatagatttagactcgacatgacacgaaaatataaatatattagcacaaagcacgaaacataagcatacaataaaagcataaaataaatctacaaataccaatttttatttagtaattcatatataattttaataaaaatatttttttttgtaaatttatatatatataatattttagaattatatatataattttttttcaaaatatttaaattatttttaaaacatatcctaaaactaattctgttatgcgtataaagagatttagttggctttaattatgccaaagtgatgaaaatggcatggctactatcactactactccaactgctcaaagatattgtagagagaggtgatatggcagtcttgaagattgtgtcaaaatataacctaaatgatctgtttataaagacactacctactatcttttatgggtcatgtaactaataagggattaagaaagatgcccaatttccttttagggcaagtgagagattgttaggatttatgcactgaaagtctgtaaaaatattttaattttaaatataagttgaacaatttgatatacatttaaatgttgaattatttattaataatttatatataaatatcaaaaaaattcttattcatatatgagactgactttgcattgtacgaaaattaatatcacaagctatgaataagatagtcagcaacatattgaaattattgaatctttattcaatggttgatagtatagttcactgatgcctgttactcagtgcaagcaatcttgattccgatcgctgatgtagatagacatattggtgaatgtgatgtatataatagagattatatatgacatgactgatatgtaattaagttgtcattatcaaactagctatttattataaagacctaattcatattataaagatgattaattagtatatcgtcctaaatcctgagaaattacgaactcttgaaccgtcatgaatacgggatcagaaagcttacccactacaagaaatctttggtgaagaagatgggaagcttgaatcgtcaaaatagcgtgaaaatcctaggagttgaagcaatgtgggtgtcggcctctagagagaaggaggagctttcaaaagtttctttttcttgagagagaatgaaatgtgaaaagtgaagagtggtttccttcccttgagcttctgtggaacctctttttacttgccatgcaatgtttaactaaaaaccacgcagaagagaaatgcagttaacttactgcaaagagggtgatcagatagtcaagagaaaaaattaaatatgctgcaagatttgtccagttaaggatacatcagtcctaactaagctagaaagtccttatctgcatagacgttcgagcaggaacttggggtaaatgtaattccaatttttcccacctgacgtggcatgtctacatgaccaacataagtgccacgtggcagtacaactttccaacaagagagccaagtcatctactcagcacttcaaccaacgaggggtccgagtacttaagcgggacgataaagtgattggtgagccacctcaagggggtggccggccacccctagccggccctatggccctatggccagcataggctagccagcttctggacatcccatggccggccagcatgcaccctgtgattgcaaggtcggctagcctttagcttggcaggattttggtgcgcagctttcatacgtggacaacaagctagaccacgaattgggccttaacagcccaataaaaaaagaggaaaaatatctatttttgaagggcattttagttatttgtattttatcaatttaatatgtaaatatttctaagggattcgataggtgtaagctctcctatataaagatccttaatcaaatcctaaaaccctaggtcattaagtctcaaaccctaagctctaagtctgataactcatctctctctctc

SEQ ID NO: 43558 - DNA, 2027 bp, Cannabis sativa
ataaccacctcattaaaaatctcactgagaaaactcatgagacaaaactcgatcaaagaaaaaatagtgtagtatgaaattacttcatcttattttggcatttactgatatcttttaatcgacacattctaattttgtgaaccatcttctcaaaagtaaatgttagtaatgactttgtgaataatctgcaagattattaattgatcgaattttttaaacatcgatattatcattctcttgaagattgtgtgtaaagaaaaattttagtaaaatgtgtttagatttttctcttttaaatgtactaacctttaagttgagtgatgcaggcatttcatagagaactgctggtacttctttattggatgttaatccacatggtcctcaaatatgttgtgtcaaactttccaaaataacctttagatgtttattttagaagatgataagtactggtagataaaacaattgtgatatattgaagaaaactgaggttctctactacaaaataattttgtctgtttaaaattgacatgcagtttgtggtagtggtttcaaattgattgtagcattacttgaactccatactgtggcctatttgtgataatgttaactggtgaatggacataggttggggacaaggtgaagctatatcgttgcagaatcattgtcagaacaatctttgcttcgaagatggcaaagttaatcccaacacaagttcgaggtcccattccaaagggtagaaaggcagccatattgtccttagtagctttagcaaccccttcagaaaatctctctggtttgaaaagatgaaaatcatgtccccatagttcagggtcatgatgaagtgctagagttgatatgagtacatttgtattggcttgaagattgagatgcctcaatcttacttcctttccaatttttcttgtcaatgaaagtacaggaggatataatcttaaggactcattgataatctggctcagctgcatgaggaatgaaatgataatataaatagaacatataagaattgtgaaatgaatgtaatataataatactactgctttaagtttatcttacagttttaagtttggctatcccatctgagtttggattttgttttccaaatatattgaacacctccttccttgcttcatcttgccattcagtatggatagataggaggagtatagtccaagcaagcaaactattagtggtttcttgtcccgcaaaatagaacgtcttacactcatcaaccacatcatctactgaaattctttggctactgctgccatcattgttagcctttactagtaatccaagaaaatcattcccataatcgttttctttactcgtcactatgccttctcttttcttaatcaaatctacaatagaatggtaaattgttttctcaagcttctctgcttctatctgatctctggtcttaagaatcttactacataaaaagaataaaaaagagtataaaagctaattcttttgatgctgcctatatcaatattaataagtataacagctctgtgatagtttatcaactaggacttgtcttgaaactaaacgaaatttacctgatcccaggaaaccttactttgaacatgtttctagaagctaacaaggtcaacctagctagcatttcgaaaatgcccttgccttcattgtaactgctcccaaatgctgtcctagaaataacctctgcagtcaacaatctaaattcttcgaacacttcaatctctttgccttcatcacaattccattttcttaacattgtctcaacactcgcaatcattgctggaatcatactctgtcaagaaaaagttttattttaattatactgaagaaaatgaaaaagtctctcatatatattatgatctgttaggcattgctacttgtctcaaaaatttaattgattaggattgtggtggctgagttgtcaggttctaatgagatgttaaagaattaagaattgatttatacaaagggagtaaaacttactcagattgatatcaaatgaaaagttt

SEQ ID NO: 43559 - DNA, 1460 bp, Cannabis sativa
gagagagagagagagagatacctcaagagagaaatggtaactacttgagaaagaaccgtcgataactgagagaaaaaccaacttgatcaaactgcaccacattttcttcaaaaaagatttgattttcgattacccacagtgaagaacgaaaaacatgaaaagaagaacaagaaaaaattacttgtagaacagccatcgagatccacaactgtgagaaccaaaccaatgtgagaacacaaacaatatacaccacaatgaactactaacacttcctctctcagagtatgtacacgaaatgaaaatacaaagtgagtgttttgcctaatctgaaatgaaaatagaaattgaagagttttgcctaaatctaaaagaaagttgaaaaatgaagagggttatgaattaagaaggaagaaggagagaggaagacggttgagggtgatgactgatggatggtcatgttagttttacttttttaaatttaataacttttttattacaaaagtgaaccggttatctattttttttcctaaatacccttatataaacctcaacttttagatcacaaaacttattcatttaacggtcagggtacatcacagaatatgtactcctaaatacattaagagaacaaaatcatgtccctatatatatttatatatttattatatatatctttctcttttggactcggtcaaccaagtctttacacctaccttcatcaataaactcaaggtgaatgggattttgttttttttttcttttttttttttttttggtaaataagtccattgtattgcttaactcaaagaaaacaaagctgaaactaaatcaaatcaaatcatcttgattatttttttgtaagctagcctatacaaataattctattgtaaacatcaaattatattctttttactatatatacataatagttaaaactttgttcttccaaagagccacattttgagccttccaaatgctatatatgagagcaaaaataatggcctaataataaatttttttgagcttggttttattaatgctgaggttgtgaaatttttaagggttattgtatacacttttatttgatatgtgtcttagtaggccaataaattaaagatgactttcgtagatgttataattaatgaatgatgatatgttggtgtggcaaaaattaacctctactttcttgtacgtgcatagatatataatattgtggcatattattactatttggctgtccaataattaattagttaatttataatttatttagattacataacattaattcatttatagtgtgtacaagtaaagaaaaagataaaaggaaataggacaaacgagtccaacttaatccattctataatattattcataaacgtatacacatataataaagaaatataatagataatatagatcttcattttatatttgtaattgtcactctcctctttctc

SEQ ID NO: 43560 - DNA, 4803 bp, Cannabis sativa
acacaatttggtagtaggtttaattcgaggacaaaaaattctaaatagccttaaatctatttatattagtattgtgatattcactttcaataaacataagcaaatgttaagagagaaagagtgtggcttaccaggagcaatgtaaccatatgaaccagcaactgctgacattgatttagaatgaggcatatcaatcacttttgccaaaccaaaatcaccaacatgagcttcaaacttctcatcaagtagaatattagtcgactttatatcgcggtgaataatccttggtttgcagtcatgatgtaaataagcaagaccttcagcagcaccaagagcgattataaaccgagttggccattccaaactgtaagaagaaccatgaagcatttcacccaagctaccattctccatgtactcataaagaagcaaattagagccttggtgataacaaaatccatatagcttgacaatgtttcgatgtctgatattcccaagagttaaaatctcagctcgaaaactgttctcaatgctgttcccttccctatgagatgctagcttcttaacagcaatgatccttccacaacgcaaaaccgccttgtaaactgttccacaagctccctttccaacagcaaagctttcattaaagttgttagttgcctcaacaagatcttggaatgtgataccatcttttggaggaaagtagatatctgaatcagcagacgaaaatgaaacttcctcttgcaatgaagcaactgtctcgggtggacatctcatgtaatataagattatgacaattagaatgagagaaacaccacctacagcagctgcaaccgcagtgataatctttccccgatgagtttcagccccacccggatgtgatgcagggtgagaataaggatttgcaccacagtcatttagaggcctaccacagagtcctctgttcccaacaaagctgctataagccatgttctgaaataggggtatggggggtaaggatccggtaaggtcattgtatgagaagttacatcccaacaagcttgaaagattctctaatgtgcttggaatttcaccactcaaatgattgttattgagcagaagaaattcaagtaaattgagatttccaagctgtgatggtatagtaccagtgagattattgtaactaagattcattgcaatctgcaaacccgaaagagatcccaactcgggtggtatctcattagaaaacctgttgccacccatttgtaattctgtcaaacgcgaaaggtttcccaacgctgatggtatgcttcctgtgaacctattctctgaaagcctgagaatctccaactgaagaagagttccaagctcatcaggtaaaggcccttcaaagtgatttctactgagatcaagtctctgcagcatcttgcagttaactatttcgggaggaatttgaccggtgagcaaattagatgataagttgaaagtaaccaactgagaaagatttcctatttccttaggaacctcagagttgaagtagttatcagaaatatgaagcctttgcaactttttgcagctccctatcgatggaggaatcgggccattgaacttattctgatccaatgcaatggcagaaaggttaaccaaattacaaagctcagaaggaaagctcccagtgagactgttcccaacaagcctgagctgcaccaatgttttgcagttcaatattccagttgggatatttccatacagtttattagtctcaagattcaacaaaatcaagttagagtttcgacatagatgaggaggtattctacctgtcaagtggttatctgaaaaatcaaccacccaaagctgactgtagagaccaaacccctgaggaatggtaccattgagagagttatcaaacagttgtatctgaatcatttttctcaagtactgaaaaccagatggaatggagccttgaagaaaatttatagaaaggtcaagctttgtcaagctcttcaagttgctaaactcacttggtattacacctgaaagttggttctgaaagaggtatagtaaccttaaacttgttaatttaccaaactctctggggatctcaccactcaaatagttctctgagaaatcgatttccccagccttagttagatttccaatttcctttgggatagttccatttaaagaattcctgtatatatacaaccttttcaaggacttaagattcccaatggactttggtagtggtccagttatactattttcatacaaagcaatagtttcaaggcttgtacagttgccaagctcctctggaataggccccgagagctcgttgtcccatagaatcaagtctgtcaagcgtccaagcataccgatttcttttggcaacacccctcctaaatgattctgagcaagtccaagaagctccaagctttgacatccacttatttcgcctggtatgctacccgaaatagcattctggccagctctaaatgttctcaaactcttcatttccccaatagaacgaggcaatggaccggtaagattgttggtgtaagctacaaactcaatcatcaaagacaacctcccaagctcttctggtaaggaaccagataatttgttgttgcatacattcaaacgagttaaattagataaatttcccaattggggtggaattctccccactaatctattgttgttcaaataaagcttttgcaaacttgaacaattcccaatctctttaggtatgttcccagagaatgcattgtaagcaagatcaagatgagtcaagtgaactaacccaccaatgctggagctaattgtacctgaaagattcatggatctcaaatcaagagaccaaacaacttgatcaaaatcagaagtattacaattgacaccagaccatccacatggtgtttcatcagcagaattccagtttcccaaataataattattgtcaactagacttttcttcaactccaaaagggacaacccctcagaattcaaaccctctgaagtgaaaactagtagagagaagataagcaaagaccctgcaaatcccacctccaaaactctcctccttttgaaatttccgaacatttttgcagcttttggatgatcaaaaccaacatatagatcaacaattaacacctgaaagtacacaagtactcatattacaatgttgtctaattaaccaaacaaatttacttgccaagatgataaacagaattgataaatgttaagagaaatagtaaaagaactaatcaaaacaagcaaaagacataaaaaaaaaacactaaaagaaaccaaccccataactcaaattcataactttattcatataagacactaattcaaacagaaatttcataactttgtccttcaaattaactattttaacaaagttctaaatttaaaatgaaaaaacataagccaagaagagattatcaatatcaacatacctctaaaaagcccaatgagcactcatcatctcagcaataaaaaagcaagagagagagagagataatagtaacagcaaagtccaaccacatttggcattgactattctgaaatgacaaactgaaaaaaccatgaaagtcatgaatcagaaaagccaaaagtgaagcaaacccaattcttctttcctcaaaaatggtggggatctgtgatctaaaaaaggcccaagatttgttgcttaaatatctcaaacaccaccttcttcacttaaccctcctctccttttgtaaagactccttttttttcttcctccttttcaccaagaactcaaagtgcccaaaaagagaagaaaagaatccgtttcaaagatttccctactttactttaaactatatgaatataaatatataaatataatttaataataaaaaaaagacaacctttcaaacagtgaaacagaagcaaacacagagagagagagcctcagccaaatcgaaacgtctaaaaataaaaaataaaaaacgagtctttatatatatttataatgcaattttgagctcggtggctgtaaagatatgattttttagcaatgaatgaaatcgttgggattgagattgaagagaatgagccaaaaactgagctcttggttgaagctctaatggccgacaagcatgctttcatatcatcgctctcattctctctatactcaaaaaaagtttcttccttttttttcattttttttaatttaattttttttcataattattttttccaagatcgattggaaaaagactcatggggacaagtgttttttttaaaaaaaataataaaaagataaaaaaaaaaaattaattgtgaactctttaggctaccaaaccaaacccaatcataattttctcgggaaaatatttctatgcaattttcttggttggaaaaaaaattactctgtattctaagttggcgggcactgaagtctatgagcaaaaaatttcattatttttttttatgtatttttttaaaataaaacaaaatgagtaaataatgatgatgatattaatgtctaatcttttgccacatcattgatgtgctctttttttcaaatataatttcaattaaaaaaattggtctaaattgtattttgttattgtgatttgatttttattgttgtgattaatgttgtctgtatgatataattttaagtgtttagtttatatttgtgatatgattttgagtgttttaatattgtctatgtaacatagttttattttgttctttcttgttctaacagagattggaaatgacgagttttctgtgattgaatgagttgttagtagtacaattacttaccttgtataataatttagtgctcaa

SEQ ID NO: 43561 - DNA, 2898 bp, Cannabis sativa
cacatatttgttttaatgcttctactctgtcgtaggccatccttgggttcaagttggtggcgttgctcctgacaaacctcttgattccgctgttttatctcgcttgaaacaattctctgctatgaacaagctgaagaaaatagccattagggtgagtatttatcagtcaactcaactatataattatagcagttaaaggtgtgcacataaggttaatcattcgttaaattactactggtcagctttttttttattttccaagcactagcatgtattgcaattaaggtatgattattatactacaatccatgtccatagagaaattgtacattttgattatgtttagggtgttctattctttagtgcatgacttgcaattgttgtgtcattgcaggttattgcagaaacattgtctgaagaggaaattgcgggtttgaaggagatgtttaagatgatagatgccgataatagtggacagattactcttgaggaactaaagaatggtttggaaagggtaggtgcaaatctcaaggattccgaaataagtggactaatgcaagcggtaagtaatgattctaattcaaagaactgtaataaggcttgtaaaaattgtataatcaattttgtttgctatttgtttccttgctagtggactctgtttgtagcaaaatcaattgttattttgacatgtgaagatgttaggaacatagatcgacaattgttattaatagtaaacctcaaaattgcatcctaaaatttttaggatgatctttatttaataacaaaccagtagattagctattttcgtgtacttttgatatgacttggcttgttgagtttgataacattctgtcctttcaattaacttttactgttcctctaaaaatttcaggcagacattaataatagtggtaccatagactatggtgagtttgtagcagcaatgcttcatctaaataagattcaaaaggaggatcacttgtatgcagccttctcttattttgacaaagatgggagtggttacataactccagatgagctccaacaagtctgtgacaagtttggattggaaaatgttcaattagatgacataataagtgaagtcgaccaagataatgtaatttacttaattgaaaacctggctgctattagaatatgttgtcctatgtaaaattgtttaatattcacaattgtgtaattttttcaggatgggcgtattgattacaatgagtttgcggctatgatgcaagatggtttggggaagggattacaaagcaacatgagcattggattcagggaaaacttgaagcattaatggcttcaacaatttgaccatggtacacagtcaaatagttcctatctaactaacatttgctttttcatagctttaacagaaaaggtttgtgatgcatagtgttgtaaaaaattagcagacttcagaaggagaggaacaaaagttttactctcccatctatacactcttttgttttcttcttgtatttttaccatttttcttctaaggaccctaatattggattagaaagctgtttataaattacaatttttcttttctttcccaccatacaatgtgattcgtggctccaattggggtgttattattaaaagctaatgatgagtggtgccaaaattgaatgtttactttgcttgaaatacactaagtcacacaccaccaccgtatttattcctgaaatctactagagcccagtgctactactatactctataagagtgtcctctagctagtagctaattaatgttgaaaacgacattattataaaggcaagtaaaagttcatatatatgcatatatgagtatagatagtggacctttttgtactctattgttttggagacatgtaaatatatatatataatatatatataggtacttgtcaagcagtagctgcctcctgccgtgtgcctcaggattcttctaagaaaaaaagctgcatcattgccatgtcgttttgtgtacctaagattgtactactactactacccaatacccccatgtcctgtttcttgtcgttttgtgcatatagggggataatgcatatctctttctaaatgtttatcaataatagagacgagtcgagtcgatcgtatagtatgtatgtactgttttggtgtgtactattccttttccttttcttcaccttagctagaacatatatgaagatagcaaattggagtatgatatgtggtacgtggttctttatttatttatgtagggagttgaaataaatcataatcgaaaaagaaaggagttgaaataaatgtgtgagtgaaaagttggatggggtaaaaaaagagagaaaagtaatgtgagaattgtgaagaattaaatataaaaagagaagtgtgagaggaaaaaaaagggggaaaccaaaccaattaaagagtcctctctccaaaatagaggccgggaatgaagtaaagaaaaggtcttcaataaaaatataacaacgagaatagaaataggaatgaaataaaacttataaaaaagttattgaattttttctcattatgtattagaatggtctttttttttattattatttcaaaatagaatagtcattttaccaaaatagtggaaagatcattctattagaatgacattctaatattttagtttaatatgcaaaataaagaaatagaatgaaaattgcttattttctattccattacattttattaccttcaactaaacgccaattaagagttttttattttttctaatatggatacttaaaaaagtttatatgtaatttttttttttttgggaattactccatatactttttttttttaatttttttttaaaaaaaatttacggtttgagtttctaaagtatttacagcgctaattgcaataggga

SEQ ID NO: 43562 - DNA, 2776 bp, Cannabis sativa
taatgagttatattaaaaaactcgaattattttatgaatgtgtgtatataatacgtaaatacatcaaattataataaaataaagcaatgaataattaagactttaataaaagagataagaagtaaaactagtttaataaaattgtatattaaatatgtataaaaataattatattatatatgtatattgtatcatatatatgttcggtcggttttctattgacactaaaatcgatcgtgttaaggcatttttaaccgaaggcgatttttttagtttttcagtttttttcggtgttcagacggcggtgtacttgatttggtcagtttcttgaattttttgctcacccctactcgtgacaccacccctcaagtgaaagggtgaagaagtcacccagagcttgtcaacgagatactagaatcgtgaatggaacaaaccttttgtgaggcaatcgacaatctgatcattggatgggacatagtgaatttttaggttcttccctaaaactttgtctcgaacaaaatgtacatctagctcaatgtgctttgtcctagtggggtacacgagatttggaataagtgcattagcgctcatactatcacactagatcacaggcacaacaagaagcttaaatatcatctctttcaacagctcttgaatcgttttgtccagtggttgaacatgccttacggctagacttctgggcacccttgcctgaaggccgaagtggaggtggagtcttccaaagtggaggatcaataatcatcagctggccagccagtacaaacccaggagaaaggggaggtaatgaggaccctacaacatcactagaccgggtggtccgggccaccttggccttgggatgacctgaagctccacacaagggctctccagcaagaactctcagtctgaaagccatatctgcaaaaagaaagtgacaaagttagaatacaagttacaagtattcaatactagaaaaaagtagaaaagttagtattatcaactatcaactaccatcatcctcaaataaggaatcatctgaatttctagcagcaaccttgcccttgcctttagacgtaggcagagggcaagtaggcctggaaaaatcatggcctttgggcctaattaaaagagtggcattgccaatggtgcctccgcgagccaagcgttggcggagggccttctctgtttctttccatgttccttgtaatcctggagaaggggatatcatcatccatgtcaggagtacgcccacctcctatgaaagtctcttctgtcactgggacttcatctgggcctccaaacaggccttgaactcccgtaacttcagactttggagggtatagactatgcctctgaaagttggcttcacaagccaacctcagtatattcctcctagcgattaggagggattaaatttgattaactctatcccgcatttggagagtggggacggagcgtgtgtaggttggcactctttagaagcgatggcagacctgctggatgtcccatgcaataaaataattcctgacatatcctccaactttggataaggtcgtgctgttagtgtcgcccaaccactgatagcctatctggctaaagtaaaagtatcatgtccgattctacttcgaaacaaattttagctcaaaaaagtatcctatctcatagggggagggttgacgccagcctaactcagcatagagaacgaacatactttatacctttctgtgtgaactgagttgggcacactttgaagtatatggcaatatctttgaagtaaggatgtaggggcaacactgctccctactctatatggcgctttaaccatgacatcaagttgaaggctaatcgatgtggtcgttggtctctcaaaggcatgtcacattagacatctcccaccagtccactttccttaatcttgtcaagtgtctgagtgctgatagaggatggaggagagatccaacggtcatgctgctctccataatcaagagcttaaggctatgatgcctcctctagaaaatggtccactctgaccttagaaagttggacaaggctattcaagggtcgcctggcctcatcatatgaacctggagagctattgaggaaaataaagcatgtcctgtactgtctccacttgacaggcacaacctcctcgatctcagattcattatccaagctctccacatctcgattatccatgggcttgaccacatatgtctcagcctggccagcccccgactctctgtcatctagaggttgtgcagcctcctcaactataccaattctccctctggtcaccagtctagaaatataagggtcatgaggtggtgctctgtgacatgtctgcttgactctcagcataatgaaccactactaacctcaagattgctcgaggagatgctagaggaatgaactagacactagtcctcaaagggaagaccaactaaatctttgtcgacacggttgtcacctcccccaactgtgacttgggatcatctacacacataagacaaggggaggtgagcaacctgacaaagcgacgaagtatagacaaaattctggtcaatcatacccaagggtacttgccaaaaaatttcattgtacaaggctggatagcagtgaagtacagtctcaagtgtaaaacttggacaaatgctaagtcttaagatgagcattttttaggttatttttagtcttaattttagattaattttagtatatttttaattaagttttaattatgtttggagcattttcacgcttgttatcttttattttt

SEQ ID NO: 43563 - DNA, 4429 bp, Cannabis sativa
tatatatatatctaacgtcacattcctcatgatcaattttatttctcataccattttccgtggatggcaattgacatgatcaatctccatccaccacgtctcttcttcatacctacttaaattcaaaccacaattaattttaaactttcatcaactcacctcaattatttcacatataaaaaaccaataacatgatcttattcattcttcaccaataaaatcaccaatgccatgcatggttcgatattgggtcaacatatatatcatggtcaaatatgaacttaattaaggactacatgaaaaaagaaaagaccacttgtagtgttaattaggaatatgatgatcattacatgataaatattagagtacttttttttttttgttttttttgaacataaaatattagagtacttgtgtctcccatatatatatatatttatttatatttttcccattatgtgggatatttttaatatataagcagtgtgaaaatgtttgccgtacttgtactccattatgtttatgatttcatcatatgtgcattgatataaatatatgtatatatgtatgagttcgatacaaatttgtagtgattctagtgctaattatatatacatactatatagtatgtgtcatgctagctaatgaggtattttagttgcgagaatcactcaaaaaatcaagatatactttcggtttcgaatactccaatgttgaatgaatgctttaattatgatagtccaaatatcaaaatatcttgatcctatctcttggatcaaaatgtaattttgtttattgttattagtttcactttctaccaaatataaaaaattaatgtgtagcccaacaagtcatttttttatgaccaaagaagaaggtggaattattgtggataccattaaataatggaaaaaaagtaatatttaacaatctatatattatctctatatttttatgaaacaagtctaaaaaagaaataagttacaagcaaccttaaaatgaatacactccattaataggtggaaatcattattaaacatatatgagaaatgattaagttaggtgtagatatcaaaaacatccaagtagatatattaaaatattcaaatatatatatttatagataacaatgtacgtgagagagtatacaaagatgtgggaagaaaaaacagaggataatataaacaaatagaagtgacccctcttagaatgatggatataggactcaaaacttggtataataagttattgctctttttctttctctcagctgtggagctttattcattttccacctaaattcgagagaaatacatgggtactttaaagtcttaaataatataagaattttttacagttaaattctcttaattattattttacttgtgcttaattctttacggtaaaatttttcaaattactgaactggtatagtaaatttaaggtaccatctacttttcacagttaactgctaatataaatagtttatgtgtacacttttgtattatattggtacaccaagtattattatttaaaaattatagtattattatttaaaaattataaaattaaaaattataaaaattatttcaaaattataaaaattatttcaaaatttataatattttttatttttttaatattttatattttattttctataattttatttaattcaaaataaattttgaaaataatttttaaataataatattaggtgtcccaatataaatgtatgtgtacaaaagtgtatacataagcagttcatatatagtgatacttaatcggatgacactttaaatttgttattaattagtagtttagagaatgacaaaatttaaacttagaggatataaatacaattaaaacaacagtaaaaataatttaattaccaaaaactcataatatataaggtgatttgattactatatattattagtataattaattaaaatatcacattaattacataaataatatataaataattactaacagattatattcaccaattaattaatatggttactatggtattaggcacctgaaagctgcctaataagaatgctgaaacatgaataatagtttgtatggtggactgtctctatttttctgcaatctgcacatgaccactagacccctctaacatgcccacatatttattatattttcttaacattttcttattcacctgtcttataggcacagctcttgtgacccaaaaaaaaaacacccttaattaggcagtgtgtatatttgacttgtaagacagaaatttataataagctcccaatttataataataattaatgactaagtacttggatatatatattgaaagtttttgaatatttttatttttatgatatattgaaaccgtttgtattgtatgtataactttagtagtaatatgtcaattaataatgaccaatcctaatatcatgtatatatatagatcccaacttgataacactgataaatttgaaagaaaaaaagggggtcaaatttcgtatgtgtacatacaaagaggtaaaacccgttacttgagaattgagatatatgaaagccccaactattatttaagccatatatataggtagttggcagggccggcactaggcataagcgggctaggcccgtgcctagggcccacacttttcgggagcctaaaataaaaaaataaaaaaaaattattaagcttttatttaagtaaattttaagtgtattatacgcaacaaacatttatgggttcaaatcctataacactatttttttaattttttttgtatatatttttgagggccccaaaatttaatttgtcttgggcctatatattttcagggccgccttggtagttggtagtatggatttttatttttgttaagagtaatgagagaaaaaattaatatagtttattgtctataacaaaattaagctaattaagttcatccatgaatcacaatattatagtggaaaatagaaagaaagaaaagttagaagagaaaagtggaaagagggtaaaaaagagtgtttaattttagagaaaaataagaaatagggccccacgaaaattaattcaagtaaaaatgaagagaaaatggaaaaaaaaaataataataaacaaataagtatatgtgaatttattgaattactctcacaaatatttattaaaattaaaattatataagtaaaatagttattttcatgaaaaaattttctctttcttatttaccaaacaacataaaataatttccctttccttcccttcatagtatttttccttctaatttttttcgtccctccaaatttctttctttcttactaaacataggtagtttttggttaaaaagaatgaaaaatataaaaataataatgggaatagaaactagaataaaatttaaaatgtataaaaaaattattaatttttttcccatcatgtattagaatagtctttcttctcatttcaaaataaaatagacattccactaaaatagtataaagatcatttccaatactttaatatgcaaccgaacaaaaaaaataaaataaaaattatttctttaatatgcaaccgaacaaaaaaaaataaaataaaaattatttcttttttattctattttattttattacctctaactaaatgtcatcattaaataataaagtatataggtggcaattatgtttgtatagagtaattaatggtactattatttttgttaaagtatataataattagctagggtaataattgattagtttcctaatatagtggtaagaattgtagtttgactggatctatttatgccagaatgtttacaaatgcctaacttaattaaattgaatatattattttcccatttttctatgttttgaaacacacggcagccttttaaagcacttgtgcagtgagcttgcaaaagagtaagagcttcatgtttttaagttttcagctttttctttttctttctagttttagtataggcaaatataatcaaagcatatcattcttcagctttgtagaggacccacttatatatatatatatacatattcttattatatatacagtcctctcatgtcatttgcaacataataaattatttttatcattattatttgacgagggttaaggattagtttaacttaaatcaaatggtacatgtgttgtgtttggagggttagttcgaatctcaaattatatattgtaatatataaatgtttatttgaaaaacaagtacatacattgttcttccaaaaaacgaaaaaaccaaaattgtttacaaaagttaaaataataatgaataaataaaaaagaagagaacatgtaataagcatgtttgatttaatgcaaccagtattgtaataatttttttttttttttgaaacaaagattgcaattttcattaaagtaaatcagttaacaaaatag

SEQ ID NO: 43564 - DNA, 2470 bp, Cannabis sativa
aaaaataaaacagagaagacttgcaaattggtctaatttgattaaggtcttgttaattacattgctgattgattaaaccaactaccaaattggtaagcttctttatttgtgtttaatggcatttttccaattgaaaatctgttctaagttgaactcatcttaactttctgatagattggatcaaagctggctcaaaggtgtgactttgaaaatgcatgcaccatggttggatgagaagcctcagaagctatttctgtatttaacttttttctcttttcttttaataagaaacagttactagttacccatttgttaaattaacccaacttggggttttgaacccccaaaacctcttcttacatagaactacatacacacccaatgtatcaactcattcattatcttgaatatttcattaaaagttatgtaaatccaacaaggaacctcttctgtaatgctgttgtattacaaatatgagagatatgatgatgatgatgatgaggcttttggcaataacagttaccatgcatgagcttatttttggctttttcttgtaaaaaagttaaagagatgaaattctattcaattgcatttgttctattgtataagttaaccattgggaaaatcatattagtcttcaaattagattaataccagaccatacatatgcttaaatcagaagattagaagaccagacaactagtaatttacagttgatttgattgcatccaagatctgcatccattgaagaacaacaataaggtcaataagaattttcacttgccaagtttagaaatttgtaaaccaaaaccatttcaaattacttttattcttaccttgttcttggtgggtaagtagaatggctcgaaaacaaggggaaatggtgtgtccaaaccacatactctacttacaggtgcttctaactggaaaaacacacaaagtttcaaaaagggtttaaccaaaaacaagaatcgtcttagtgaattacccttaagaagcaacgctcgacgattgaagcagatatttcagcaccgaaacctccagtgatcggagcttcatgactaatctgcataaaaagaaaaggaaatcactctgtattgttactaagaactcaaagtgatcttttagttgtcaccgaaaaagagtttaagacaaggtacttacaagaagccttccggtttttctgacagaggcttcaactgtttccttatcccaaggtattagtgtctttaggtctatcagttcacaagaaataccatcctgaaaattgattacaaagcttaaaaaccagaccttgttaaccattttcaaccaaaatgtagttaagaaaacaaaaagcttactttttcagcatcaatgcaggcttgttccattacagataactgagcaccccaaccaacaagtgtaatatcacttccttctctaatcacctaagcttccaaaaagatttaagctttcactacatgacactctttaacaacagaaaaatacaactgaactcgacacaatgtagtatacctcagcttctgataaaggcaacatataatcatgctcgggaacctcttcaactgacaaacgatatagccactgaaccgaacgaaaatggtaaagtttcaatctagatttcttgttggaactgatgtattcaacagaaagacaatacctttggttcgaaaaacaaaacggggtttggatcgcgtatgctagatagcaataaccctttcgcttgcttcgggcttcgagggatcaccacctatatgaaagagtatgagaagttgaattcaattaaccatttcacaagttatgttcaataagctgctccatattcctttactacacaaatttaaggtatctaattattttccaataatgtcaagcaaaaaacttaggtggcgtttagttggagagactgaaaacataaaaataagaatgtgattgggaatactaataggaatgacatttcaatactttaacaacatgttggttttgtcacaatatatttcatgggataaagtaactaagaaacataaaacatactttaagaccaggaacatgacaaaagaaagcttctggtgattgtgagtggtaatgtcctccatgtcccacagctccataaggggttcttatagttaagcctaaggaacaaattacattaacctcatcaatgaaatgaaaaacgaaattaaggaacagcacagatgaagaaaaagaggtttaaaaaagttgaaaatttaccaccacaattgaactggttcccacttctgtatctgaactttgcagcttcatttacaatctacaaataaaaaagaagtctttttttcaagattgtgttttagtaagagagagaagtgaaattaatgaaaagggttgaccccctcaactggtataataatatcattgtactaattgaacaaatatatttcaataatcaatcttaatcaaattctgttccataataaatataaaaaga

SEQ ID NO: 43565 - DNA, 1384 bp, Cannabis sativa
tgcgctggagtttttccggttgcctgcagcgctggttccgtggatctcatctttggaggaagcggattttgtgggggctgccgccggagcaggatcggcggacatcattggttatagttcggttaaataaaatctccgtatagtaattgtgtagtggaaattgaattatttttggttatatgattttgggattggaagttggtttagtttccctttgtaagaggcaaaaggttttgaagatttaattgaatagtttcatgcatgggatgtagagagagagtggaaatatattggtaaagagtacctgtgattttcatcaaagaggggatttgggtttagagatggtctatttatatatttatataataaggtggatttagtggttggatctggtggaataaataaagcttaagagagagagagagagagagagagagagagaagtcggtctgtgtctatagacatgtagagagagagagagagtgaagcgttttaagtagtaagttgaagtagagacaaggaactagactttatatgcatgtaattaattagtaatctgaaactgatcttatatagaaaagacagatacatacaaattctataataaaactacagaatttgaattatagttgatgatttgagcataaagtattattgaaaaagagtaatatctgatgactacggtatattttatattgtatgagaattggcatgtctgatttttctactttttttaaaaggcatatagttttggtcattatttatttatttgcaagcgaaacacaccatatgtctaattattatatatattaatataattaatgctataattaaggccatttcttctgtaataggcatacacgtatatgtaataataataataataatatgtagttaaattatagaccatgtggtattgaattagttagcgtacgtatataattaataatgttagtaattaattacttaacgctagtttggaccctagattgagttaagtagtgggagatgagtactctcactatctcactaaatttataacacaacttccaattaagcccaaatcaaatttgtagagcttgcgtacacactcggtacaacgccctacacaagactattgtttcttgccaataaaactttatgagcgctacataaatttattattttttttaaaaaacaaaaactcctcttattcattggaagaaattaaaaaaatatacaataataatccccataatatatacctaaatattacacacatacaaaaatagtggacatattctagtttaaataaaagtgatttgctagaaaaaattgtcacgtgatctctgagtaaatagtgtgcacatttcattactttgttaattattacttaatcgtttat

SEQ ID NO: 43566 - DNA, 2870 bp, Cannabis sativa
ccggagtccttggcttgccctgcttcgtcgccctcgtcttcgccatagcaaccgctcaaagagcagagagaaagctagagagagaaagcctttttattttttaagcattattatttctgtataatatatatatttctctttaagcactagccaaacacactgaaaagaatatgatttgaagaatcgtatataacgacgaaacagcaaaattggagtattatataataataataataataatatagcataggaaagaaaacaatatctgaaaaagtatagtctagaatagatggtagcatttggaaaaaggaccacaagaccattttggcaacatgaagaaaaagacgtagagagtgaatagtcaaattgttatatattatatgtacgtatgagtgagaaagagagataaagagttaacttagcaaagcaacaaacaaatgaatagatacatatacatatataatggccttatggggactccgaatcaaattgaccaacatttcgatatggtgccccaacacgcctgccccccactctccgatcacactctatataactataaatatagatgggccactctctcattcaattacattttctcttccttctatcactcttgcttatctcaattcctttcataataaactttatattttagatatttaaaataaagggataagcttaggttaatgatgattatgatgttagagagtagtagaagtcatttcacacaattatagggagtgaaaaataaaggtataattaaggtgattattaacttttgtttaattttttgacccgttatttactacgacagcactatgtcatcttgagctaataaactaagttactatgcttggacttttatatgttattaacacacagaacaaagctacagagatgtgtattatctatatattaaattaatgaggtgaagttgatacaatttttggtggcatacatacatgaaataagagtgaattggtaattgatgatcatagtgatagatctatatgtaaggtgtaaggttaaagttatatatgtggataataatttatttatattcaagatgcaaaattgtttaattagtaggtatagagttatgctggtaatgtttataaagtgtgagtgaggacaatattgaatgtcaatattgaaaatcaatatatatatttatatatgtgattatacattaataagctaagtttgtgactacaattaataatacaatacaatttcctcttaggacaatacaatacatatttaaaatttaaaaaatatggtaccaaaacgttgacatgttattacattcaatggttagacttttaaaaaaactattatgtaaatgatattgtacaatatttatacgtttaattatacttagaaaaaattaggtgacagaatatgcttcgaaatctttctgtttttttaataatcttatatataccttgtataaatatttatttgaataccttttataatttgggccaattacatccaaaccaattataaactagattatatgggtcagatatcttttctaatctattggtgaacgaaaagaaagaacaaataaagattataatgtaaaggctatatagcaggtaggatggaaaaatgattgattggtaggttgggtggtattagtgagatgatttaataaaaggtttctataaatttaaaactttaatatcattaattagtatatcttattgataattaggaattaatagtttgtgaatgaaatatattagacaaagaaattggatgacagaagggcatttaattctttgagctaggaacatgcatgaaccttataggtctccctttattttattttccaaaatttccatgaccaaaacttccttttttttaaaaaaaaaaaaacccaattaaatgacaacaacatattaatctaacaagtcttcctggttaaaaaaaaattgaagggaaattataacaagttatgacagttgtttgatgatgtattttagttacttactgccacgtttaccaatggtgagtgagtcggataatatataataagatatatataacaaaataaaaaccgtttagcgccgtcaaattcaggagtcttaaactagagtcagaagacgccaaagaaatgccacgtcaccaaattttaattaattaatttaattatttatttttttggccgatcatcagtttgtttttcttttttaattgatcaattttgagaagtgacccaatcaaatcctccaatagccttcatgacaacgtggtgacagccttaatccagttgtcaaatgaccccacttccgcacctttctttttacccaataatattctttccattttctcacccttttcacttaatttcttttccaaattctgaaattatatgaactgtctttttagttgtgttcgattaaaaaatggaagttaaaatatagtaagaataattatttctatggtatatatatatatatatatatatatatatatacaaggttgatcggatcaaaataacattgaataacaattatatttaaaaatgaaggagagagaaagtgaagccaagaggataaaacaggtaagcagccgacatccattttagtcatctcatgaagcagcagtagctagcttggctagctcccattctctctttaaacccataaaaacacagagaaaaaacttcaatcaaaatccaaaaacgacatcataaggtcacaaaacgacaatggatccttgcccattcgcccgcctaatagtggagtctctggctctcaaactccctcaccaagccaccaaaccggccggtctaggcgtccacccttcagccactccatgcttctgcaaactcagcattaagaatttcccctcacaga

SEQ ID NO: 43567 - DNA, 3221 bp, Cannabis sativa
ggataatgactgctatggagtatttggcagtgctcagaggcatattcaaattgtctctacgttgtgacataacagtggcggggtttggtgggtaagtggctatggtgttagaactggttccaagacatgagctaggcatatatattacagacaaatcagagtaaagtatcttggttctggtttaaaggtgtgcccgaagcaacaagtgaagggtgagtaaactttggggcaatgaaacatttatcagaaggtgataggttagtgaaggtcgttgctggtgtaaaatggacagtgggcattcaagattcttttttatccgaaatggaatattgttgaactgagatactatttgtcaagttggagatagtttcccccttcaattttggtgtagaaccatctagtttgaggaagaactagcaaagtcattattgtcaaactcatcttggtgttgttgagaagactcctctcgaaacagttgtcgaggctgcagttgtgttctgccattgaaagatggaaccgtcaaaatcagtgaagacctgggtaaacgagtgagtaaaggccaagcatttcctttggcaaagtcagttctgtatcaatcatagccacaagttaggagtctagaacctttaattattagcctacactcatgttccggttcctcaccattgtcaagcttttcgagaaagatcatacatttattaaaaggatggcctaatctttcacattccatacaatattctgacaatctctcataatggaattcaaccaaaatttatctcgaacttgagatagtgtgatcattcaacccctcattaatggttttgggacattaatgtttactcgaatacgcaagaaaagatcccatctttcaaagagcgaatcttcaaaaactttaataaattcaccaattattttaccaagtgcctcaaccaatttttcagttttgctcataaaaggaaacctgtatacttgtatccagaattgtaaatagataagatttgatgtagtgcacttccacaaatattacccatgtaaagcacgatgtaataattgttaaagtgaaatggttctcaagttattaggacacattgcttatctccttcacacccaaaagtaagcatgaacatgtcttcaacttcagaaattttcatagagaatcaaccattccaatgtttagtttgcccttgtagagtagaaagccaaacttttttcgtggtcaggattcgtgcatacagaacacgatcaagaacaaaatcagaattaattggttctctaatgttaaactcaaaagcagattgttctttctcaatgagagttatatttttgctttttattttatcatttaagggatccatgactattatttttgtaaactacaaccagacaagctaagtatactttggattgaagggagcagttgtagcaaaaagtgggaaaaaaatcgaagaaagatggaagtaaaattaaaagaaaaaactagaaagaaaactgttaaaaaaccatttaggaaataaaggccacaaaacaaaaatgggcagttgtttagtattatattattatctacaaaatacatctttatctcaattttaacgattaaatcaatattaatatatataatataatataaaaaaattaaataattaaaattgcgttcttgaggggcgcctcattgcatgcaatagactgaggcatttttttatcaccctaaggcgtttgcatcttcagaaacgtctattgcgtacacctcaaacgaatgaggcactcaaaaattattaaggcattgtagatttgtgagacacacatgcctttgaatttatttgcaaaatattaataagttccaattctatttcttttacatgacataatataatttattataagtgataggcatatatatatatatataaatgtagatacaaacaaactatcttcaccaactcacaaaaataataacttaactattttataagtatatggttgcactcttaataagtattctcatatatgagtaatataaaagaaatctcacttttaaatatagtatggaattattttatcggctaaaagagataaaaaaaattgagtttattgtatatttttgatataaatatattttgaaattaatagtgtaaaacgagagtttatttttttaattaagtagataaattaagtgcataaactcaaattaattctcttttattttagtcattaagtaacaatcaattttttaatatttctaaaattattgtttatagttatttttttttaataaaaacgttcgatacatatataatttaataataaacatattaaaataatcaaagagtatttaaaattcgtggaaaatatttcatccaaataatttatttatttatcttaaatatatatagctattaggtacagtgcctaacactactatgatgtggcgtcttacaaatgttttagccatattttattattgttattaaattaaattatgtgagattggatatttaattctactaataacaatataatatgcaccaattttaacatttctctattcacaactaattcataaaaaaaaaatataaagtagctagagatcctttacatgataacaaacttgaaacaacccatagttgagaaaattttacaccaacaccaaaaaaatattgcttaatgccaaacaaagttctcataacaaaaatgtatactatgcaaaaaattgcatcaaaactattatacatctacattaatcaataaataaaaaaaaaaaaaaagaatttacagctacaaactaaattttaaatataagggttagcattcgatcaaattcaatatttttttttaattagatctaattaaattaataattagatttaaaaaaatcatcattcattccaatttaattagacttcaaatccaatataatccaataattttttaggaataattccataaaaatataaaaaaattacaaaaatacggtcgtacagaattttaaatattttcttatggtttttaaaattttatttacataaaatactatttttttttatgtatttttatgttgtactcttattattttattatttatgtattatttttgatgttttatatgagcattacatatctattctatataaaatgtggctatgtaacaaaattcttggtttaacgatttttttttttgtttctaaattaactttaacatgatatcttttattaattttataata

SEQ ID NO: 43568 - DNA, 2256 bp, Cannabis sativa
aatcactaaccaaacatgacttgtgttttaaaaacttcagaaactattttttgttctcatttcttaaaacaattttttaaaacaaaaaacagaaaacaataccaaacatgctttcacttgcttacttttttttctttacttgcactatttggccacaatatcaactattttgtattgtgggaacaatactaagtatttgtttaaaggaaagttttaattatcataaaatttattaaatgaacttttaatttaaaaattttttgattaggaaaggtaaaacaatatttaagaatattgtaacgtgctttagactttagggtgttacacatctcatctaaattattagtacatgtgttatttattgatttaagagagtgcacattgataattcgtgttatcgtgttatgtttgtgttaacaccaatactgaccctagataaaagcgggttaggtccgcacttaaggctcaccaatcttagaggcctaaataaaaaaaatatttttaaaaaaaatatacaaaatttgtaataatttttaaaaatactatttattcttataataagtgctcactttttttgttcctaaggcccatttcaattcaagatcgaccttaatcaacacatttagatacgatacgatacgattaagataaatacgaatacaacacgtttataaaatatgtaaaaaattaaaattcaaaaacgaatacgacacgattaattagtgtgtcacatgacaaaataacacaattatctagataaacacgatttttgtaaagaaaaagaaaaaattaataaaactatggaaattataattatctcctgtcaatatgattatgacatacgattgaggtaaacacaaacacgatacaattattaaacttgtcaaaaactcatttatttcatgttattttcaagttgtgctatcatatcttgacgagaattactaaaagtatcatcggtgtctagcattctcctcagtatcataccgctattgatataattaagtatcgggtcctatataacttacgaaaataaaaaatatcgataatcaattgtggaatgctacctgtggaagattggtgtccataatatcttgacccatattgccagcctcaaattatagtgacctatgttatggtacaccttgagtgtctatcctctgataaagaagttccatacttaatttcttctcatttattatgaagataagagttaggtatctaatatcaaagatatttttttcttttatgaattgttagattttaatatattgaataaaatactttgcttttactctacaaatattaacttaccgattctcatcctctaaaacttttcttttcaaaaattttcttttgaatgataaaaatggttgtaaatatttccattaaccaaaaaattaaaaaaaaaaatagcaaacaaacaaacctaaaccttacatttatttttattattttaacaatgaacatatatcaatttaaaatatttatccaatcaagtgtataatctatcaagttattaaaaaaaaagtgtataatctatcataaatgtatgtacagttaaattatgatagcccataaaatataaatactttaagaaaattgaaaagcaaactttatcttgttgtgaaaaaattaaatcttagaaaaatcataaaaggtaagggaaatttcatttttaatgcttaaaaaaaatactctctaacaaaatttagactcctaatattatttctaatttctacccaaaatatcctccctttcattttctttctctctttgtctctttctctttctcttcctcactctctcttcctctttctcgcaccactgagacactcaaactcagacactgagaccaccaaccactactactgaatctcttctcctccaccaccgaacctcctcatctaactaaaacttaatccaacaacccccaaatccttctctcttcctcctattcggcttctctcaaccaccatcgccattcgccaccgcccacctgaccctcccccaaccaaaagctcattgaattcgtatttgtttgagacattagatggtagtggaggggatgatttgttggccaaaattggattattgatgggttatcgatagtttatcgatggttttgtctgcgcactgctttttttgagtgcaaacagaaatcatcgataatctatcgacaacttatcgataaatgtcatcgataaactatcgataacctatcgataaatctaataaaaaaatccaataaaaaaa

SEQ ID NO: 43569 - DNA, 3520 bp, Cannabis sativa
tttttttttgcactcatatcaacaaaataaaaccgaaacaccagaagcaattatttcagcactccgaattgcctctacacaaaccaaactgtctgattcaatgactgcctgagtgtagttgttgcactttagccaacttaaagcctcctttatccccataatttcagctaactcggctgggactttgccaatgtagcagccagcaaagacagagatcagatccctttgcgagttcctcaccacacacccatatccatgcttagaatctcgatcgaaagtggctgcgtcaacattgagcttaatgcctgaaaccggtttaatccaatgctccgagtcgtcgcctgctttaagtggagacagcgaagggatattctccctaccttgagctttgagaaattgattaagactcgagttggcgaacacgaccacatcccgaacagtacgaacacgctgctgccatattaaatcatttcttgctgaccaaatagcccaacaaagcactacaattttacccaaatcctccttgctgacgagatttatccttttacttgcttttaattgagtttcaggtttgcattgtcttaccttcttgtataatcttaattcctctaatcatcatgtttccttttttattggtactgataacaattagaatactgaaacactcctgcactacttgcctgaatatcaagccaatactaatttttagattctcattaactcttccttggaggatagcctcatttgggggtatcaccattatgacattttaactgataattcagcctatcacccggctaactaactccacatctaatccatcattgccctctacctcctgtgaagaaatgaaccttatttcccttattttccatgtggtggtttatgtggtcctttgtcttgacaagtggcttctttctatttggcagccaatattgaagatcttagggaagatttttaccgttgcatttacaatgattagataatcattaggtgtacaaaagatttccttttcttttagaaatgaatacagctgtaatgagccatttaggctcctccttgtacacgcaggactttggcctggtttataaatagattttactcagtctccattttcttgagctgagattttacaattctattatttctaattttcagcttggtatcagagcaaggttttcaccatgtctaccgaatcccaaaacctagaaaacaatgtcctgctcaatcttcaacccctgctgctgcatcaacaattttgggtgcaagctcaagcacttctcagctcccaaacccagttacacatcacttcagcacactaaatcagccattctctttaaaactcaatagacacaactacagcctatggaaaactatggtttcaaccatagtgagaggccatcggttggatggttttcttaacggcactaacatttgccctcttgagtttgtggatgcaggtattgtaatggaaagcatcgacacaggagactctcttgtcatcaacccagcgtatgaaaactggatcataaatgaccagctactgattggctggctatatagctccatgatagagactatggcaacagaggtgatgggagttgcatcagccgctagtttatggcaagctttggaacaactatatggtgcacactccaagtcaaaaatggatgaaaccaagacattgatccaagtaacaagaaaaggcaacactctaatggtcgaatatcttagacaaaagaaaatttgggttgaccttcttgctcttgcaggagagccatacccagaatcacaacttgtcactaatgtcctctctggccttgatgttaattacttaacaattattttacagattgaagccaaatctaggacttcatggcaagagctacaagaattgcttctcggttttgaaagcaaaatagaaaggctacaagctttgtcatccaacaacaagttcaacaactatctgacagaaccacaggctaatttcgctcaaaaaccatagaccagtggacatggcagagggtccaacagccagtcccaacattatggtggcagaaactccaatagaggaggagcaaatcgaggtcgtggcaggggcagatttagtggtagatcgaatggttctaagcctacttgccaagtctgtggcaagtatggctactccgtagccatttactataatcgctttgatgaacaatacatgggttcagacccaaacagcaacacacaacacaagaacaatccctctgcttttgttgccacacctgaactgctagagagtgaagcatggtttgctgacagtggaaccagcaaccatttcacttcagactctgcatcaatgacacacaaacatgattatggtggtaaggagaaagtcacaatgggtaatggtactcaactagctatctctcatcttggaaatgacattttatttactgattcaggacagcaactattgtcaaaagagatgttattagttcctgagattgctaaaaatttgttgagtgtatcaaaactcactcgtgacaatgatgtgctaatggaattttattctgattgttgtgttgtgaaggacaagcaaacaaggaaggttctttttcaagggatgcctaaggatggcctctaccaacttcaagcacctcagtccaaaaacactacccgaagcctaagtcaaatcgagtcaaataaagccaactgtaataggttttctggtgttgctgttaagacaaaaaaagtaccactcagtcaaaaatagatgagtccttagtgtctaaatgtgatgtgtggcataggagattatgccacccatcaccaagagtcttgagtcaagttttaaactcttgtcaaattaaatttccaagaatgaaatgatacatttctgtgatgcttgtcaatttggtaaatcacatgctcttccttttaaaaattccaatagcaaagctgccaatgttcttgatcttgtgcttagtgacctgtggggtccctcaccaattgtgtcaaacaatggctttaaattctacatacatttcatagatgattgcactcgctacacttggatttatccattaaaaaccaaagctaaagctagtgcagccttcttacaattgaaagcctttgttgaaacacaatttgaaaggaaaattaaaagacttaggacagattggggaggagaataccaagcttttcaaaatacagttgttgaaaatggaatagacttccatcactcatgtcctcacacttcagctcaaaatggtagagctgaaagaaaacacaggcacattgttgaaatgggcctcacactcttagctcaagctcaaatgcccttaaagtattggtgggaagctttttaaacttctgtgtacttaatcaataggttgccaacacccattcttgaaaataaatcagcctttgaaacactatacctcataaaacctgattatgcctttcttaaaatgtttggtgtggcttgttttccatgtataagtgtaatatcccaataagcttaataattaataat

SEQ ID NO: 43570 - DNA, 8019 bp, Cannabis sativa
cgaatttcgcgaaaaccgacgctgaaagggcttaaaaaccgcctctaaagggtgtttttgtagtagtgttatgtgactaaaacataatatttagatactcgttatcactaatttaatttagccacaataagtattgtgattaaaacacatttagttaattacaacaaattgtgatttttgtgactataatatctttagttacaaattttttaatcacagtataagaattattatttataattagtcataatttttttacttttaatcacaagttttattgtaacatttaaaagtgaatttttttagtacattttaatcaaaacattcatatagaatttttgtgatataatatcattttagttacaataaaaaattactaatatttacatatataaatcctcattaatttaataacaaataacaatttttgttactcatacttttagccacaattttttttagtgatgagttatgatattttctttagtcataattcttttacttaaaataaattttatggtagtagtacattattttaagtactttagcataaagttgactttttcaacagggaagtagtagactcgacaataacttggaattatgagatgaaattctaattaaaaaagaggagcaagtattgaataataaaatatctgccaaaagcaaaagatccaagataaatttctttctttcaaaataaataaataaataagattttatatggttaagaaaagatgctatgagattttcttaccttttctttcagcttttcttttatgtacaccaaatgctatgatacctaacaatatagcaccacttgatagagctaaaacaaatttaatacgataattattttaacatttcaccactattgataatattatacacaaatttttaggaataatataaacttaattaattatattttattaccttgtaattctggtgagtacttgcgaaaatacaaatcatctccattattatcttcatatattctaatatcaataagggtttttgaccaaacaaaacaccctaccaagctaatgtaagaataagctatgcaagaacaattattcatacaccatttaccacatgtatcgacatcatttgaggcaacttgcacaaagtcatagaaatcaggaatacgaaccatagacatcttttcaaaatagacatcttttcgagttacattatttttcgagcaaggtaattgagtttctctaacacatcctccactccaatttttttcgctccactctttttgcgattctggcttaaaccctcttaagcacttacacaaaggaaactctgtgcttttgcatgccccaaatagctatacattcccatagtcacctttatctttcatcacaaccattattgttccaattggtgaaagatataaaatcgagttgttgaactcatcgtttgtattcaaatatgttgttccttggtctacattttcgactaagttgaatggagtcttatacaaagaatatatgtttgggttgccattactagtgaacctcaatttattcgaaggtccatttttcgagtaaatcgtagatttagatcaattattaattcaaatcccaatttcaggaggtgttttctttctgattcccaaagtaaaatttccaggtgacgaatcattttcactttcccacgaagttagcttgtaatcttctcctgttttgagattgaaacccaaaatggagccagataagaatgtatcacatggattttcgaaactctgccacaaattttcacctgaagtaacatctctaaggacgaagtttccattgtctaaaagtacacccaacatactactactacttctatttgatggaaggtcaacgttggttgaccaaattgtcgaggaagaattttgtagtttttcgcgttgaataagttctagatttccattggtgttgatttgaagaactgctgatgaagtagagcttgtaagagaaagtggatgctcttggttgccaacccatacaactgaacgaggagaatcatccttataccaaatacccaaatattgatttgttgaagtgttgttgggagtgcagaagcctaattcaaaaacttggttggaagaaacaagagtttggtttaaagaaagtgattttgaagatgttagattagaaaagaatatcgatgagcaacaatatgtggatgaagataacaaaattacaacgatcaacaatagtgtagttaaaggaggtgtcattttaaagagaaaagctagctagcaagctcaagaaattaatgttcagtgtgtataaattgttaagaatgacactctgtcatagctatctttattttactgtaattaagtgtgtttagtgtatgttaatcagtaattagttatatgtatgtgtgagtgatgtattttgttagtgtggtctcttttattccaacattagggccacttgtccatttccaattggtgcttgtatttcttatcagagtatatatagaaaatgttccctcagcctcctttgagctgagttttccatctttgcatttttgcaaagtttaacttggtatcagagccaaggaaagtgcatcaatgtcgttgcactctcaaactccccttgtcaccactacagctgcagcaggtgctgcaagctcctctgttcctgcctccatcaactacactcagcccttcagtacactcaaccaaccatttcctctgaaactcgattgcaagaactacgttctctggaaaataatggtgtcaacaataatcagaggtcatcgcctcgatggattcgtaaatggtactcttccctgtcctcctgagtttatttctaaccctgttactgcagaaaatggatctggtgttgaagtaaatcttaatccagagttcgaacactagattgtgagtgatcagctcattatggccagttggctgtatagttcaatgaccgaagggattgcaacggaagtcatggttgtgattcagctgctgcactatggaaggccctcgagaatctgtatggagctcattccaaatctaaaatggatgagactcgaactctgattcaaacaactcgcaaaggctcgacatcaatggaggattacttgaagcagaagaagaactggtcagattcacaagctttggctggtgaaccttacccagaaaatcaacttatgtccaatgtcacctctggtctggacattgaatatcttcccattgtgttacaaattgaagctcgtccctcaactacttagcaggagctgcaagggattctactggcttttgacaacaaaatggaacgtctccaaaacctaagtctcaacaacaacaccagatctggtaagactcccacttctcctaatgcaaatttggcaaatcgatccaacaatggtggtcgaggatgaggcaacagtaattcccattcacaccagactaattaccactctaatcagaacaacttaggaggaggtcgtggaaatcattctcgtggtgctggaaacagtggtggaagaggtcgtggtggtcgatcaaatggccccaaaccaacctgtcaggtttgtggtagatatgggcattctgctgccatatgctataacagatacgatgaagcctgtatgggttctgatccaaaaattggaaatcaaaacaaccagaaacaacaagcagctgcagcatacattgcttcaccagaaattgttgacagtgaggcatggttcgtggatagtggagctagtaataatgttacagcagatgaaaataacatgatgcagaaacatgactatggtggtaaggaaaaattggttataggtgatggtaatcaattatgcatttctcattttggtactggaaaattaaacactaacaatatgcatagacctttgctgcttaatgatatgcttctggtacctaagatagctaaaaatttggttagtgtatctagcctaacatctgataatgatgtgtttgttgagtttcaccctgatgtttgttttgtgaaggacaaaatcacaaagaaggtgctgctagaaggagtgcttagagatggtctttatcaactcaactcaggcctcaacaagtctggttatggtcagaaacagtgtcaatacttctctggtgtctcgagtctgtcaaaatcaagagttgctcttgcaacccgttttcaaaattccaagaaagatgtctggcataggcgtctaggtcatccatcccctaggattcttaaacttgtttatgagtccaacaatgtaaaaatttctaaagatgaaatgaaaaacttctgtgaagcttgtcaatttggcaaatcacatgcattgccctttaagttatccaattatagagcttccaaagtgcttgaattgatccatactgatttatggggacctgccccgattgcatctaatacaaacttcaagttctacattcatttcattgatgattttagtagatacacatggctttatcctttgaaacaccaatctgatgcactaaatgcattcattgattttaaggcttttgttgaaaatcaatttgaaactaaaatcaaaagcattaagtgtgattggggaggtgaatatcaagtgtttgaaaacctggttagggaaaatcgcatctattttaaacactcatgtcctcacacttcagctcaaaattgaagagctgaaagaaagcacagacacatagttgaaatgggattaacccttcttgctcaagcaagcatgccattgaggtattgggttgatgcatttcaaacctctgtgtacctcataaacagacttcctacacccattctcaatggaaaatcaccatttgaaacccttttctgcagaaaacctgattacaagcaactcaaggtgtttggggctgcttgtaatccctgcataagaccataccagcaacataaattctgatttcactctcttagatgtatcaatctaggctacaatgactcttacagaggatataaatgtctaagcactacaggaagaatttatatatcaagaaatgtgtgtttaatgaggctgatttccctttccagtctggttttctgaacacttatgcaccaaaaaaacagttagtcattcacaatgagtcttggtctcaactccctagtataagcttcaaacacttcagtgcctctacaccaaatttacccactgctgaaccatctcaagcagctcctgaatcaacaccagcagcagcatcttctcaacatcaggtcagtgaaaataactcaacttactctatctttgatactcttgactatggtgttgttgttccagaaacagacattggtgcatcattgaatgacacagatcagggtactcgagatcctgctgatgaaacaccatgaagctgataatattgacacagacatcaccactgctggtacatcaacaggtgtgacagccaccaaaaatttatcaactcatcccatggtcacaagagcaaaagctgggatattcaagccaaaaacctatctcagcaaggcaaaatggtcacacatctgtgaggaaccaggcagcattacaaaaactctgaagcacaatggctggaacaaagccatgagtgaacaaatgaaagctttgagagccaacaaaacctacactcttgtccctagaaaagatggttacaatctaattggttgtaaatgggttttgagatttaaggctcgattggttgccaaaggatttcaccaaagagcaggcttagactatggagaaacattcagccctgtaatcaaggcatcaacagtgagaatagtgttaagcattgctgcatcaaggaactgggacatcagacagttagatattaacaatgccttcctaaatggaagcatagaagaggacatatacatgtgtcaaccagaaggctttgaagatcctgaaagacctgattatgtatgcaaactacacaagtccttgtatggattgaaacaagctccaagagcttggtttgacaagctgaaaaataccaaactgacttggaattttaaaaattccaaagccgacacttcattattcttctacatcagcaacaatgttatcattcttgtcctaatttatgtggatgatattattgttactggtaacaagcaaagactaagggaatttgttcaacaactaaacaagcacttcacactcaaagaccttggtgatctccacttcttcatttggcattgaagttgcaagagatgaaataggtctgtatctcactcaaacgaagtatattgaggatcttctaaggaaaaacaatctgcagcatttgaagccttgtccaacacctacagtagctggaaagcctctgtccattgatgatggaaagaaaatgcataatcctacagtttacaggagtctcattggggctctccaatatttatgtcatacacgaccagacataaactattatgtgaactatcttagccaattcctcaaagctcctacagacacacattggaatgcagctaagagaatcttaagatatctgaagggaacaagaacacaaggcatacacatttgctgtagtgatagaatgaacatcactagctactctgatgcggattgggccagtaatcctgatgacagaaaatcagtaggaggctattgtgtttattttggtgatacctttgtgtcctggtcctccaagaaacaggctgtggtgtctcgatccaacactgaatcagaataccaggcccttgctcaagttagtgcagagatagcttggatagaatctctacttgaagaacttaggtttcctcagcctgttacttggtgtgataatatgagtgccagtgctctggcttcgaatcctgtatatcatgctcgaacgaaacatattgagcttgacatacactacatcagagacaaggttctcagcaaaaagttggaagtctgatatataccctctgttgatcagattgcagattgcatgacaaagggtttatctcactcaagatttcagcatctcatctccaaactcggtgtgaaatcatcaccgtctcgtttgaggggtggtaagaatgacactctgtcatagctatctttattttactgtaattcagtgtgtttagtgtatgttaatcagtaattaatagttatatgtatgtgtgagtgatgtattctattagtgtggtctcttttattccaacattagggccacttgtccatttccaattggtgctcgtatttcttatcagaatatatatagaaaatgttccctcggcctcctttgagctgagttttccatctctgcatttttgcaaagttttacttaaatatataaggataattagttccctagttgagtttgttttgattaatatggttgagatgaagattgaaatttcttgttttaccaaccacactatttctatttcaacattttcaaagaggatgactcttaaattagatatataatttgatatggacgtttcaactacttttaccattttgtgagtctaatctaatgaattaagtttattttctaaacgtctctttgatgaagatatgagaaatttgtgtcatgaaatttaaggttaaacaattattcatggtatggaaatacaattaaatgtcttgtgtaagagtatttccaataattttttagctttatttttaaaatacattattaaaattccatttttattttattttataccatataccaacttctttaaaatacatcaacaaacctctattttttttttatatttattcatttcaaatatataatattaatatgtacacatatccccgtacaaaaataatacaaaaagttacttttagtcacaacataaatattttagatataaattgtcactaatttaattttagtcataacaaatattgtgattaaaaacgcatttagtcacaacaaattgtaatttttgtgactaatatatttttaaccgcggatcttttagtcacgacataagaatgataatttataattagaggaaattacacttattatcggattttagaagttcttatgataaatatgacacttttaaatttgaccaatttatatggtat

SEQ ID NO: 43571 - DNA, 1048 bp, Cannabis sativa
attgatacaacaattatacttgtatagagtgtttttttgttttttgatagatcgtatagagtttaattattacctgaatcctgaagcaataattgttaacgagaaaaaaaaaaacagtcaactttaattaaaaagaaaattaatgcatacgtagtttgtcaacttgttttggggataatcgatcaaaaaacagtcttgtcaagtttagtctgctgaatttgtcagcttctgtctatttttattttttattttttaattttttataattaatattagcatgtaaaaaaaatgcacataaaattatcatataatataaagtctggtgcattccatgaaagtatgtcccgtctattaattttatcacgttatgtggctttcgtttctttttcaaattgcatttatgcctgaatggagaaacagtataccatactcttctaccaatttatttattaaattatatggataatgatcatgaatgaaaaaacagtgaaaattatacactttaaaatcaataagttacttgtccaaaatacaatttggaaaactaccaaaaagtagtcttctaagatgatgagccgactatcttttttgactagcatcattttcgactgatatataggtttcattcaaaaactgcttatctaggataagcataacttttaaatcaactatctgtagcttagacccaatatctcactatgtgagttttatgtaaagattattagtacttaattattgaaattaggggtgggtatccaatctaatccaactttttgttgctcatccaatccaatccaattagtaattggatttgaaaaaccatcatccgatccaatccaattagaccttaaaatccaatccaatccaattactaattggattgcattggtttttttaatggatatccaattacacgcctaaattttgatattaacataaaaaaatatgaagaaaaatacgtaaaaattaaatatcacattttatttaagtttaatactccataaacatactatcattacaatgtaatgcaaataaaaattttaaataa

SEQ ID NO: 43572 - DNA, 3213 bp, Cannabis sativa
aaaaaaaaaaaaaaaaccatgtctcccaatagtttcataacaacaaattgtctaaccatttacaattacacctcactctattttccatttcattcgccatttttatagctccatctaactcgttctaattactctttcaaacccagaaaaaacgtttctttttttttctcaaagtcctacttttgatcatggttggttattcaaattccgatcatttcaatcactacccaggttagatctacactttttctcatctgggtaattgaaaagagaaaaaaatggatgaatcggaggagcaaaagaaggccaattttcccagaaacattttgtttgggaaatacgagatgggaaggcaacttgggcaaggaacatttgctaaagtgtattacggtaagaatcttgttacaggtgaaagtgtagcgattaaggttattaataaagatcaggtgaaaaaagaaggcccaattgatcaaatcaagagagaaatctcagtgatgagattagttcgtcacccaaatattgttgaactcaaagaagtaatggccacaaaaggtaaagtttattgtgttatggaatatgttaaaggtggagaattattcgccaaagtgttgaaaggtaaattaaaagaagaaattgctagaaaatactttcaacaattggtaagtgcagttgatttttgtcacagtcgtggtgtttctcatcgagatttgaaaccagaaaatcttttgttggatgaaaatggtgatttaaaggtttctgattttggtctctctgctttgccggaacagctcagaaatgatgggttgctccacacacagtgcggtacacctgcttacgtggcaccggagatcttgaagagaaaagggtatgatggtgctaaggctgatatttggtcttgtgggataatcttgttcgtattgttagctggttatcttccatttcaagatgaaaatgttatgaaaatgtatagaaaagttttcaaagctcaatacgaattcccccaatggttttcggaggaatccaagactttgatatccaaactccttgttgttgatccggaaaagagaatctctattccggatataatgagaaacccctggttttatcaggggtttactcgtccaataatagaatattcttctattattgatgacgaagacaaagaagatgaagaagaattagtaataactaaatctccttcttcttcttcatcttctttatcttctcctccgttttacaatgctttcgagttcatatcttcgatgtcttcgggttttgatttgtcgagtatgttcgagaacaagaggaaatcgagatcgatgtttacttcgaaatgctctgccttggctattttagtgaagcttcaatctgttgctaagaagcttaattttgggttttgtttggagaaggaatacaaagtgaaaatgagtaaaaaaattgaagggagaaaagggaagttggcggtggtggcggaggtttacgaggtggcaccggagctcgcggtggtggaattctcgaaatcgagtggggacacatttgagtacaataagttctgtgaggaagatgttaggcctgcgttgaaggacattgtttggagttggcaaggtgatgagagtaactgtcaccaactgtaataccagatttctaattagtcttaatttagttcttaattttcttagattacttatttccaatataatgtaaaagaaaatattgttattatttgtttagtatttgccttttttctttttttggattaagaaaaaatgtgagtagtgagtgtgtatatgatgagtatttttggaaaattttgaaattattagcaattattaatgtttttatctttggttataagttattgtcaaattggaatggaatgaatatgcaagttctctaatttggcttaatttagttcattttttaaagttatttgcaatataatgtaatctgtttgaaaattattataatttgggttttgttagttgcatatgctctctttttctctttttaatcattattggattgaaaaaagaaagtgtatgtgggctcatgatataagaagttatgagtatttttgaatgagtaattattacattttttaaaaaaaaaaatatattgctattttatattaataaatattagtaattactaccataaaatgatattttgtgaataattaacaatattaaataatttatctcgaaaaaaaaatatgactattagtgctttttaaatttttttttttatttctgatattaaagtttattgtaatttttttaatatggtgtggtgaatttttttaatctcataattgtaaatgttgttgctgacactttggttaaatttgttctatcaatgatatctttttagctcttagccctttagaaatttttgctctttctgaggctatttttgcaaaagaaaatatttttttcatttaaaacacactctgaaattatagcgtttggaattacaaatctaaatgtgttaaaaatcataattataaaatttaaaattgaaagtaagtttattttttttttattatttatttattttgttaggggttattgtcaaattgggatgaataatggtatatggatggaagattatcaattttgtgtggtagtgagaggaagttaagagagttgtgtggacataaaattagcaattatataaagtggtttaaagtcaaactcatgaccaattaaattgacaattgagtgttgattgattgtgtgagccagccagctgcaatattatttcacctgaaaatttgaaaatacatacaataattaatatagataatattagttccaattttattttacctgaaatttaaacaatataaataattatttattataatgtattttggtgtttgatttgataatagtttctctactattgcttttaggaaagaagtattccaatagataaaggtgtgtagaaagttattggatctaattataactaattgatttaatagaatcgaatatttaattataattaaatcggatcagatataaattttaaaaatttaattggagcggatcgattattggataggacatctaattcaatagataactaaatcgaaccgattcaattatcatccaattatatatatttttaaaatacatttataattttatatatttaatatactttatttaaaatttatatattaactgatttaatatatatttaacacat

SEQ ID NO: 43573 - DNA, 4162 bp, Cannabis sativa
gtattttaggaatattataaaatgtgtcatatcccacaaatatcaaatattatgagtttaaaggaaaaatttcaagaatatgtaagcataaaaaatcaaatttcccaacactaatacattaattatatatgtatacaccatataccatgtatcatataccatgtaccatgtataatattcctctcctatatatgtatgtattatgtaacagcccattgtttagcccacaataacaaaaagtgaaaatatcagataaaagaatgaaaaagaaaatgtaaaaaatcttctaaaataagaataaataggatttatctcctctaaattatgtagattttttcctcttacttttttccatgttacaaaatttttccaataattgcaatctggttatttaattaaataattttttaatataaaactaatctagcccttgtactgcaattatatatattcatataatttatattcacataagtaaattatttttctaaaaaatcaatttaaattgtaaatggggattattagcaataatttgcataatttgggagaattttcacaataaagaaaaaattcaagtgacaaaaattatatatttattcttaaaataaatttcattagttatcatattttcttaatataaataaatattaattagtataatttaatattgagtcacatactatattttattatttttaaagcaacattgtatatggcattagtatcttacaaatagtcaataatacttaatttcaattattaaagtaagatacatagattcaatattaaattgaaccaataatagcaaatttctttttatagtgttgggcaaacttaaaggttttaaattaaaatagttgctaaaaatgcacttgcactacctaatagtgtttccaattttttaatttaataactattatagaagactttaactattcataagatgccttcctatgttgctggatattattgatatctaataatttttaaattaattttaaacaccaaatgaagtgttatattattatatattagtgtaattttattttagttctacatattttaatttaatatgtaattttaaaaaaatgttaatcactcactcataaagtgtcactttatgttgtgttgcttttaaacactataaagaacctaaatatttacactttaaattaaaatatatgagatactatattaacatgcaccaaaatatataccatatatagtgatgcggttttgaacaaatattgacacgtttcagcaatatataacggaaaaatacccttttatcacacatatctaattaaatttatgtataaatagtagcacaaaacagacgagaagagcacactaaaaagagaaatatttggtaaggaaggtgagcgagttggttgtggttgtgtttgcaataatctttggtcggtgagggtgaatcgtattctaacgaggttcaataagattttgaagatggagcagaacaacaagatggtgaaccaagaagctttccttaggaaaaggatcaaagaagtgagcgagcaggtgaaaaagctgaggaaagagaatcgcgagaaggagttaacccaactcatgtactcatatttgtcgggtaaggctaatctcgttggcttatctgttacagatttaaatgatctcgtttgtatcattgacaagaatttggaagaaattaataagaggatagagactattgctgcaaagaataatagcaccaactcgatgactcaaatggtggttgcggctaagactgaggcttctgcaacgaacgagaatttcaatgatgaagttgtgaaagctgatgccgttattgacaataatactaaaaactaagtgttaatggcatgattttgcaaaatgggaacaagaataaaactatgttatgatgaggtttaaagtttttataagttttaattaaataaagtcggcatttcaattaatcttctgtcataattatgtttaaaataattttgagtattagattttatggttgttcaataaaaatatcaaaaatttgagtggttctaatatgttttgaggatttttttttttaaatttttacggagtaatattgcaaatttatttttctaaaaaatatcaaataattggatatttcgatagaaaagtgacttataatccacaaaattttaatcagttgagtcccgacatcttatacatttgagaaaatacatttgtaaactctacaagcgatgtttagtattcataagttgttcttatatttttacaatagttttgaacttcttataaattttttattgttacactttaaaatagttttttttcataaaaatccacatagcaactaatagagtaacctaaaatatatacaactaaaattcatatagcaacccacataaaaataaaagaacaacccaaattcataattcctttatttatgacctaaatatacattatatttaaaatttttaaattatttgttgatatcgaaaatattttgactatttccataaatttatagcacctaatatttccattaacattaatattttatttattttgagtgtctcatataataaactttcaaaacaccaattactatagtaaaaaatatattacttttgcaagtaaaaattatgatatatggttaaaaaaataaaaattatgatatatggttgaaaaataaaactagataataataaaaaaaatatatagtaattataactctatacagctatgatacacatgatagtcataataataataaaaattatacagtaagcaccagctgtattagtcaaatatagtcatatatcataattataattaataaatattagtatgtatttaggaaagtatttagccaaataattaatgatttatttttatgtagatatctcttcttatatattaaatattcataaagatatcatgtaaattttattcctcttgtaactgataatataatgcaataaaaatagccaaaaaagataataaagttaggatttttttctatttgtggaccaattccattgtacacattaattttatttgatttttttctatttgtggaccaattccattgtacacattaattttatttgatttttttatatttgacttttttttttctctcctttttctttttttgcttctccaagatttcaatttatttttcatatttattatgtaacgttacacaaatatttcctattattcttctctaaaaaacaattaaccattaatgtcttattatgctaaattttgaaacatatgttctaattagttctaaccgtccttgtatacaatgtgtaacccacaaataataaaaaagaaatttaattagttaccatatatgattgttaacatttatttcctcattgaagccctaataccaccttctctatgtaatttgtgaataaatagttccacaagtgaactaaggaagagcacaaagtattatttggatatgttgtctcccatttcggtacactagctagtttttttctttagctcttgtttgttttctttcttcgactcaacaagtcaaaaccatgaccagaaaaaaggtgaagttggcttacatcaacaacgacgcctctcgaaaagccacttacaagaaaagaaagaaaggtctgataaaaaaggtgagcgaactgagtacattgtgtggtgtagatgtgtgtgcaatcatctatagcccatataacactcagcctgaggtgtacccttctccaagaggagtacaccgtatagtgaaaaacttcaagacaatgcccgagatcgagcaaagcaagaagatgatgaaccaagaagttttcctgaagcaaaaaattggaaaggtgagcgagcaaatgaagaggctgaagaaagagaatcgcgacaaagagctgaatcgactcttgtatggcaatctctctggtaagatgaaccttcaaggtttgactgttacagatttgaatgatcttacctcgcttattgacctaaatttgaaagatattaataaaagaatggaagaaatagccaaggaaactaagaatgctcgaacagcggcatctgctgcagcaaaagtgcctccactcatgaatagggaagtgattgctgcttttgctactacttctacagtgtataagaatgatcgtgccagaggcatgagtggacacttaaacac

SEQ ID NO: 43574 - DNA, 3768 bp, Cannabis sativa
  modified_base (1712)..(1717): a, c, t, g, unknown or other
acgacgctcttccgatctattcaacaatctcaatagtttaggaggcattttcaatgaccttaaaagtttagggaacaaaaatcctaattaccctaaatattttatttacattctatttaaatataaatattttttactatctaattatgtcaccgaatttttcacgctagttttaaaattttcataaagtattacaactattaaattttgttcctttgagaaattatatttataagagagggagaattgacactaaattttcagtaaaattcatttggtacctttcattttaaaattatgtttcatcattttattaatttgatcaaaccattcacatttaattattatatacttaaataattacattgaaatttataaactatacaatatgattgtatagataaaaaagtttatattttccaaatttagaaaataaaatagttgatttttgtattttgtgacttgtgataacaataatttaggatatattagacttgtatttgttctgttctttaattttttttttgccaaacattaattttcatgtcatgaaacagtcaagtttattaactatatatacatatattaaattgtgaatgaccattctattttgtctgaacatgtcatagaaatcacttttcttactttaatttttggtaagtaaggtctatcaaaattgaatgaaattatttttttcctctaaaatattaaatgaaatgggtccaaagactccaaaccgctctcttgtcttcagtttggtttaatttcaacctttttattttgacctagactttccttttttttctctctcataatattaaatattttaaatttttatgggccattatttaatcctcacttctatataagttagtattatatgtgaggaagacatattacaatcttttattataatattttagtcaatttttacgtttaaaatcacatcccgaaatattttttttttcataacggtattcgttatagttacagtatcatttctgtaaatttttgaaaaattctaaatagtttacagtaccgaaaacaaaattcttgatatttcagtttatcaggtgtgttcaaaaaacttaaaacgtatttttcaacattgtaaattagtttaaaattttcaaaaatttcagagataatgttgtaagtataacgaacaacgccgtaaaaaaaaatttgaaaaaaatatttcgacatgtgttttcggacgtggagattgactaatagttgtagcaggaaattgacggtagcactcctcatagcgatataggtcaatagtataatacgaaataaataggtttgttgcatacatttaattgcagcatttttaccttaatcatgttataatcgtatccacacatttaatttaataattgtgtcgtgttataattgtattgacacactaatacaaattaattttttacaaaagaaaattatatttttcaagataatcatgttatcgtgtcgtgtcataaacatattaatatgaacatgatacgatacgataacacgacatgtcagccctagttgcatcacttgaataagacaaaaaatcttgtattataacaaaaaaatatcattttggaccctgtattttgtaaaaattactttggactctctgttttgttaaataacaaaataggccctatattttccaaaataataaatataggacgcgaagcttaatttttaacaattttatnnnnnnatataactaactttaagacaatttataatacaaacaaatacataaaatataacttattttgtcataacatctctatatcagattattattaagttttattttgacaaaaatcaattcaagatcttatttgtacaattttagaaaatacagggtctattttatcatttaacaaaacagaggatccaactagtaacttttacaaaacacatggtctaaaatggtatttaccctattttttgcgtgaatataaatatgtaaaaaaataaagaatggagagttttatttacactttaaaaacttataaaacactttattttaatagtttttattttatataaaatacatacctttaatttatactatttttttttaaaaaaaaaatcatccttttacatattcttaaaagatctatatatataaataataaaagtaaaatataaaacaataaaaataaatgtaaaaagctctctcatataacaatacttaaattaccctaattaaatatttaacaataagcaagtgcctagttgatcaaaagctctctcttataacaatacttttccatgccattcaagagatatatatagttgatcatctctaaaaaataattgcttgcaaaatatgtaattaagaactttggcagagactaaggtttgtcaaaattctttacgtttattaggtagtaaagcatgattaaaatgataaatgaatgaacacattagcttttgacttgcaccaaaaattccaactcttcaaatttggagccaataagcaaagaaactccatcagaatttagccattaaagaatctagctacttacaaaaactcatagtgtaggttagaatgaattgcaccacatcttaatttcaaaagtatttctcgacatggaaaattgaaaattgtttatcataccaagaatgaagaagcttccacattctttttttttttttttaacacttttgaatattttttttattcaaatatggttcattcactaataatcattctataattacttgagtagtgttgacttaaaaatttgaactacacttttaagttaaactcactcgttattagattagcgagaataaaataattgttaagtaattataagagagacacaatatatttatagtagttcactccctgtatcgtgacagtattacaggtcagataaggctaagtgtcagaagacaaactagatagagaaactttgaccctgtgggtagttttctgaatgtgaataatgagctaagtgagctcttattttataggtgaaggagacccacaaaataaggagaaaatataaattaaacattttcgaccgtagataatgatccaacggtgaaaattagattttgatggtgatagtaattttttgtagcctgacaagacccgctgcgggtaattcggagcttatttttgtaactctcttgggatgaaatttgacattgatagcttcagaattacgattgaagtgtgagagatgaattcatagagcattgaattagcaaaatgcaaattaaatcacgtcaatcggatcaatattgagtaagttatggttgttttactgaaggcagttcatgacctaatacccatgcaaattgacattcagcgaccaagttgacatcccagtgcctaggttgacatataacgtcaacctagacgttgggtaagtgtaaaaacgtccaagggatgtactttaagattcctaagtgatattttagcatcacttagtctgctttcgtgttctggcaaaggtggtcaccagttctcagagatgttgttgttctgcggaaatgagagactcgaaactcttcattggagtctctcattttcgagtgagtttcccgtgttaaaaatgagaaatgcaaagttatgaattatacttccctgacttcatgaatcttagttactgtgaaaaactagatgaatggtcgaaacaaaatcaaaataggataagctagggctgtacaaaaaagtttgtaaaccgcctaaaccgagtaacctgcccaaaccgaaccgaaaaaaccgataaaaattacaaaccg

SEQ ID NO: 43575 - DNA, 1826 bp, Cannabis sativa
tccatctccatctccatctcctcccttagctcctccaaccccacaactcatttccaaaaccctccttaaaccaacctcaaccccaaaatggcttcctctcaatctctcaaaatccgagctttccttgcctctaaccttccccacaggtcaaaccttcaggtggaaacaaaccggtcctcttcagtacaccggacccgttggctcgcatctaatttccctcaaacacttaccaaacggcgacgtttcatactgccttcactcttcttcttcttcttcctccaaagccgaggctttaatggctttgagggattttctcaatatgggtatttgtcttagtgacgtttgggaagtgttttcggcttctgactcgagatttgccgagttggccggacatttgggtggtgcacgtgtgctcaggcaagacccacttgagtgtttgatgcagtttctttgttcttctaacaataacattcagagaataacgaagatggtcaattttatttcttcattggggaatcatttagggactgttgaaggttttgagtttcatgagtttccttctttggaacgattgtcaagtgttgctgagcaagagcttagagaagctggttttggttacaggtactaaataatccaactgtgtactaaatacatatataataagatcatgattttgtgtcaattaatattgaattggaaccttatagatcatgttatcaagacttgtgcttgcatagaatagaagtgagaactattacatccataggttagaccactcattaccaattagatttgactaagtatctatagatattatcaaaaagtactcactttcttttctgcctaaatctgtattagatgtaattgtttcatcattcatgaaaatttcaaatgttgaagctttgcttctatacttttagatcatggacttatttgtctaagcaaaatgatgaaccagggctaaatatattactggtacggtaaagttgttgcaatcaaaacatggtggaggcctagagtggcttttgtctcttcgaaagctcgatctcgatgaggccattgatgcccttttgactttgcccggagttggtcctaaagtagcagcctgtatagctctcttctctcttgaccaacaccatgccattccggtagacacacacgtttggcaggtaaaacgacaaacatggtttatttttgagtttgatgatctatgaccatggcaacatgttcttcctagtgaataagttcatcataaagtttcatgttaatgttttctgagttcttagctcaataacttctaacttaagaattgttattgctaattatggttgaaaaagattgcaacaaggcacctgctgccagagttggccggtgctcgcttgacacctaagctgtgcagccgtgtggcggaggcatttgtgaacaaatatggaaagtatgctggatgggctcagactgtactttttattgctgaattgccgtcgcaaaaggcaattctaccgtctcatttttcgaatgcaaaaccgaataaatctgtcaagcgaaagattatggaaactaaaatcgctgaagatggtaccgaagagcgataactcaaatagtcaaattatggttcgctcccacaaggtttgatattcgagtccctctgggcatttgtatagcagttgttgtagtatttcggtctccaaatattgtagggttagggaatgcctagttttgggtaaaaacatttgagtgatgattgcttattctttgtaaccatgaaaattgtcagattttttctgtcctggaaatcaaacatcatgtaaatgtaagttttcttctta

SEQ ID NO: 43576 - DNA, 3728 bp, Cannabis sativa
ttttatgaacctcaaagatgaagaagatgaagaagtagaagccctcattttcatattatcagaatcttctctcctcctctaaaatctaaatacccataatcccatggaaccctaattaacaaatgggtaatgaaacaaaaaaaaggaaacaacttaatttttgaatggaaagaaattattgaagctacccggtttttgatttcaattgggataatctatatatacttttggaaagtttagattcctttgacactatagataccttctttttatatttcattggtacattaatgatgattaggtataaatatttcattgatattttttgataccaagttcttgttgcattggtacaagaatgttgatgatgatgttttgttatggtttggttgatttttatttataatttgatgaaaggattaggattatgaaataggaagtggagagagcattgtacaagaatgttgtgggcacccaagaaaagatcaaagcaatcaaggaagaaatagacaactaataatcatgctttgtgttaacttgaagagattatgtttagtgttagtagataaccctttattggaatattacactgaaataagaatttacacatgaatatgagcaatgttggagatctatcaatttgtcaaagtcaccacaactaatcctacttggcaagtaataaagtagttaagttggttataaggcttcaaatctacttaattaggctactcaatgcaagcaatgatttggtgtacacataatttacaccaaaacattataaatacagattcgtttagtgggatccatcttaaataaattttgatgcatttatatggtttattctcaattttctcactacacttgatgtagtacttactcaaatgaaaaatgtgtatatatatatgaccaagaattccttttatataccaagttgaaaattcattgaaacaagatagatagagttgttagtgtgcttccatgattcataatggaatttgagattgagtatgtgactcatcttataccacttcttattcttagtaatattattgtgtctctccttggggccatatattttcatcaatattgaaaattgtaagatgtaaggcaatgtttgtcaattctatttcatcctcaaaagttgatcatatgacattctaatagaattatcgttagttagttgttagttacagtcggttctttagcttagttaaggttcatttagctagttctcttttattgattctagtttattagtttttatggtcgggttacgttaattaactatgctagctttgtatatatattagtcctcacttcatttttgtaattaactcaatttagactgataagacaatacaattcatttaattttatttgtagtttattatttccacattacggtatcagagcaaggaaggtgaagtttttccttgatcctagttctataggtttttgcagaccgtgttctttttctctagtcaaattctagaagatctttcttcttgacgaattcgtgttcaattcgaatctttctctttgtctctcagacgctttatttttaccttatttctgtgaatttttctatgttatagtaattaaatgttttaaacaatttttttacgattttgactctaatgttttaaatataattaattttttcctgttatggtattaaatgttttaattagttttttcgtatattttaaatgaagattataataaatgctaagaagatatacgacctttaattttttttattatttttatttttgatatcttatttatgattatgttttgacaaataagtaataagaataaggactaatgattttttggtaatatagaaatggaatttgatcattataggattttttttttctagttataggctaaaaatattatatatatttaaaggaattttaatatccaaatagaattcaatttttaacgcctaatctaatctaattataattagatattcaattttttttttgattaaattaaattagttcaattcaattagatttgattggatcccgtccactccaacttaaaacaatcaagtactttctaaaaattaatatttgctaaaatcagcaagcaaagaattaacttcagcaaaatatttaaatctcttgacaaagactaccaaaaaaataagacattttagtcggtccaaatcaattttttcatgtattcacgataataataaatttaagtaaccatttatatcaacaacaaaatcaatgattaaacgttgatttaattataaataacgctaaccaaacacatttgagcgataataaatttattttttttctaatcatgattatatcttttaatcattttttggtgtagtcttatattttatacatgtatatgtgtgtacaatgttaataaaagtgacatattttttacttgtagaaaatcagggccgacccttaatttgggagccaaaaataaaaattggggttcaatgaaaaaatgaggttattgggatttgaactttgaacattttaatagttaagttaatcaaattaccactaggttacaacacatatttagtattaaaattattattatttatcttattactaattatattttaattttttttttcgaaataggagcctgagcacttaaggcggccacctccttcgtctcacctagggccagccctgtaaaaaacataaggaaatagaaaataaaacaaattattataaaataaagtatcgaaattaaacacataaacagtaataatttattttatttcgaaaaagaaagtacatgaaaccaccaccattaataataagagtgctaccatcaatttttgtgcctaaaaatatatattagaatgtttttttaatttttttatatgacaattttcgttataattacatcatcatccttgtaaagttttaaaaattttcaaataatttacgatgccaaaaatatgtttgaaattttttgaacattcatggtagattaaaatatcaaaaattctattttccaaaattttctaaattttataagaatgatattgtaactataacgaatatcattgtatgaaaaaaaaaaaaaaaaactgtatttttcaagctaggagttgattaagagattataacaggagattgtaattaacactactataataataataacacttcatttgaaatttattaaaagaacatttagaatacaagtttcaatattaaaacaataaacatgaaattttaaatacttatgccgctgtttacccaaaacaaaactatgtcttcaattcgaagcttccgaaagcttgtttgcatgggcggccatggcggcatggaccttattgcgaaggtcaatcaacaaagccaagtgattcttcaactcttcatagcccatctcctctattgggtcatcccaccacgcgaaactatttcttaaaaacgacgccgctttataccccatttcctcttgcatcttctttttctcatcatcctctttcaactcagccatggctttctataagtgttattattattgtacatatgtatatataaaacttttatattgtaattttcattaattttattatatttaatataccaaatatattagtttcggataatatatattaatatatattatctttattatcatattaatctctttaggtaattggaatcaattttttgaattaatttatgggattgtatctttaatttcgggttttatgtttt

SEQ ID NO: 43577 - DNA, 2438 bp, Cannabis sativa
taatttaatgaataatataaaaaaccgcaaactaattataggatgtcatattaatgtgaatgttgggcaccttaattctatgccacttatagtatccacacataacattcttctttcacatacaagatccctcataaattacaactactacatttcttttgttctactcactccgtctaagactaaccaaattagaattatttggaggaatactttgttgattagagaaaacattgtaaggatctatcaaagttttggctcgaaccaacctatcaaagttatttagaaaatatttttctccccaaaccctagcaatctccacagggtcaaacaactgatcatcatcatcatcatgatcctttgtaaccatcacaccaagatcaaaatctatatagtttatataagctgctctaggaccccatgaaacatatggagccattgcactataaaatgctcttaaccattttatgtaatcttctcttttctcattattctcttgttggctccattctaccatgtattgaattgtatacaagttaccttttctatgtgggaaggcaatagattcagtgcttatacgatccatgtttccaccataaggatctaaaatcacataccctttgggctccttctcaagatggttaagggctacccatatgccatcatgagaaattggggtatgaacatagtccgatttagctttaaaacatgccttattttgcaagtaacgatcttgcaagttgtgtaccgagcttcctggagacaaatcggagaagaacacgatggattgaatccaactcatttcagagcagtcttgttctacaatacttagttctgggaacacctgatgaatgaagaattgtgtttgattcttaggaccaagataaaagcctttaaatgtaactgaaattccaacatgagttgtggtttcgggtaaccctgcaccaacaaaacatgacaagtaaaaatcatctcctaagttgggagcaacaagttgccactttgctattaggtttgctatttgggtttttgtgccttgtctagacacaataaaggttgtgacaatgggtggaactttcaataaattgattttccaagcataaacaaccccccaaacaccaccacctccacctctaatggcccaaaacacatcttctcccatgctttctctatctaacaactttccattagcgtcaacaagcagagcatccaacacattatcagccgcaactccatattttcgggaaagtaacccaaagccaccgcccgaaatatgtccacctattccaacagttggacatgatccagctgagaaaccataataattagtggcattagcaatagcatagtaagtctcacccaatgttgcacctccttccacccaggctgacttgtcctctaagtcaaccgtcactcggttaagattcattagatccatgatcacaaacgggacaggagtgtttgcagtgctggcagtgtctatagttgaggaagtaccctcatagctgtgtccccccgacctaattatgattttgcaagaggcattcctagcacataagacaacactttttatttggtctacattttgaggcaatattatagcaataggcttaggaaaattgggatcagcaaaacgaagattttgcatagagaaattgagcaacttgtaatagtatttggattcgttgctatgtaatgtggtaaagttgttgatgttatgttgtgtgagacatgaagtgatttggtattggaattggtcttcttctaaagatggcacaattaataaaacaataattataaggaagtacactagggaattcatcatagctttgtaataagtttacattaatgctattagtactacttatataattattattattaaggaaactagctagatatagaagagatgacctatgaggatattgttgaagaaggataattaaattacattatttcaagtttaaagataattagataaatgaaaagaaaatggagaataatgtgatgatttattaaggacaagaagaaggtgatggtaatatatgtggccggcaattgtttaattaattaagaaagttttaacaaggtggaactaatacataattacatatttaattatgagatgatggtatatataacccacttcatatatatatttatatagcctaagctaaagcaaacaaaactataacttgcatacaaactaagacaaagacatgaataatttttcataaaatatagggtatttttacaatgcaaccccttgaaaggaatttattgatgtacttcctatttcttttggcatttgagaaaattttttaatttaattttttttatattgtatttatttaagatatcttacaaaattttaagaaatttgaaaaaatctaacatgtcaaaaatagggttcgaacagtctgttgcacgcgagactc

SEQ ID NO: 43578 - DNA, 2292 bp, Cannabis sativa
  modified_base (457)..(457): a, c, t, g, unknown or other
ttagttacacatcattgtgtataaaaataatatataatttgagtgtcacaattatttcccatatatttttttataaagaacaaatattatgtttagtacattttttttatgaaattactctaatttataatatacagtagtatttcaaagtacaaattggtaaaaaaaatgacataatttttgacatacatttttttttttataataactgaagtgccaaaatatataacacatcaatagagatgctattaataattaaatatacattatagagttagtttacgtggtaaaaaaaattatttgttatatgagttaaaatttgtgtcaaaatttaaataatatttattattttaaatttttgtaaaaagaaaaagtctcatttaaattttttttcttaggtctctcaacacattgaaacagagttgtatatagtttatgagcattgctattgggcacnagtggtgcctagcacccttaagacatgtcgccttgcgatactcccaaaaagctattatattaaactatatgtgacccgatactaaattagaccaatagcgatattgacacgtaggagggtgcttggcaccactggtgccttttagcatttctcatagtttatatataggtatatacatatcataaatatattctatagcatcattaaagaagaaaaaaaaaaccaaagtaatgcaacgcttaagccctagccacaattaatgttcagcaaattgtatcattttggtgtacttttttcactaatttggtacaaaatctattattttttgtgccacaaattcaatggtttaacaccaaataataaaaatattttgttttataaattcacatttttatattatttatattaacaaccaataataactaatttatattataattatgcatattacaacaaatacaattaatgattatatacatattttaaaacaaattctacctcacttacatatgtcgtagtcttttgtaccatatttgtgtcatatcataagatcgtgagccactgatgcattactagttattgatttcctagcaagaaaatagaggccacctttgaactctcctctcataactagcaacgaactcttcatgtctttcattgaatttccttcaatcttgatgatacaaccattggactccaactgataggagatttctccttaggtcaggaacatataccttacatattgtatggttatgatcacttcatcatgcatctttattgtgaacctattccttttacttggcataccttgttattggaacaaacaacttgttaggacacatatgaaatgagcaaccagaatcaagaatctattcattacctgaattttcacttgataccaccacaacatctgctgaatcatacccatcagacaccacaccaacttctcctattccttggcttttctctatgttttgcttattctttaggtagtagcattcagacttgtaatgccttcctttttattgtaattgcaaaactttcctggctttaattttgactttattttgtggctcttgtgacccttgtttccattgttccccttcccatatatctggtctctattaccagctcttcctcaaactatcaaaagtccctcaccccttggattagacctagcttttgatcttttttgaatttctttagagttcaaaccagctttaacttctgctattgtacaagtaaagttataccttgatcctcttcttcatgtttgacacctattttgtttaattccaagacgattttgttaaaatcatcaagatgcttcttgagttctctatagcttcattcatttgtagtgtatacaatttcttctacatcagatatagtttgttggccagggatttcttcaaataaattgcagcaagtttatcccataaaccaattatgaaagcagaaatggcggcaaaacccccaatacttttgttttggttttactaaacccccaaaacccaaacactgttaaattgctaacaattttctggttttaggggtttacctgaagaaatttggattttgggggtttagtgaaaccaaaacaaaagtattggaagttttaccgccatttactcattatgaaataattgtatcttcatttgacacctctcgaagtaattcatctccaaggcagagcattgcagccttcacttcaattaatggtattgaacttctcatcaacatcttcttcattctttacttcagcttttggaataatggcttcatcaagcccttgatgtaccaaaagtgccttcattttgattctccaaaga

SEQ ID NO: 43579 - DNA, 6980 bp, Cannabis sativa
  modified_base (46)..(46): a, c, t, g, unknown or other
  modified_base (1036)..(1036): a, c, t, g, unknown or other
  modified_base (6915)..(6941): a, c, t, g, unknown or other
atttttgttttttaaaaataatttttttaaaaacaaaaattttacnttcattttgtgataaaaaattaaaaagcaaaagtgttaccaaacagcaccttagtttctgcatcgtatgtcttttttttctccaaactgttaaaagaagtaaatatttatattagtatatatatatatatatatgtattattgtttgttaatataataaataagataattaataattaaaatttatagcattttgatcgtttaaatatcggttagggtttgcacgggcgatggtgtcactcatgtatttcaatacataaaaactacattcttaatttttaagttgtacgtcttagacaatttgctagtaaatatttgttatgttggaaaaatgctgcaagtagaccaggtatgaacagtacaatgtctaagctatcttgttgcttgaattggatcaaaaattgtaaggtgtcacaagatggaaaaaaaagaggttttcattgccaccttatatgctcttgttcactaagtgtggaagagtagtaatgcagagttatgggaataaaaggttccaatgataagaatgtaaaaacatagtttataaaatgtgtgatagactaaaaaatacgattttggggaaaatgagttccgatgataagaattggatgagagctttgtcttgtaattattaatagttttgttttgaagttgtaagttgtaaattgttgagatcaatacaaaagagctcattttccaaatagatatatgtaatatactttatattctattgtaaattaatttatataatcaatgtaatagtagagaaaataaaaaataaatccaatattataagggttaatttcacaaatgcacaaaaacaacaaaaatatagttttacggaattttaaacatttttacgatttttttaattttatttacataaaatacggtctatttatttgttatatgtatgttatttttgttgtttttttgttgttattttgatgttattttgatgatacttttatgttgttttcttgttgattttatnttattttcgtgttattttttgaaaaaccgtaaaaatataaaaaaaaatattctttgaacgtaaaaatataaatattttacaaaaaaatagtaccttatataattatttcaggtatcacggcgggctgcatgaagatgattgagattgaccgatctcaggggtggggcccaccgagataggtgtctccaaatgataaaatggtgtcataaatatatctatttcgacaggctacgattggtgaaattgcataatcaataatcctgagatagacccatattcaatctccagtttagaccgccgagatagattgccgctattttttttattgatgattcggatgcatatcacgcctaaaacaaaattataatgctgatcactaaattatttattaattaaacttattatgtactcgccccactaccttacttgatcagctagtcttatttaatagcatagtcagtgtatcgatgtgatgagtgtgtgatcaagatttctttctcctttaatatagcattcctttttcaattttgggtaatttttgttggtattttgttcacctccactcaatttgtttgtttgttttattaaagaagtgataagaaaatccccgctttatatataaatatatgcatcactctgaagaaaaaataaaaaataaaaaattgttcacaaatcattataatgctaacagtaaaatctgccaaattaattccaaatttactaatgatgcataaatttgaattatattagaagagattgattattctcattcgatttgatttatataaaatatatttgattaataaattggtgtactgatccgaatcatatatatacatgtactttcggtggctatatatatgtatcatcaattgattatgatcatgaagttccttgtgactgtcaatattgacaatcgtgaactaaaaatcgaaaagaaaactagaaagtgggaaagagaaagtgcgagattttccgaatcatcattctacctttccaattatgcgtgcttgtctacaccaacattccatgtggttccatgtatgtcatcccatattctaaagttttaatacacccacaattatacgagaatatgtatagagtatatatgatggaaaattacttcatatatttatatttatttttttttaaattaatagtttagatttttaaagtaattgcaccgctataattgcaatataggtttctatacgattttttgttacaatttaagttacagcgctagttgcaatagaattttttttatgtagaatttcgtaaaaatacaaaaaaaaactgttttaaaatgtaaaaataaaaaagatcctattatttaacacgagaatatatatatatatatatatatatatatatattaatgggtctaattttatgaaaagccaaaattctctcgctattattgaatcagattttgattgtagtttcatttaggagattcagagatatcattaactctgatatatgagtagtaataatagtatatagttcctattcttggttttcatgttcagaaataaatcttttctacatttcatgaatacttttgtacgtatatttatataaacatggccggtaccgtatgtcttcatattgtttttaaaaatattaaacacattaatgaacatctggatactgaacaacaggggggaagcattcctttaaggtgttttatttggtcaacctatgaggacaaaaaagacatgggaaccttttttttatatatatataaaataattgataaataacaacgcctgattcgttctctctcattactatttactcacttttcttctctgattatctaataattattgcatacaatattaagtactaccccacatcccaccatatccctaacaagattaataatatccgcttcacactctcctcctccactagaattatatatatgtatatatatatatatatatttatatattgtatgcttccatacaattaagtgctatatatatacacctacctcgtccatctagctataagtttttagaaacatgggctctaataatggagctattttcaacactggccttgatctcggcttaggaaattcccaataccacaaggaagatgatcacgaaattaataatatcaagatcaagaagctaatctgtttgagatatgaccatatattgccatctcttacacttggcacatcatcatcatcatcatcagatcatcaatatggtgatcatcatcatcatactgcggttgatcaagtacatgatcatgatttgcatggagtacgacctggagccaattattctcttgccacagtatcatcgttatctaactcctccactacaactttgaagagagagagatcagaactcggtggaagccgaggcagaggcggcagccgtggtagtggtggcgatgagtttgaggtagaagtagagttggagagattctcaggttccagggttagtactaatgatgaattattagatgaagatcaggctagtccccggaagaaactcaggctcactaaacaacaatctgctctattggaagacagcttcaaagagcataacactcttaatcctgtaaataatatatatacatattactcttctgatcacataattaaattaaattaatacgtagtttttttttcaaaaaaataatataaaatattgatattaatttttacagaagcaaaagcaggatttggcaagaaaactgaatctaaggccacgacaagtagaagtatggttccaaaacagaagggctaggtacgtaatatacgtacgtaataattgaattatatataaatataatttgtaattgtaatatatcactactgattaatttaatttatttgtgttgttatgatgaaggactaagctgaaacaaacggaagcagactacgagctaatgaaaaaatgttgcgagtcactgacagaagaaaataaaaggctacaaagggaagtagaagagctaaaagcagtgaaattgacggcggcgccgtttcttttgcagtttccctccacgtcgacagctaccctgactatatgcccctcttgtactgaacggatctgcagtagtagtagtgaaaataaatgcagaaaggttttgtgaaatctcagctcatttacaagagactgagtgaattcaatttataggcagggtcgataaagaccaatacaatagaaagccaatggcttgattacagctgtatgcaaaatgtaacaaccagggaataaaattgtacaaaggcaatcattgcctcatcattgtaaaataacggctaaatcaatctagggatcttcaaatgacagagcagaggacacctgtcctaaaacctggaccacacagtaaaccagtagcagaggaaaaaagcagagagagaattaggttcatttcttcacagtagtggtactagtaacggcgggggtagtagtcatcatcatgataatgatcaatatggttctgctaattcttttctcaaaattaatggagcgaagcctcatcatcacaacaatagcttctccaacccttttatcgctacaattaattcctctgcagcttgctagctacagtaacttagtcgataatgatcttgattaggtacgaacgatcgagagggttattaagaaagttactatccaacactcttcttaattaatgatattaattaataattttgaaagtaatgctaccgtacctcacacgtgtcactagctagtacatgtgtatatcataatcaatcattattataatattatatatatatatatgtgcatctttttatgtataaataatatttaatatgttaataataatcataattatgatgattagctacatatatagctaggtacaagtataataaataactttgtaataataataaggatcaattaagtacgtgtaatttttctacaatttatattatcatttaccatattttgtcaattcttcaattttatttaatgatcaatatttattaattaataattttatattatggattttcattgcccaaaaaatcatataaacctctatgtatgtatgtatgtacgtagtaccagtgagtttattacgtaatactggccgatcaggtcccacatttctaattaaaatcatatattgaactttcatacgtggaaagttgattcgtgatcctagtgggacactgggacatcatacaatgctcaaaatggacggtatatgattgattatcttacctacattactatacctagctctaatttgaggggctctttagtggtggtcgcatcttatcaagattataatagtttctttctttcatgatcactagtaaaagcggtaaagttccagttgttttattaatttgtctatgagattttgataatttgtctcttgacttgtgaaaaggggaaaaaaaactgagtaattggttctacatattgtctaaagagtaactttaattttatttggtattcttggcaaaataccaatacttttgttttaggaatacatcatcgtgttattatgtataagaaaaatgttaatgggtacttaagtattaaaagttattgcatactcttattaatatattttaatattgaatttataatatatttcattttaataaattacataagaaactactaattaaggtgacatatatattgatatagtgcgcttaatataccgaataataatgctcatcatcaaaaaagtttcattagaaaattgctctatatacatgagtctcgaagtagagattcacttagtctccttattgaaaattaatttataactgagtttcttcttatattttttggtgtaagtttcttcttttaaatcaatttatgtaaatgatatgatttagtatcgttgatatcgaatattgatacaattagaagaatgctaattacaatctcttattataattttttagtcgattaaaatcacatgacagaatatttttttgaatagcattattggtatagtttctaatattcaattttaccattgttcaaaaaacttcaaatctacttttaacactataaattgtttgaagtgtttgaaaaatatacaaaaatagtattgtaactagcgaattttactatttttttttttgaaaaaataatatttcaatatatatatttcagcttggaaattgattgagaagttgagattgtaataggtggttgacggaaaaaaaaaatgaaatctaagtagcctgtatcaagtatcaattatcaatgatgataatatgagtgattagcaatatatatacatatagtactacagcttagcatgggtgaaaatatgaaagaaaataatatttatatataattagtaaatatatgtataagagctgtcctttcaagccggatacaatgggtcatgcacccacgttttgttggtcgagtagtcattttcgacagagtttcatttcgaaacgtacgtagggtcccattatgcactctcttcttccatgcaacaattatcatgtcacgctcgaccatcgatcctcccattcttatatgttgcgacaattctagatgttatcatatcttaaaaatattctacctagatataattatttctttatttatttttaatcaatttacttacttatttgtatgtgtatacatacacagtacatttaatggccttagacttatagacttttctcataaataatataacttttgattagaaaatttccatcaagaataaactcttaaaaaaacttttttatttaaaaaaataatatatgtattctatataaagtgattgattttatgcaatagaatttttattttaactatatttttttagtttttacgttaattttcacagaatattctataacttaacaaaatattctttattaattnnnnnnnnnnnnnnnnnnnnnnnnnnnataaaaattatatagatattttatgtaaataaattttta

SEQ ID NO: 43580 - DNA, 2671 bp, Cannabis sativa
ggcatcagtggtgtctagcaccctacgtatcaatatggctattggtccaattaaatatcgagtaccatataatttaatataataacttttagggagtatcactagctaataggtggtgcctaagaatgctcttacgatatataagttgaatcatttatatttatatatatatctatataattctgattcacatatagtttacttaaaaagtgaagagtgaggtcacctgataggataaagtaaaaaaaaactcttctctccgaaaagatgccatttgggttatttatttattttatatcagaaaggacaatttagctaataaaatcaaataattattctcacctctttacaaatcagttttgagtatatttattcatattcgaggaaaactttttcttgtttttttgctgatttttttatttttttcccgaatcctcttaatgtcaatttgttaattattgtactttcaacaattaatgaagaaggtttaaatttagatatatattaatagagaaatccacaatacagtcacacaacttgtgaaagaaaacgacaagggaaaataaatgaaaaaataaagaaggttggtataggtatttactttcaatgtgctccattttcttttctttcttctgaaagtgatatattgtgcctttgtctccatttgtttgtttcaggatgagtatgagcagctaagctgcaaaattgagaatgcactgaaaatgtcagttccaagtggtcttagcggtgattttgaaatgtttgtcaacacgcaacgaaataatcatccaactataatcaaggtttaatttgtattattagtaaaattaattttattcgaatggattttatattccttaattaattttagataatatgtgttatgtttgtgtgtaatttatgtgtgaacaacatattataataagattattaaaggcataaatttaccataacattattttaaaggttatatgggagaataaaaaaggtgttacagatgaattgccacatttagtttatatttcaagagagaagcggccaaagcatacacatcattacaaagctggcgcaatgaatgttttggtacgtaatctttaatttttgttggttttttttttctttctttattgtataatattttgtaattacaaattttaatgttaatatgttcgattgaataaatatatatcgaagctcactaacattattatgagcattaataatatatatatatatatatatatatatgcacagaccagagtttcaggattgatgacaaatgctccatatatcttgaacgttgattgtgacatgtttgtgaacgatccaaatgttgttttgagagcaatgtgcttgctatcaggtcccaaacctctaaacgacatcgcatttgttcaatttccacaagttttctatgatagacttaaggatgacccttttggaaatcaaatgatcgttatatttgaggtgtgagcataattaattaataatttaaaccatatatatgttttaattaatacatttttagatatatttgattaataaatgtactaattaattaagtgaattatcctattatctatagtacatggccaagggaatagcaggacttcaaggaccatgttacagtggaaccggatgtttccatagccgaaaaatcatatatggtttatcaccagaagacaccaaaaatattaattgtatatataattctttttatcttcatttttattagatcgataatatcgatatgataaataataataattaacacgatacaaaattttatttgtctcctgaaaaataaggtgaacaagatgaggggttgcttataaaacaatttggaaactcgaaggagtttgccggagcagcaaccaatgccttgaaaggaaattatatcacagcttctgaaataaggcttcaaacaatatctgtggagactgcatatcatgttgcaagctgcatctacgaaagtggcactagctggggtacaaaggtaattaagtgatatcatgcactgaaatattacactcttaatttattttaaccaatacatttaactttggacgggatccaccattttaaaaggtaataccatcggtgtttatatataatgatttaatgttttggtgcatataaacttatagtggttatatgtataatatgtaccaatgtggtgcacaattttgatttttctacttgtcatgtcaaaataatatcgcatcactcacttcaaagttttaacaagtttgttgctgctaaatataaaatggaaggccattggccaagatgatgagagaaatgggtgagatatatggatacatgaatgaagggacatcatccggaaaaaaaatcacctctccccaattttcctatccaactcttttagatataaatcaccactaatttagttttagtaataataaatattattactaaaaaaacctttaagtttcgtttagtatgctgtattagatcgtattgtattgtatagtattatattaaattgtattaatttgatacaatatttttgtataaaactatatgtagtattgacttttatgaatatctaaatatataatatcttagtataaattaaaatttaacataatatcatataaaaatatgatatataatctaattcaatataatacgatacaatacaatacga

SEQ ID NO: 43581 - DNA, 2721 bp, Cannabis sativa
taatattagggattttgtaggaaatgattgggtccttatcttagaataaggcgaaaaaggagacatacgttaataagggaaaatgcaagacctattttggtaattacgaaaaacctttcccctttgtctcttaacaccattcaacttctccacctacacaccccaaacactgacacacacactcgaaactttcagactcacactctctctctctcttcatctctttctttctctctctgagaaatggggtcacgaatcccttctcaccagctcagcagtgggctgtacgtctcgggtcgacccgaacagctcaaggaacggttaccaacaatgggttcacgggcagtaccttataccggcggcgacattaagaaatccggtgaactcggcaaaatgttcgatatcccagtccttgatccttcatccaatggtcctccttccaccaagacatcacgaccttcctcgtcttctcagcacaacagtggatccgtccgatccgggccgaactccggtccagtaagtaagcacactagctccggtccgattccgaagaaattctctggtcccatggtgccgctccaacccacgggccttattacgtcgggtccggtggtctctggtccacagggatcgttgggtggcggtgggaggaggtcgggtcacatggagcatgccgcgtccactggaaaagcagtgtacgggacggccgtgacgagcttgagtgaaggggtgaaggtagggtttagggtttcaaaggcggtggtgtgggttttcctggtggtagtggcgatgggtttgcttgtaggggcttttttgatggtagcagttaagaaggcggttattctgattgcggtggccggagttctagcaccggtaatggtgctgataatgtggaattatttttggggtaagagaggtttgatagaatttgtgaagaactatcctgatgctgagattagaggtgccattgatggaaagtacgtgaaggttactggggtaagtatttttttttttttaaatcgataattatttctatatttatcattttaaatttattttatatagctaggagtttgaaattagaattggctgtcttaattttctaattacagaagaaaacaaaaagaaaaagaggaattgagaaagagagagaaagggaatattgacttatatttttgtggcaattttaatcatacaatcatttattattgaaatacttgatgatgaagttagcctattgctctttccagcttgatattaaaataattcaataatttagattagattagattagattaaattatttttatttatttactcttataatttgatgaatgtgccaaaccccaaattcagaaaagaagggttggtttgaattttggtggagtaaccatttttagaatgcattagattttataactaccatatgacaacttataattggacttttaatcacaacaatgtttcataaagaataaagaacaacaacgatgttacttttgcatttttcattatgtgtgttactgttttagtcagaatctttataaaatagtaatctgggatttcacctacctaatttccttctacgcttgcaaccaatgaaattttgatgtacatgttattgtggatagtaattaaatactaattgaggccgtttgtgaactaaattaatgtatactgtccatcacttctatgcaggttgtcacttgtggcagcattcctctggaatcatcttaccacaaagaaactaggtgtgtgtatgtttccacagagttgtatgaatataaaggatggggaggaaagcctgctaatcctaggcaccgctgtttctcatggggttgtaggtactcagaggttagttaaactatttgctaaatttactaatttattaaatgattggagagtatcagatcaaactgtaaaggtagcactagattataatttaagatggggttattggatggaaccatatgtataaaataaattgatataaaaaggcagcaagcattttcttcaatgtttgaaatgatcgttttctcttttgaacagaaatatgttgctgatttttacatatcagactttcaatctggattaagagccttggtgaaagttggttatggagctaaggttgcaccctttgttaaaccagctactgttgtggatataacaaaagaaaacagagatttgtctccaggctttttaagctggctagctgatcgcagtctctctagtgatgatcgtgtaatgcgtctcaaagaagggtattgcaacattttttgaattcaagttccttctttctttcttccaactaactagtttagaattgaaaactctatctactaaagggaccattgattcatcacaccataccgtgttttttttgctcgtttgtcagatatattaaagaaggaagcacggtaagcgtgatgggggttgtccagcgccatgacaatgttctaatgatagttccatcagcagagcctgtctcaacagggtgccagtggtcccgttgcctcctcccgacctacgtcgacggtcttatattgatgtgcgatgataatcagaatgccgatgtaattcctgtatagatgtttggtagttgaatgccacgatgagtaaatatttgaagggtgagactgatgtaacaaagtgcataccagtagaccacagctacttttctttttcctcaatttaggtgtgtaaattggcctagaagatgct

SEQ ID NO: 43582 - DNA, 3267 bp, Cannabis sativa
aaaatcctaattagccttataattttaagttgaaattgctatgggtttgggaaccccgggacctttacaattcctaatttcaaacttggttgatcaaagaacccaaatttattcatgtatgtgaaactttgtgtgggagagatgtgatggagatatggtgatcggtacaagttgggttatgagggggccttgttactgttgaggctcgcatacttttgaaatgaccttaatggcgacttaatgggatttaattatagggagacgaatagaagccttcgaggtcaaacttagggttttatttgtttgttgatttacttgggaaaaaggtcggggcatgccgaattgagtaaaagtgaggttggaacgagtcacaacttctcaatcatgggttggtactttttaccgcaaaactatttaatcttgatttctcttcttcggaccattatcctattttccttgatcgatgattaagcagcttttccaaacacctaggcaatttcagttcaaaaatgcatggttgagggagcatctttgtgttcagattataaaggaaagttgggatgatgatcttaatctttctattcggcggaaaattcatatattcaattttattttcttctattatttcaattccatatacaatctaatttaattgtataattattgatagatgaattcgaatcaaaattctaaaaagtggaatttgaacatgttttgattattatggatgtaaattgatttagaacaagagtatctagattatttgtagttgttgcgtttaatgcattctgtgtgattaaactttaccataagaatatagaaagttttcacataaattgggtttgtaaatcttaactagattatgaactatttaattcaattatttaagaagtaaaagaaagaaaaattgaatatttcatttaatcaaatagaaagagaagattaattttttagtaattgtaattagtccttgtgggacaatacttgattttactaagatttattacaaattgtaattgtgtgcacttacatatatagcataaaatttgtagcaattcttgttgattcctgattgaattatagtgtcatcttcagcataggatttcctacactatatattaattttatttatagagtataatataaaaaatttagattttacaagtaaatatttaaattctaataattttaattgtttttttttatataattgtttgataatattattaaaaaattacataaatataattgaaactatagaatatacatatacatatatatatagtttaataattaacttaataattgtaaaaaaaaatatagaaaagtaaaatacgtattcaagtccaaatatgaaaacagactggcttgtttaagaaaaattggccaatacgagcaaagcatagcacaagtcggaacacgacacgaaaatactaggtctacgggtcgtgtcgggcctatcctttgaaaatggtggcacaacacaagactacctatatttttttagggcatggcacaactcttgttttgaaaagtacaaaaaaaatataagacggactagcacaatacacactaatgtacaacattgtatatacgtaagaaacgatattgtaattagttgtaagaatcactcaaaaccatttcaacacaaatcttttatcaacaaatgatgagccaataaaccctaaacacgaactgagcatacgacactaaaaagaaatgtatttagagttaccataaatgagtaaagtgaggaaccaatgattcaatcaagccttgttggcaaaaatgctagagcctagaggtttatgagccatctgagttccctttgcgcgaatgtctttaaggcttgctacttcccaaacagtgacattctttaagaaattttacggttctaacttctaaggcctccaatgtttggagaagtattgtgtggaagaaagagattattttagaacattgttattagacataagtggtgcttagcaccacccagaagtgacaccttatgattggttatcgatatttcctaaaattattatcttaagtttgatacttaattacaataataacaatataacatcaagaaatgtactaagtaccactagtgcattttagcacttctcattattttagaagaatcaaggtggaggattgaaaatagcaatgatgtgagaatcttagatgacccttggattcctcgggcaagcactttcaacatttatgataagtccaaatgattgacattcttaggtaagggcgactctggcccccctcaagttttctacaactatacatacacgataatgcatagtaaatttgattgtccaatacatattttgttaggacttaattaacacaaatcacactgatcaaacaaaacaaaacaaagaataacatataatcaaaatggaaatgtagaaaataaaccaatgaataccaaaattacttggttcaaatctaatctcaatgtgagattagccttaatccaagagtcagcagaacctgagatcaatatactcaaacacagattgtcgatctggtttactctcgagcttcaactctttacacacaatgctctcataacaccaactctcacatggcttgagaacaagctttgtacatagaattctctaacaccctagttgatcatgctagaagtgtacttataggctctctacagaaaaggcttcgagtagagagaggataggattaggtaaatctattcatcttgagtattggacaattcttgaccgtttggagttgttgactaattgttttaacctctttgttcgtttagggtttttcagattctttttatccccttttcatttaattatttattattatttttttttaatttaatacaattagtctaggacacaaagcccaatccaacccgacctcgattatgcacccgcctcaacctgttccacccgaactcaaccctaaaaacaaacaggtttggtatagattatttgaaaaccgaaaacccaaaaccccgctcgatatacaaccctagctgtaattaaacattaaaaaaacaattcaccactcattttaaccataaagaactggccaataaatttgacattacatcgtgataactctcaaatgtaattttacagacaggatttaggctcagtaaagccttgtccatgtgagtgactacttggaaattttggctagttagcaaattagcatggtgaaggtaacaacacaccccccaaccaaggaagaaaaaagaacataacagattaaggacat

SEQ ID NO: 43583 - DNA, 1806 bp, Cannabis sativa
gttaattatatttataatttatgagtaatattttttttttttttttttgacaatgtaacttcaggagacacaaagagaaaggaagttacaaaactgaaacaaaaccattcgagcttaactctttatctagcctaaaacttttctagccaaacaatacttgttaaaagtacattcatatataacttaagaaagaagacacaagatcattttgttacattacattatataaaataaaaagaagaataattgataggacaaggtaataaaatcaagcgaatcatatattgtacgcatatatactatttacttttgtatgtacattagctaaaattgttgtcttaattatatgctctatctttttcggagacaacgaagcgcaccactgagaaaataaacaaaaattattaaagaagtcatcaacccacgctgccaattttattttattttttcactatcgttactaatacttaatcagttaccaccatattttcacttgatctcatttctaatatctctcctaaaaccaaacaaatacccaccataaatcttcttttaccattcaaaaatatccattagaaaagaattctctctctccctcacacacacacacacataacaaacacatatatatttctgtacacacaagagaccaaaagaaactactctctctctctctctctctctctctcttatgtgtagttctatatggagaaggaaggacacaaaaaaggtgaacatatatagtaagcaaaactagtatagctaattggggttcgatgatgatgatgagtagtagtactcgttacatgttattatttggtttggtaatagtattagagttgagtggtgagtcatggggagaagacaggctactaaatccagggaagttgaaaatgtttgttgatgagcttccagagatgccgaagatcccaggtttccatctctctagtcacggtcttcccaaatctaagtctctcaaaatcggcatgttcatgaagaaatgggtaacatcttcttcttcttcttcttcttttggtttagtggtactattattgcaaattactactcttgtatgtgttattattgctgttttccatttcggtcaatttgctgagcttccctatattattaatccataaaacaatacttacttcttcttacaaattaaggggtaaaataaatagctatggctagtagtggttgagaaagtcgattttacacattaagaaagaaaaaagttggaaaaacccgattcctgtaaaaagtagatgataacatgcaatagaaaagtttggtgggccaaagcttattaatttctaaaatatagatcgatttccctttggaaaagtaggtttataaactttgaatttataatattcttggaattagattaattaattcatttcaagttaattttagctccagattttatgagagtcgaaagagacggttctttattataccaatagagtcttaattataatctctcattacaatttttcagtcaattttatattctcttattataattttttagtcaatttttattcttaaatcaaatatcaaaatatttttatttaatttttttcacagtattatgcgttatagctagaaaattataattatttttaaattttaaaaaaaatctgaataatataatttgtactattagaaataaagttcctcatattctagtatacaacacgtgtttaaaaacatcaaatttatttttgacactgtaaactattcgaaattttttaaaaatttacaaaaatgatattctaagtataacaaacactcttataa

SEQ ID NO: 43584 - DNA, 5871 bp, Cannabis sativa
gaatgcaccagtggaggattctaacagggttctatcttttcaactttattttttatgtctttagttaaatttcttttatttcagaatttcttttagtagctaagttcttttaaagatcattatgtaaaccacttgaaattattttatgaattaatgtagttattcaatttcttcttcttctctttattcaatttccttacaatctattttgattttacaattatttactggtcatctataattgttatctatgaattcaaattaaaattctaaaaggtgagacttgaatatgctctgattgatatggatgtaaattaatttaggacgaaagtacctaagttatttgtatgattttattagttgttatgcttaatactatttttgtgattaaacttaccatagaaatatagaaaattttcacatagattggatttatatgtcttaactagattataaacttcttaactcaacttattaattgaataagaagaagagaaattgggcattacattatgaagtaaaataaatgatagttagggatcataataatccttgtttttattactgttatttttcttaattattgtatattttatttaccttttatccaacaattattatttatcaaatagaaccaaggaaataattaattggtaattgatagtcaatcctcaagggaacaatactttatttatcattatattacttattttgattgcgtatacttgcatattaaattttgtcaaacaagtttttgatgctattactgaggattgaaaatttatcaataccagtttagttaatttttattctaatttgattttattttctcttatttctaacctatttagttgccaattttttccatctcaagcgaatcttttatatgtgcaacagaagaggtgcatatagccttgttcctttgaatcctgagattgagaaatcgtgtaagcaaaacagaatgaacaagatggaggccaagaaagaagagaagatggagctcaatgaagatataattcctagagttttgcaaggaggtcaggctcaccctaatgttgaaaggagcctgtgtgattatgtactccctactttaatgggagtacaaaacagtatcagaccaccagtagtagaagccaacaactttgagatcagaccagctatcctacaaacggtgcagtccactctccaatttagtggatttccataagaacctcacactcacttagcaaattttctggagctttgtggcactttcaaatacaatggagtgagtgatggtgctttcgaattgaggctttttccattctctttaaaggaaagagagaaaatatggctaaagtatctacaaccaaattcaattgtcacttggcaagatctagctcaaaagttcttctctaaatgcttccctccttctaaagctgctaaattgaggggagaaattaataataacttttgccaacaaaatgatgatggtgaatctttgtatgaagcttggaagcggtttaaagatctattgagaatatgccctcatcatggtatggagcagtggatggtggtttaaaaattttatattggtttatgtcctactactaggaccatcattgatgctgcatttggaggcacattcatgaaagtgcaactagagcttatgaattacttaagacatggcaatgaacaaccaccaatggtatggtgaaacaacgattgtgaagaagaaagttggtattcatgaattggatgccattactactttgacatctcaggtagctactcttactaagtaattgtagaagacaactgaagctgtcaaagttgtacaaacgggttgtgaaatctgtggaggaccacacactcttgacaagtgtgaatctactaaagatgttttgatgacgtactcaagtgcaagctattgccaacttttagaggcaattcaataatccattttcatattatacaatcctgggtaaagaaataatccaaatttctcatggaagaataattggaatcaagcccagcaaaatatgccttagtaacagcaagctaacccataaacaagccaatcctctactcctcaacagtgtaatcaacaagctccatcttatgaactacaggttgctttgctaaccctcactaacacacaaacttagtttatgactaagaccagagcatttatcagaagccttgagatacaagtggggcagttagcaactctactcaataatagacctcaagaaaataagtagagcaacccgtggtacaaaataaggagaatcaagatgagaattctggaacaactattgaagaggtaaaagatgactgtcataacataaaaaagatccctctagtagcagcagagtagccagttcgagttccatatcctctaaggcttagaaaaactacacttgataaacagttttctaaatttttagaggtattcaagaagttgcacattaatattccttagatgaagccttggacaaaatgcctagctatgtgaaatttatgaaggagatcttgtccaagaaaaggaagttagaggattatgaaatggtagctcaaactaaagaatacagtgctattttgaaaaagaaattaccacagaagcttcgggatccagacagttttacaattccttgcaccattgagaagttccaatataagcaagcactatgtgacttgggtgcaaatattaatctaatacccttatcagtattcaagagacttagtttggggtaagcaaggccaacagcagttactcttcacttagcagatagatcagttaacatccacgggtgttattgaagatctacttgttaaagtggataaatttatctttcctattgatttcatcgtgcttgatatggaggaggatgctgatgtgcctatcattcttggaagaccattctgagccacaagacaagcacttatagatgtttagaaaggtgaattaaaactgcgagttcaaggtgaggaagttgttttcaatgtcttagaagctatgaattatccaagggagagtgagttgctttgctataaatgttgctgaccaatttgcttctaaaaaggaattattttctaattctttgatgatggctctaactcaatttcgcgaggactttgatgatagtgaagtaatggaatatttaaattggataaactctcaaggtccttactataagaaagatatgaggagttgggacaagggcctagaagatcattgccttctgtggagatgccacctgagctcgaactgaagactctgccagaccatttaaggtatggttacttgggtgaaaacaaaacttttcttgttattgtttctactcatctttttggtgtagaacttgaaaagcttttgagagtactaagagcccacaagcttgccattggttggactctagctgacattaaggggattagttcctctattgtaatgcataaaatcctccttgaaactgatagcaaaccttatattgatgctcaaaggaggttgaatccaacaatgaaggaagtggtgattaaagaaactttgaaatggcttgacaacaacgcagtctatccaattttagatagtacatgggtgagtccagtacaggttgttctaaagaagggtggtatgactgtggtgacgaatgaaaataatgaactcatcccaactcgaactgttacgggatggagggtgtgtatcgactacgcaagctcaataaggcaacaaggaaggatcattttcctttgtcattcctagatcagatgcttgcaagcttgctagccacaataatcattgcttcctagatagttattttgggtaccatcaaataccatagctctagaggatcaagagaagactactttcacttgtccttatgttactttcgcttttagaaggatgccatttgggttatgcaattctcctgtgacattttagagatgcatggtggttattttttcagacatgacagagaaaaccatcgaaatcttcatggatgatttttattgtatttgggtcttcttttgacacttgcctgaaaaatttagaagcaattttacagtgttgtgaagacactaatcttgttctaaattgggaaaagtgtcactttatggtcacaaaaggtattgttcttggccataaaatttcaagcagtggtatagaagtagatcatgcaaatattgctactattgagaagcctccatctccagtctcaataacaggagtaagaagttttctgggccacactggatttaatagaaggttcatcaaagacttctccaaaatctcaaagcatctttcaaattttctaatgaatggagttgtttttttatttcaatgatgaatgccttaaagcttttaatgtgtttaaggaaaaacttatttatgctcctattttagtgtctccaaattggaatttgccttttaaactaatgtgtgatgccagtgattatgcagtaggtccagccttggggcaaagagttgataaggttttcaggactatctattatgctagtagatttcttaatggtgctcagatatgttatgccacaataaaaaaaaaagagttactagctattgtctttgcatttgacaagttcagaccttatctaattggtaataaagtgattgtttatattgatcactctactatcaagtacctgatgacaaagaaatatgttaagcctagcctaattagatgggttcttttgcttcaagaatttgatatggagattcgcgacaagaaaggaactaagaatttagtagcaggccacttgtcaagacttgaagtagaagaaatagaaaatgagaaagcagtgtagataaatgactcttttcctgatgaactacttttttcagcaaatgaagtaccatggtttgctgacattgtaaactttctagtagcaaaagttttgcctcctgatactacaaagcggcagttgaaaaagttttattcagaggtaaaacattacaactaggaagaaccaattctctataggcattgtgttgatcaggtaattcggtgatatgttccagaagaagaaatgaattcaatacttacccattatcacactgaacaatgtggtaggcactttagagcttttagagtaacaactaaggtattgcaaagtggtttctattggccttcattgtttaaagatgctaatgattttgtcaaagcttatgattattgttaatgaactggagatatttcacggagaaatgagatgcctttgcatggcattcttaaagtggaacttttcgatgtatgtggaatagacttcatgggtccttttccatcatctcataatcatgagtatatctttttagttgtggattatgtatccaaatgggtggaacttgctgctacaagaaccaatgatggtaagactctgcttaattttcttcataagcacatttttactaaatttggtacaccccgagctctcataagtgtcacaggctcactttttcaggcaccgaaacacccatgcagcaccttgacttctcaaagccaaggtcagccttccaactatccgagtaataatgggttcattttccacgcgactgtgtgcctcgtacacactttcgtccctcgaataactcctgtcgagtcatgctcgcaagcatccatgagtgcatccatgcatcgaggctctcaagctaagatacttgcactgtccatatgttcccactatgataaggaaaatctcaataccgacgctcacctagtcactcgtgaccaaggtagcatgtatggcaagatgacaacactaagctgatatgccaatgcttctaatcgagccccattcgatactgtccgaacagtctccctcattgcccaaggactccaatacgtccatggtccaatcctcaaggcacca

SEQ ID NO: 43585 - DNA, 1934 bp, Cannabis sativa
gagaaccaatagcaatcgtgagattccgaaccaataaaacgacgactcttttgttcttcctttgacttttgccgctgcttttggctattaccagagactctctctctctctctctctctcaccaaatccgacgaactaatcggaaaacgcttcttcattgacgatgactcatatcctttcttttgaatcgttttgttttcaaattttcagatcatgttttttagtttaccaattgttttttttctcttttctggtgattccaaatccctaaaataaagaacagatttttgtttgtttttccttgattcctttgtctcacgcggcagtcagagggaacgtgatcgggaaagggctcaggctcggaccaagggtggcaagaacaaggaagatggtttgactcccgagcaacgccgagaaaggtttcaatttcccccctttttttaatctagggtttctacagaaaattcccaatttttatagttttcctttttctttccttaatctagggtttctactgaaaatgcccaatttgataattttgacaattttttcccctaaaataataaaaattgaattttgttttcagggatgcgaaagcccttcaagaaaagactgcgaaaaaggcagctcaagcttcaggtgggagctcatctggaggtactgaaaagagtaagaaataataataattgaagaagaagaacaagaagaagaagcagtagtagttctgatttgtactatgtttgattttttaattttgaattgatctgtggttgttgagatcctgtggtttatgatctaagatctttgatttgttgatgttgggatacttgataacttttttttttgttaactctaataagtccttgtggatttttattcttattggtatctagtttcaaataaaccatttggtgtagtaatatatctaatgtttctgtttaatcttagtaatcatctccattagttgctttgctcctatgatttcagtgtttcatacttcatggggtttgtgcttgtttagtctcggttttatttagtcaaaagacattgaaacatgtacagttattgaagctggatttacagtgtgattgatctgatatagatattgagtcaactatggaatggaagtttcatctgtctaattctgtattctggtatgttttgtagatatgctttcgagtttaaacagttttcttttttaactttttcaatgatcaatagtgttgtctttcttttgtaatttgcttttttgttagtaggatacttgagtgtgaactagatcttgggttgactttgttagcatatgcagagataatgttaaatgttaaacagatcatgttattgttgaattgactttactgagcattgtggttcataggatttattatggcttaaaacaagttaattatcttctcttgccttggcgggtgtggcgtccattttcgttgaagtaaattactcggaagacaattatatgaatgtccttagccagttacaacatggagtaaatgctgttgtttcttacaggtagcataagtatgttggtatccttagaatattttgtagagaaaattaaaagaagcagattggttatttgatcttgaactgaaacataataggggtttaacttgtgttcattgagggtatggaaaatttgattgtgtttggtcacaataggattaggggggtgtacatagtacgagtaatggcatttgcacaaaattttttcacatacaatagtcaccattagaggctataatgggccacactatgtatccaactatccatccatggcttacccgagatggatagttcaaaaagtcacgcatatggtttgctccgagaaggtttgaggtttgagtccttcttggatacctatagagcaagagaaatgccaaggggtacctcatggtgcaaagcaccacaagaggtgt

SEQ ID NO: 43586 - DNA, 2837 bp, Cannabis sativa
agtcagaccatatcctctacccctgaggagaagaaatatacttggatacaaaagaagattaaattataaaatagaggataggcaataacaatacctcccgaggatcctcctgtgttggatcacgtaaagcaaatatttctttctggcgaaatgcggcattatcgtcaaaattcaacttagcatcagcagctaccagctggttatcggaagtctcagccagcggatttatctgaccattaaatccaggttaattctaagatgttgaaaaaaggaaagttctaagtaacagttcttcagatctgaaagttaaaactcacttccaacaaagtgcaatcgctctcacaaaacaacttatatagcttcttcacttgttcaatagaatcttttctgtcagcacctttgggagccaatccatccactacctttgcagcatcttcatctgtaattcccttgaaaacatcaatgggaacctaccaatatgcggtgaaatatagaaatagtaagttacagcttacaaatctaagagaagtttacaggacaataaacatttacactataagataacaaccttgataatcatatctgggaatttctcagcaagatcttcaatgctagttcctcctttactgcaagcaataataagctggggagaaaaaaagaaggaaaccatctttcaataaaaagtaaactaaaatatttctggtaagaatgacccatacacaaaaccagcgattccaaaaaaacacaaatattatatttggttaagagaacataccggaccggcagtttttctgtccagagtgatggcaaagtacatttcattgacaagtgacaacttttcgcataaataaacctgtaaaaggaaaaagaagaaaccaaaggtattgaataaaaattatataattggttaaaaatacatctaaaacaacttggagtgcttagaaacattgagaggagtgaagcacaacccataaggttgaagcaatagagcagatacataatttccaacagtgtattacatgattgttatttctctcagcagttgctgtacaagattaagtacaatatcccaagagaaagaatacggattatcatgatgggcctaattaattagctcccacaatcaaaactcaactaaatgtaaatgaagatattattttatttatgagtaataatatgtacacacacttttaacaccaaaacagtatgcacagcacacctatgaggcaaatttttccaagcaatcaaattcatttaagatgaattccactaagttaaaaagaattaccacataggtgtgtagagtgttttggtgcaaaaagtgtgtgcacaatcattactctttattaattactcaactatgtatctagacgagacatttagttgattaattaagaatgtaatcaactgtcaagtcaagtcctacatgtataataacaagtttattcaaaatgtatacaacaaacatactgagattgcttattgtcaacaatcaagcacagccttatactatataactatccaaccttgctaacaatttttccctgaggaccagtctgttttgttacaagtatctccccaagcatcttccctgcaatagaagaattcagttacaaaaggaaacctttagaaaataataactaaaaaaaaaagatagaaaacagtgcctgtgggtgatgcacccagatagtttttcagtacataaggagctacaatccacttgaagattaccaaatgtataaaaccactatagttttttcggagagatttaacaagtagttcatattgccaagaagacaaacacaaaaccagcaaacatagatacaatacaacaatcacgcaccaaaagcaacaattcaaaagacaaaaaaaaactaaaagcaacaattcaaacagtatgaagatattcttcaataccagcaatatctgcaacctggtccgtcttgacaatgtgtactccacccttgagaccattcttaaacgttcctaaacctcttccaccagccaaaatttggcttttaaccaccaactgcaccaaatacacattaccattgttccagttatttcataagtttatttgctaagaaatagatggaaaaataaaataaaaatatgaacttaaatacctcattgtcgttaggaaacaccttccgaatagtctctttcaattcatccaaagaagcgattgcagcacctttaggcacgttgactccatatttccccatcaactcagctccctgatttcaaaataaaagactctcagcaagtaagatcacgcaaatcattcttcacagatagaaaataagcaattgtaacaataagatctttcgcgcaaaaacaatacaatttcgatttcaaatagaaacagtattcgtggaaacaacaagacctgatattcgtggatgttgagacggcgaagctgttgttgttgccatttgccggcgacggagagagagcgagaaacaagcttgttgaaaagtcctctcaccatatctttggagctcagaaaccctaaaaccagagagagagagaaaagagagaaaatgggtttgccggaaggagaggcgatcgggaaaggtcaaagaggagtgagatgagatggaatccctaacactttctcttttctttttttatttacacttttacccttctatgttttggttattataagtttgcccagttttcttcaaattattttctgtttaacccctcttcgagaaactttgcctatttctttcttctatttattattttattttatttttgtagatactatctaaatttattttttaaaatttatatttaactcttggagggtttgtttggcttgttgtata

SEQ ID NO: 43587 - DNA, 1976 bp, Cannabis sativa
agcaaagaactatccaatcaacccaagttttaataaaaccaataaaacttaatgtaagcccaaataaaaagtctaacatattttggatcattacgatcagtgttttaaaatattaaactgtattaccgatttataaaaataattaaaagtaagtttagacactatattgatcaaaataataagttgaatatatatgattagatcttagtctagctacttatgatatctctaaaagatagagtagagaaactccaaattcattaagaatattttaatcatattcaaaatatattacaaaataagtcacgttttaatatatgatataaaatatatattttaaaatattaaatttaaatagataactacgcacatcacatgctactacgatatatacaatgtgcaagtagaatatagcttgaaaatccgcttcaaaaaatatatattgctttgaaaaagacaaaacataaataaaccaaataaagcacctgttaataccaaacaaaaagcaaataaaataaacaaagataataataaagataaaggaattccaaataaaataataggaaaaaaaagataaaagcaaggttcaattattgatgtgtaaaagataattaaatcaattaattataatgataatagacatgttgctagtatagctagtgcagtaaaacatttatataacagcatcctagctaggtcaaatacatttttagctcaaaatttaaagaattgggttaataactttctccaatcaaatataaaattttctttattttataccccattttattttgagctaaaactttagtactaaaatcatattttttttattttactttatatttttaattacactatcactatacatcatttttttttttttctatatcattaaaatattatattttaaaatatatatttagggattgcccccatatactatttttttaacattttttttttcaaatttacggtttgagtttttaaaatggttgcagtgccagttgcaataggagtttctatacgattttttgttgcgatttaggtagcagctgtagttacaataggagtttctacgtaaaattctaagaaaaaaaaaaaaaactattttgaagtataaaaataaaaaacccctatatatttatttattttaaatatataatattaatttatacacatgcacataaaaaaaataaaatattaatctataaccttaataaaaatgagaatgcttatgggcctctactattgaattacaaaaataacctttaattaatatatttatatatatatatagggcaagactatagtaggacctagcaaaagttccctatcggtagggaactttttttgaccattgattttaaatcatgtggttattatgatgtaaggtatatactcttacgatatgactacttgtatacaattaaaactttatacatattataataatatttaatgatatttattttttttaaaaaaaatattattaataattaaaaattttattaatttttattttgaattattattattttttaaagttactttgaattatttttatattggtatttattttcaaaaaaagaattgttttttctaaacttattttttttggcttttcataatttactgttgttttttttttttttttgcttttaggttgtgcgtaattctagtgttattgactgtttttttttttcaatagtttttatcttcttgttgtttggatgctcttttgagacgtcacttataaaaaaaaattgattaatttggttagatattattttttttgccaaaaaaattgagtttaggagaaacaagttagtatgattccaattaaagagcatctaaaatcattcaagggatcttacatcagagaaacttttgaaaataaatatctatgtaaaaataatttaaattaattttagaaaataataataataataattaaaaaattaaaattaataaaattt

SEQ ID NO: 43588 - DNA, 3158 bp, Cannabis sativa
ttttttattttatttttcaaagaataattattagtggggtgaacatttgttttttattttattttttaaagaataattatattttattacattgaaaaagaggaattttcccttaaaaaacgataaatgatttcaagtatcaagtatattcaataagtggccatgctatatgggttccccgaaattcaagtaataaaaatttaattttgcatttatcccgaaagtatgaaaattaattcatatgagcccaagaataattactcatgatgataacgaatattagccattacttttttcctttctttttttttttattcaaatagagctaatcaaggctttttagtattatacaatatccaaaacgacaatatgtaaacaaagctatatgggcatgacatggacatgtgaataaaaaagaccaaccgaccaaaagagcatttagttttagaaattacataataattttgacttatgattatattttgaaacaaggccacatgaattattatttcatggtaattgaattataaaacatttataagccaatgaaaatgctaaagacaaaaacaagaaaggaaagaaatactatttcactatagatgcgcagaagaagaaacattagaagttaaggaacaaaatgatgttaaatgtcagagatcagaaagatatttaatatcattgttttcggttggtttgaattgcctaaaaaataggtaatttgtgacacatattggctcatttttcagatgttttagaatgaccaactcttacctcttcgaaagagtattctattggcagttgatcagagatatgaccagtcaaaacacaaggcgttttggcctccagcatagaaactgaggacactgtcgttggagtgttgggcataggaatcggcattgtcgttggggttctattgtttccctcacaaccaacgaggatagcatgcttaggaggagtagatgctagcttaccctgataatcatcttcggggcggtcattcacaatgttgacatttgatgatgctcttgaagagaagactggagagaggggtttccttacaacaggagaccccatttcacgagtcttagcataaataacctttggaatatttagtttctgaatattgaccaggaaataagtccctctttcctgcaataaaaaattgcataaagtttactaaaatggtcttccgaaatattgtaagcagatgtatagcctgtgattctgtgaatggtccaataatattctttataataagaattttctgcttagaatagaatgctcttctacaataagtttgctaatatcctagaatcaatttgccaatattatattgcatcattgaatacttagcgcacaataaacaagaggaacaataaaagatcaacaacattatagaaaataattaccagaaggagcaccgtttttagtagggtgcctactgagagttgcctttcggggttctgaattctgaagcactactccaccgagagagagttttctatcgtttgaaactcctgttattctataacccttgacgctagcgggactgggctgtgacccataacgtgcttccttctctgctataagctgtccaagacgtttcttctggtcctgcatacaaaaacgataggtgtcaaaaaagcatgtttcataagctcttattcaatctaagactgaagtccttactctctgcctttgcttgtcctgctctttttcttccctcgagatcttgtactggtcaagcatggaaagaagtcgttcctacaaaacacagaagttataacgacaagtttggatgaaaagcctaaacaattttatgaggctccagctaataaataaaaaactcgcgtgaacaaatgtattgagagaacttcttacagtatcatagaagaattccactcccctctctacttcccaagctgcggttttcgaaatcaatgtgtctaccattgctgctccaattaccaaaatattttcatttatttaaaaacaatcataaaaattataattatcataatttcaatggtgttacattaaataactaaattaaagacagcttggggctaactaagaagtaataatgaaatgaaagttttatccaagtcaacttgaacacctgaagtggtaaatgacgaaggcatagttcaaatgtcaagttgtgttggaatcaaaataacttagcacttactaggaattttgtttatcacggcgcgagctttttcagcacgtttcaaagcgagatgagcaccccttccagcatgatagcgcctatcatcctgaacaaccacaatacttaggaatactgaagggaaaaaaaaaatcaaatcctcccacactaacccccttctgaatcactatattacttggaagtggaaataaaataaaaaacgttatatttggttgagagagaaaatggatgtaatgaaaaaagaaaaattcattttcattctatttgtttgttttgttactcttcaccttattggaaaagtgactccagtgactatttttctagtattttggtggaaagtattcctcccaaaaatgagaggataacagacacaaatttatattcctattcttattatcttatttccattgctcccaatcagatggggcaaaagtgaaagccataatgaataccacttgggaaagtgacatttatatgttttaaccgataagaatgaatagataaaataatgatcaaactaaattgctgcagggtaattggatcacaaatacttaaaagcatgcatgaatatacaagatttaaaccttattgtaatcgtctagccagcactcttcttgacaggctgcctgccacttctcaactttttctaatatttcctttctgcttaaaacttctgctttagcccgagcaatttcaatttcagtctgttccaacaggtactctggatccattgttcctgcaaaatgataaaaagtgaactgtctacatagaaacagtttgaaaacaaaaatacttgtaatttggattttggaacttgttaattcaaagcacgtttactaacacgtcatgaaaagaatcatagtggaaaaatattttttgatttaaatatcaaattttataaaaatctcttgctaattttaatgaatgtgtggaattcaccaatatgtgtcatatgtgtataaattac

SEQ ID NO: 43589 - DNA, 2526 bp, Cannabis sativa
tcttaatacaccatcctcacgtttgggccttaaaaatgtgggtataatgaaagacctttaagagatcatagggccaaatgtggcatttgaaaaaatttcacaaggccaaatatcagaaaatttatgggtgtacacgtcgggaaatatgtgaattttgaaacaggttaaagatcccaacactgaaaactggcacacattggtcgaaaggtcccaaatggaggttaacagagagagcggaagtatcttttttggatcagtggcactttagctcacaacaaatcacaaacgactttttgaaccggtgacactttgggctcacaacggatcacaagtggctttgataccatgttagaatgtgggataaaataaatgagattccatctcaaaaccaattgactatggaaggagtaacccattcatcttatatatcacaatttatttccacacattaacaatgtgagactaactcttaataggaataaaaagtaatctccattcctgccccatttcccttttatgcaggaaatccccgccccattaagagcggatcctcacaagaccccatccccatggaaaaaatatacatccctaattattcattaacccattccaaacagaaagttttcttaaacaagtttttgtatagttcgaaaacgattgtttattgtaacatcagtttcacattgttttaaaaggaacaaacttaggtcaatgtgattgatttaaaacttaccaaatcttatcatcttacatgcagatatcatatcatcattagataagagatggatgcacaaacaaaacatttttctgataaaaagcggcacaagttgactgaatttttttctctccctagctctgccatgaaaaggttacaacaaaaacaaaatgaagtgaaaaatgcactaaattctgcgactgttttgacaaaccagggagagtagcaactatggacgaagctttctaagtagccatttctttcgtagtgcaacatcaagtgccaaaaacattttagcttttctctcatcttctaacaaatcacaggcatctagaaggagttcatcgtccaaatcaggtatagattgaagtgcatctagtgcaacttctatggagtgacagttcttgttttctgtcttggtcaccaactctgcaacaaggtctgccatctcagaaagagactccagtttattttcacaagttttctgaactttcctggcatttcctgtggccgtattcaacagtctccaagtttgccgtttcttttgttcctcgtacataataacctctttagttgacaatgggagattgcttgctccaccaaccatagtttctagggtactagggccagttgcagttgcagattctgcaccctgatcatcagagatattttctgtatccataacatcaagtcttttatctaatactctgctttgataaatcttactcaaatcactgtaaatgcttaagcctgtgcttctatataagatggtatctgggttttcctgcaaagcatcatacagacataatttcagaaagaatacaaagtgaacaggattctaatcacatttaacaatacaccacagtcaaaagaaagtttcctcagatcaaagaaagcattttctaaattcacagagctaagctttggaagattattgaatgtagaggcaatctaggaactaataagagaagtgtaaggcatgcaccttactataggcctcccaaacatcattgtcagcagttaccatttggttagcttcatcccatccaaacccactacaactaagaagcttgcagatatcatcatacagttttctcaaccaaacataccgatcttcaagaacacatttatcacattgaagtccaaatctttcattaaatgaattgagcacataaccccatgcttgctcgttgaatgaatcatcaatcttattccctttttgcacctgctctaacaaaaggtcaatcaagtatcggtccactggcggtgtccaatctataattgaaggaacagaattcacaggagagacatcacttttctcatcacctagagtcaagtaaaccatgaaaaaataaatcatgacatgaagtgtcgacagaagaaacagtaaacacagtgaaattatttttggtaaagatgccaacgcgattttatcttcacacatatttttagtgagaaagaaagaagaaaaggtgtacatggttttttatgtatgtagactgaagccttcgtcatatatttcccccgttttttttttttgtaacactgaaagctcagtcattaggagaaacaatttttattgttatttcctgaaactaggcttcccggaactagaaaactacaacaattgttatgtaggattttaggagggactcgaaccacaaacttagcgagagcaaaccacatgtctagtcattcgaactaccccacttgggttcactatcataattatcttaacctcgtgattggtgcgtaaatttgtttctctgtaaaccaacaagaaaagtactaatatcaagttaaaaatacca

SEQ ID NO: 43590 - DNA, 3859 bp, Cannabis sativa
  modified_base (405)..(406): a, c, t, g, unknown or other
tttttttttttttgtaaaaacttattctaacttttaatcaactttataaaattatttattttattttttataaacacgtaatattataaataatgtctaaaaaaagattatctaaaaaaagagtagtattactgtaaatattcattataataacaaaataaataaatacacatttgaatttgatttatttttgtattttttaattttaaataaacacacatttaaatttatatacattaatttttataatttttatattgtattttattaaaaaaaattattaaattataataattcatactaaaatagataataaatatttactcattaataaaaaaaatatttaatttgtttattcttataaaattgtttactatgcatttatttaattttacgaaattgttnnttttgagttttaataaacatatttataatatcaaaaaaaaatattttagtattaataatttttaaaacattaatatagtaaacataagatattataaacattaattatattaatttatttatagtaattagtttaattattaatatttatattatttaatgagtaaaatgtatagttttatgtaatatgtttttaaaatgcaagttttgaaaatagttttttttttctttttttgcacatatttataattatattatttttgttctacatttaccaaaaaagcccttaataatattagcatggattgctgtcagcttaggtgctttggaagtaatatggcactcacatcatccgatcttcaataaccaataaaacgctttaggttttggttagaagaaaacattagatgaaaccatgatgttttctctctgattttgacactctaactatttttagtaatagtagtgcaatagttcattaacaataatagtgagttgaaaaataataatactataattaagatttaagagcataccatagtatttatttgccattcctatatatacaaccatctctcataaatagatgacgataatggtggtgcacatgtgaattatacatggataaattatcacttttaatcactcttgtaaattatttatgattaatttaatacccattatgacaaaactattatgatttgaattctgtaattaaacaagacttgtcccaagtcttacctactatgcatgcattacccaagggttggatacttagaattaccaaaccttatgactcaatctcacccattattatgatttgaattctgtaattaaacaagacttgtcccaagtcttacctactatgcatgcattacgcaagggttggatacttagaattaccaaaccttatgactcaatctcacccattcctttctataaagccttaactcaaaaacatatttcttttcaactaagctcttgcccgaaacgacaccacatcacaccacaatccttatggcttgtctagaagctcctcctcccaccaccacaaacgacaatagtcacttccctttcttcgaccatacgacaccaatcaacatggagctcagagacttcaaaccaaaaccaaaaccaaaatcaaaaccccacaccaaaataaacccatctctcggtgagcttctaaaacgagttgaagagtctcaaaccaacaccccaaatcatcagattctcgaccttagttcggtacctcagtcctatcctttcgtcctttcctttcataatctcacatacagtgtcaaagtccgccgaaaattggctctccccttcacaaaatcatctgccgaaaacgactcctcctccgatattggtggtgatatagaaacctccttatgtaaaaataacaacaacactaagattttgttgaatggcatatccggtgaagctagagaaggcgagatcatgggcgttcttggcgcaagtgggtcagggaaatcaacactaatagatgcattagctgatagaatctcaaaagagagcttaaaagggttagtgagtttaaacggagaggttttggagtcaagattattgaaggtgatttcggcttacgttatgcaagatgacctcttgttcccaatgctaacagttgaagaaactctcatgttctccgccgatttcaggctccctcgctcactctccaagtccaaaaaacgagccagagttcaagctctgatcgaccaattaggcctgcgaaatgctgccaagactgttattggtgatgaaggccatagaggtgtgtctggtggagaaaggagacgagtttcaattggtatagacataatccacgatcccattgtcttgttccttgatgaacccacctcgggtttggactcaacaagcgccttcatggtggtgaaagtgttgaaaaggatagcacaaagtggtagcatcgttgtcatgtcgatacaccaacctagttacagaattctcagcttgttagaccgtttgatcttcctttcccacggccaaaccgtctacagtggctcccctgctaaccttcctctgttcttctccgaattcggtcacccaatacccgaaaacgagaacagaacagagttcgctctagacttaatccgagagcttgaagaaaccccaggtggaacgaagagtttagtcgagttcaacaactcatggcaagccaaaaccaacgacgaaaacaatcccaacagaacaacaaatagaccaaagctttccctcaaagacgccattaacgcgagcatctcaagaggaaagctagtctcgggagccccaaaagatcccaacaacacaacaacaacaggttcattccccactttcgccaaccctttctggatggaaatggtagtcatatcaaaccgttctgttacaaattcaagaagaatgccagagcttttcgggataagactcggagccgttttagtcaccggtattatactcgcaaccatgttttggaaccttgacagctcacctaaaggagtccaagaacgactaggcttcttcgcctttgccatgtccacaaccttctacacctgcgcagaagccatccctgttttcctccaagaacgttacatcttcatgagagaaacggcttacaatgcctaccgccgatcctcctacgtgttagctcactcactaatctcaatcccatcacttgtgtttctctccttaacctttgcagccaccactttctgggcagttggactcgcaggaggactctcgggcttcttcttcttcttcttcacaatcttcgccgctttctgggccggaagctcattcgtaacattcttgtccggagtagtaacccatgtcatgttgggatacaccgttgtggtggccattttagcttactttcttctcttcagtggattcttcattagtcgtgatcgaatcccaccttactggctatggttccactatatctcgctcgttaagtacccctatgaagcagttttacagaacgagtttgatgatccaattaagtgttttgtgaaaggaattcagatttttgatcagtctccactcggtgcagtgccagcgtcgacgaaaggggagcttttgaagaccatgagtaagactctgggaatgaatattactggctccacttgcgtgaccaccggaacggatatactcaagcagcaggggatcactgatattagtaaatggaactgcttgtggatcacaattgcttggggttttttctttagaatccttttctactttactttgttgttagggagcaagaacaagaggtcgtaattagtttctagtgtacaaaaattatttatagtttcattttcattttaaaagaaatttatgtgggaaatgtaagtttaatttgaagtaactttttcttttcttcctttgtatttgtttagcatgcgtaattgatttgcatgtgctgtctttgaactttgaa

SEQ ID NO: 43591 - DNA, 2963 bp, Cannabis sativa
tctttttcaactctcctaaaaagcgaaaatttgaagagatttttccagtttttttttttattttctgtaataatacagcgatatttgtgtaaataattttattaaaaatatttttataaataaaattaattttaagtataatattaaaaaaattcctaaaaaattattattttgtttttttaaaataccgaaacagtaaagtatgggaatgcattggtacgacaggcacaaagaacccgtgaattgattcatttgagctggataagtaggatccgtatcatcccaattcccataacacacaaaatcttttgccctcaaacgtagaatctaaatcctgacacgtggcaatctcctacggattcagctgtctaaactgtcctctctcctaattcccgccacattcttctctattaagttaacggggattcaatcaaatcaatcctatccgtgacggcgccgtgaccccttatcattccatacccatcagatcaaacattggatggttccactgttttcacggcatttccactgctacggacccaaaaccccaatcctcaatcctatttaataatatcaacaaaaactcccgccaaaacaattaaatataattaaatatatatatatttttaaatttcatttgtaataaatggtggtagtggattttggtggtttaaatagttaatacataacaataaaaacaaatgactattggtaccctatctgccgaaaacgacagcaccgttagtcaaaatagcgggaaatgctttcatgtgttttttcaaaatagacaaattttatgacttattttctacggtgtggtttcattccacaaatgaggagttagagattaggaaagaaggttcattattatattgtatgttttttatttttgaaatatgtattgtatttatcaacttattatggtatttttaatttgcacttaaaaaaaagaaggaagaatgtgaagtttaaacgagatgggtagcgcgttgaagaaaggtgaaggcattggagacattgacagacacatacaatggagtggtggggtctgtctgccggctagcctgcacaaattacttccttctgttggcttttctttctattttttttaaacattatttatttttttaaaatatagtataaaattaaaataaaatcttattattacatatatggatatgggtatggttggttgcgtagggttcccgccaaaaaaagagaaatgcaaactcgactcaagtcactctcacaatcacaataataataaatatggaagagtagtggaatagtaataattgtcatctttttctaattttgtcttagtttggtgctgacagtgattatcgtcgttcaaaatttgaactcaacggtctgatttcgcagccatctccccattccagtccaatcaaacaaaaacaactatttagattgcttgcgttacttccacgtgtacttgattttcccgcgcaatcaaacaattttatttttaattttttaccaaaagaaaatgttaaatgcagacagagaactttaaatatgaaagaaaaatataatgatgataattattagaaatacaatagttaaaaggttataaattgtggtagatatatatcatataatataagctcggtttttcggtcaggaggttttttttttcaaaaaaaagttaaacttgatttaatgttaaacaaaggtcatacgtctggcaaaaaaaaccacacaatttcactaaaaaatgactttaactgtcagctaactataccgataaataaataagcaaaaaactcaaagctgactcagcagcaaaaaaatgaatataaactccaaaaaaaaagccaccaatgccactaaaaacatagagtgcacattgaaaagactaaacaaactaaaataaactactaaacaataattagattttctcaatagttttaaacacttgagtaaaatattcctgccagtttctataatcatcgcttattcaagtatcgtaaaacgaatggaataggcgacggttcaaaaccgtcaccaaaaacctttctcgacagtgtaaaattgtagcatatactgtcgagtatagggcacaattttaaatcattaccttactataagcaacgatttatagtgtaagctatacaatttttgtttcttaaaatattagtttccagcgattatttttttttctatcgttacattgtaagaataagaaagagatatacatatcgttaattatatgaaagtaattaattaatgcatgtaaagtataaacataaattgagatatacattgattattataatagccattgtcgcaccacctttgctttcacataatcaacccattgatcacgtataagatttatctcgtcatttgagtacgaggtcttgaacctaccttgtaaaatcaaattatatattaattagtaaaaagacctattattaaaacaaaagaaaaaataatatttacattacttattaattgttttactatttctgtcaattgacgtattggatcttgttcgttcatgaaattttcaatgaatttcatgacgtagtattcatattatttcccatttggttgttgtggacagatcagagttatccactcaatgtgaccaacattgcaccagtttataaatgtattatacatgttgagcgacctacacaaaaagtaaagttaacatataaaatatcaaacaacacacttatatattgtgatatgggttatagaacttacgtgtactaatgatggattttaaatcttgtggtacttcgtcattgtttgaatccaagtatgtcaccgtctgcatacttaaatgagtacaaacatttagctggataagtacaagcatccaattaaacagttttctacacaaataaacatgtgtaaaattattaatacataataatatatactatgtagagttataaattatgaaattgttaattttaaatttacttacctat

SEQ ID NO: 43592 - DNA, 4125 bp, Cannabis sativa
acccactggattcaaaataatagggcactttcttttctttcttcctctatagacgttgacgcttctgtaagaaacaaagattcggtttcattgatttccactttaagttttagggttttcgatcagaaaaaatggcaggtgaagcgggtttgctcaaatcgttgaagccaaggattcgtattcaatcggaggacatcaaatccgccgccttatggggcttcgctgctaccaccactgctctttgggtcgttcaggttttcgttttcttccctctatattttattaagtttttttccctttaattgttctggactgttttgctttgtgctcaattgatctgaatctgaatccgatttcgttcttgctatggttttttcgtttgatgcaaatgtattcatggatttaaatggttaaagttatagggaatttcattgtttcattttaatgatgaataggatgatagattctgaattatacaagcatgttggattcacaatctgagtgtattataaagttatgctggacaaaagagatgacttttctctgcttattatttgtaaaattatgaagcttttgatagaagtttaatagttttccatgttcccttttctttgccaagctttgtgaaactaattttcctgcacctcaaattgaaaaaacatagattattcaattccaatatatttaaaattgaattgaaagacatgtttatcgcaagttgtaatcagcaaaaattgtagtttgaaaaattgggaataaggaattaacttctgcaggaagagttagagtaggatttaagtttaagtgtttaactagggaaatttgccaaactcatgaaaatgttgacaaattaacaacatagaaattaggactataatggtcgttgtatgtttaaacgtaataaccgcgccgagtgttaattttacccaaggttttgctacttcgggtcttttaaatgaaatgaatcaatccgaaatattagtacccgctcttcaatcccattggttaatgatacacggaagtatgatggtattgagctatgcagctcttttatgcggatcattattatcactagctcttctaattcattgagttaagatattatatttttccatttgcattcttataacataattattgaaaaaagaaatcactaatagtctcttttaatctgcatattcttgattttttctttttctcaatcgtccaaagaattcaacctttgtatataagttgcatttaatctttttggtttctattaaattcttttgcttaatccttgacccttgcattctctttctttgcagccatttaattggttgaagaagaccttcctggagaagccggagcccgagaaataaactgggttttgattatttttcttgtttaactctctggttttatgtgcattgctgacaattgcatccataaagaaaaagttgaattgacgagacaattttgataagggattattttgaataatatggtgtagtttcaatttcttgcttcagtgctaatcttgcaattattttttgtaatcatttcgttccaataatctacaaggctacagacttttccggtttcccatttataaaatcctttttcttttttctccggagagagaatctcaggtttctgtatatctcatgtgtgtgtgtggattgaatgatatcctttcaggcttcatctctgtagtttaatcaatgagcagtagaacaccctgccaaggaccgtactttctaatgtatcaaaacctgcatcgatttgctggggttgagtctctttagttttttcactccttaatcttgattgtgacaaaattatccatgatgatttaattcatcttagctgagtgacacggtgatgcatattttttccatggaaatgggggtttggggttgggaattttagtttcatacctagtcttgaaccttggacacctggacctggctactgaccctgacctcaaactccggacatggtcccgatggtcctagacccagacctggatcgggacctcggtctttgggcctaaactcaaactcgaaccctggacccagacctgaaaccctggaccttgacctcaaacaatagaccctagactcgaaccctggacttggttccgaccccaaacttcggccccatacctggcttaagacctcggacctgaatgggggtcagagttagggtcgagtttatggtaaaaatataattttactcaagttattaatacaagtcaatagtgaacatagtattgctttacataatattaatgcaatacaatctaatacaaatactatacaatacaatataacacgagctcttaatgaacataatataaggtttggtataattgttaaactattttacacacatattaaaggtcattagttcaaatctcataaaaaacatacttattttcttagtattttaagttttttaattaaaaaaaacttctatcaataaaatttgtatttagtacctattattgaaacaaaaaatttcattgttactttctttactttaaactataattaatattataaaaaaatacaagtttgtatcaatttttaatatgttatatcatgtagaaaaaaagtacacctctctcaacttacatcttaagtcgttatttatttatttttctaatgtaatttcctataatattagtaattttttagcaaagtaatttatatatatacagattatgagttatattttggataataattagtattttttttttgaacaatgaacaaacatttcattgagaaatcataagagagcagtacatcatgaaaaaaagatggagaatccatccaaactaatttactatctaccttaagagcatgcacaactaattcatgaaaatacgaacatgaatttagggacgtctcgggaaaattagtaagtaaactagtaaaaatctctaataaagatcttaattaataattaggaatgcctcaggacaataattagtattttgaatgataaatgatatcaactattttaaattttatgaattttacatttatatatttaattttaatataaattttaaatttacataattggatttttgtgagaatttcttgctctatcatctatgaggaatatgcaatgatggaaactaaaattcataacgggatagggtaaattgctcaccaattcctcatttagtgtgccaaaaaaaaatattacattgagttgcaacattgccttgaaaatagaaataactataaaatttgatgactatttcttgttttttttccttttatgtacaaagatataacgtttctttctttgttcttcttcttttttttctttaaaaaaaaagaaagaaagaaagaaagatagaagtggttattctatgattttgggtttcaatgttctatatttgtaaaaaattcagtataagctaacatttttaatattaattatgttttgggttttactaatttttgtttatattctataaattttttctcataaaatttgaaaagataatctctataattttacaaattgtagatctaatatgagatattttcaaaaaaaaaaattacaaaaatacggttgtgtataattttttctttggtttataagttttaatttaaaaaaaaatatagacaatttataagtttttatttacaaaaaaaatatagacaattgatatttttatgttatgtttgtgttataatcttgttgttttgatgttgattttttgttttttttttgttattttcatgttatttttataagatattgtaaaattataattaaaaaaaataaaaaaaattgtaaaattaaaaaaaaaaaaaaaacttgaaaaatatgtatatatataaaagttattcaaccctaatatatttttctttaaataaatgcactaagataaaattagacctcacgattattacaaaagatattgttcggaatggaagaaacacacatacgaccataccgattgtgggtaaaagtccatttagccacattatgggtcataaagttacaagttttgctaacaaaagaaaaattacaactagcaaaataccgagagagtctattacaaaacttagcatagttctcaatgttggggtttgtgccctaaataaaacccattac

SEQ ID NO: 43593 - DNA, 2887 bp, Cannabis sativa
  modified_base (155)..(158): a, c, t, g, unknown or other
  modified_base (575)..(577): a, c, t, g, unknown or other
  modified_base (2849)..(2858): a, c, t, g, unknown or other
accttatattttctaaaattatacaaataggaccctgaagtgattttttgtcaaaataaaacttaataataatctaatatagagatgttgtgacaaaactggctatattttctgtatttgttcttgttacaaattgtcttaaagttggttatatnnnnaaataaaattgttaaaaattgagatcagggtcctatttttaccattttagaaaatatatggctctttttgtcatttaacaaaacagagggtccaattagtaactttcgcaaagtatagtgtccaaaataatatttatccatttacatataatcgggaacctattttaaactttacattcaaaataacatttacaaacatgtagcaccacgactacaaaatgaagtccaaatcgccccgagaccgaacactccgggtcgtaccgtcacagcatgtataatcatcccatgagctcgaaactcattgctattcatttttggcatttcctttacctacacatgaaagtaatatatgtgagtcaatagactcggtaagaaaagcacataacatacaatattttaccgacttgtatctaggcnnncatacacctatccacaaggcttattaaatgagtaggaacgttatttactaaggtgcgatcaatataccacatgcactgcgtacctctatatactagtgttagtagggtttgcaccatacatcgagtaccattaagtgttgtaccacatacactctgtactcaaccgtactagtgttggtaacactgtattatacttgttgaacatcatagactatagaaatacacttagtaccgctaccgtactagtgttggtagtatagaaatcacaaataacatgcatatattacacatacatagattcatatataaatatattttttgctagtcttatctcatttttgaattcaagtgtgttggacaacctaaacagaaaatcacgcgctagatggatgccctatgtcatattcacacaaatggatatacaacttgctaaaacttgatccgagaacctaaactcacaactacaagtttctctattggtaactaatctaacaataccctaattatcgaggaaacactacaactaagactctgaaatggttcaaaacaaaaaattagatttttctatgatcctgccaatgaaacggttaaacggttcatactagaaatcacaaacaagtttgaaactcaaccaattcatccccatattctctcaaaatttccaaattacctatactaacatccaacaatagtttccaagcaataaaagtaagaaaaatatacataaactaaaagtgtcattaatcaatcaagtttgagtttttcaaagtcaaacttgctcattctcttcttaaaccaaaataaccagcaacaagcaacctaatcctatccaaaataacctcaaaaatcacactagaacaaagttaaacctaaatagccactaattctcaaaaatgcatgctaagaccaaatttaaagcttaaacaacttgaaaattagaattctagggcttacctcaagctacctctgaagttccacttaaaatttaactagaattcttgctgaattttgcagatttagcagcaaacctctaggttcttccttggttcgaaagagagaatggagtttatagttattttatctttcctaatatattaaattaattaatcaatatcaacttaagctgaaaatgaagataaggaccagttgtcaattctacaatcatccacctaaaccaataaataaaactcccaaaatgcacctttcttccattttatgtaacctttaggcttaggggtaaaatagtccaaaactataaccccgcctaaaccaaacattcacaatatctcaaatatttgtcccactaagaattaggttctaaacttacccatgtgactctaatgaccatccatcgtattttccatcgtccccgagcaaaaaaaccataaaaaattacataatccatatttagcataaataatactcttaatgcttaataaaatctcagaaatgagaaattataactctaatgcctatttctaaaaatggggcccacaaaaaatataaaatcatatataattataaaatatcaataattaatggtaattacttttactaatcataatctaacatgcggtcattacaatttacctcctcatatttccccttcaaaatgatgacattaactgacgtaaaaattttcatcagtataattcacccattccctgtaaaagggatttgggtctgcattgacacttttaactttacattccttgaaaaatttaaagcattggtgaagtgttgaaggaatgaccccatattaatgaagataaggccgccctaacaacatattgtaggatgtgtttgaatcaattacatgaactaaggcttcaaaatttaatttgtctatttcaacttttagtgtgatacttcccttttatttttctctgacttagtaaaaaccttgaattgtcaatgataatggagacaattgacgtgggtgtgaactaacatctctcaaggtctttaaggggagtacattcgcagccgatccacaatctatcatgatacaactcacatgaacattagtgtaacgtcaccgctttaagcctctattgggccctcacacccacagaataatggttcttatacacgagtacgtcactctagctgttacatggactaatggctgaccctacaaacaacaggagtgtttccaatgtgttttgtccccacttgcacacttccttagaaaacttcccctcaattcacccatcctgaaattaccccaggtcaagcatgcttaacggtggagttctttcgtgatgggctnnnnnnnnnnaagatgcaccttattgatatagatagtac

SEQ ID NO: 43594 - DNA, 3765 bp, Cannabis sativa
cggatatccgcattttgcggattggattggatcggatcaaatactttatgaacagccctaataaaccttaactaattattactgtcttcatcaaatatataatataaaatttttgaaccagtatttaagtctaatggggttgtttaagcattgtcccaagcttgcagtaatggcggtgaagggtaaaatggatgttgtgaaagtaataacttaacaaattgttgagtttgttattgttgcaggagaagcggagattgttgttgctaaaactgaccaagaaaaggttgttgattttgtggactcaaaaattgacttaaaaaaggcttctgtggtgaacctccaaactgaccatacatcattgattgctgcgatatacccccaaattgaccaaacatctgttgttgtgattagggtccttcaaaaaaaaatagagtagaaaagttgaggagattggaagagcatccaaacatgtttagaatttgaggggattgagaggaacttacacgcacattgggagagaattgttgagcctgctaaaaaggttgttgttgtggccttggacaagaagtgctactactgtgatggtaaatattgctacagaaaactttcaaacggttggtcatacaattttagaaaataataatgttaaataaaagtatgatatatatatatatatatatattgcaagtgttaattaattatgtgaataattaagagttgtggcaagaagtgtgtaagaatgggagtggtgcctgactcaccgggattattggttaaaggattatttgacaaagaatagaccataatcaatcatttagatcgcagggcgagcccattgaaaatagttttaaccaaactctcccaccaatattgtcaaggcctttgcaaaatcttggaaataaagcggaggtgattaatgttaatccttctgttgtttggcagcaaatgtttattaagatgccatgtattatttttcatcacgaagaagagttgtgtcgagttcggtaaccagtttaggcagctttagtagagcaagtaatccctatggctctagttccagtggtagttaatcctggatcagttctgcaacagtatagagattttttttcttagaaaaggttagtaattacaatcttcgatgttcctagtggtactaatatcataagggcagagaagtggttgagcactgtcaccgaaatcttggaaaatgtgggagtagttaaaattgaccgggtgaactatattgcctttatgtttcaagaacttgcttgtatttggtgggatctagtaggtcagactcaagattttaaatattgcaactcagaaagaattctaaattttgttggagaaaagttttacaatatatgttgtctgtacactatgtatagaagattttgataaactagttcgagaaaatataaatatagctgagttcatattaatgtttgattggttatcaaaatttgcgggtaatatggtgccaatagacttcacacaaaatcagaagtatatttcaagggtggatgccacaatcagcagggacttgacaattaccaccgattatgacactttgtataagaaagtggtagagagaatacttatcactgcggaggcagaataacggattataataaaatgtactgccagggatgtcaatacgacatcaatccccagtgtcggtggcaacttcactaaggggaccgatggtggcacttcagatcataagagaaaggttgagacttccaaatcatcacgaatgaacaagagattatgtgggaatagaggcaaccgtcaaggttgtggtagtatattcaaatcataccctaaatgtcctaagtgtaaggaacaccattagggagaatgttaggtcaggacatatttttaatgtggtgtggttaaccactttattagaaatttccctcaagctaagaaggaggaatcaaagaagagtaacaaccagaattcaggatgcctgtttattgtaactcaagaagatgctaatgctagctcatctattgtgacatgtcagttatcgattaatagtttcccttatacagtgatatttgattccggagctgcaccctcttatatgtcaagtagggtgacataaagttttcgtaaacctctcaatgtttatgttttggggtttagaacactgttaccatctagagagttggtgatctacactagatggattaggtccttatcgtgttgactttacggttgagggataactgccaacctgattgggttacagttgtgtgacttcaatataattttgggaatgtacttcttgtccaagtattgagcaacgactgattataagctattgaccttgaatttgagtcgtatttatgactgatattaccacgtgtacacaataagaactagaaaataaagagaatatttttatagaggttcggctgttaggctatttttagcctaagtttcgggtcaaattaataagcattttctcagttattgttgtcttttggaacagttttacgcttgattttccttgtttcaggttcttgatgcattgtagttcaatttctgtcgattggcgaaaagacgggacaatttggtgaaaaatctgctgaagctgctagattttctccagtagttgcgaccaacataagccatagtcgcgacccttttctttggtcccgactatggtcgcaactaggctgaattggcaaaaagtgtgtttttccattttgcctatggtcacgactagcattttatgtagtcgcgaccaggtacgaaatacaggatttttgacctaatttcgatatttttctaatcagaggcacaaccctaattcctatataaggggctcgactcatatgacaaaaggcatcagaaatcagccccgaaaagtgaatgaaggaggagaggaagctatcgtgacgatccggagcgaaatcaccaactagttttctttcttaactcttgaatttctttgtgtttatttttgttttagatttaatcatggatgttaattttgttttcatgaactaaattctcaattaggagagacgatgaatgttgattaaagtttttgcctagttaatgtcaattgtcattccttttatcttgatttacgaaattatctatatttgtgtttaattctatgtttaagtttgatcaccttttacatgttctatgatctcaattcaaaatctagaaagtgagatttttagtggttgtgattgactccagcaaacccgaaacatttgggcctgaggtagtcagagttgttaaggattttcttgatgcatttcctgaggagttgctgggattacccccacaacgagaaattgactttttgattgatttagcacctggaactgaacctgtttctaaagctccatatagaatggctccagcagaactcaaggagctaaagttacaagttcaggggatgcttgatattgggtttacccggcccagtgtattgccctggggagctccggttctgtttgtgaaaaagaaagatggttcccttagaatttgtatagactatcgggaactaaacaagttgacgattaagaataagtattcgttacccataattgacgatttattcgatcagcttcaaggaaaaacagtattttcaaagattgacctgcgatccagctataatcaactcagaatttgggaaaaagatataccaaagactgcgtttcgaatcaaatatgggcactatgagtttctagtaatgtcattcggattgactaatgctcttgcggcctttatggatct

SEQ ID NO: 43595 - DNA, 2110 bp, Cannabis sativa
tggaaagaataaggaaaagagagagatttagtccatctaataaaattattaataccattttgttcataattattgacactgatctctaccatactatataaacaattccccctccccttctttctaaaccatggtgctcaagcatatatcaaatacaaatcatcttggtaaatgttgcataactgaatgaattctaaaaaccagcaaacaaatgacattactagaatatcagagggggaatattgtaaaaattcagccttgaagcaaataggagtgtgactcacgatcaggtcctccaagttgtgccacagcatcaacaaatcgttcatgaagctcatgcgtccaacgtaacctttgtttggaggcaagactaggattgttaagactgttgcctccattgactggatccatagtgttcacgccactgtccaaatgccgaccatgtacacaaatgtccgtactaggggcagcctcctgttgatacaaaccagaaagctacaaattattcaaaagtagaatgaaaaaacaaaacaaaattaaaaatcaataccaaaatagtaatcttagaaatatacagtttacccatcataaatgcatatggatgaacacttaatactgcatagttggccttgccaagaacagacaaaaaagttccctaatattagacaaaactgaacatcgagaaaacaggaatataactctaaaaatgtcctcaatagagtacaagcaaagaaagatgaatcatcaagaaaaattgttgtttctcatatacacttccagaggtaaaaaccgagacttctctgtccctcttatgaataaatctggatgcaacatgcaagagtggaagcctggggtacatatatttgtaacacttttaagcttgagtagttgcagtaaaacggtagagtgtcatacaatttacggataaggaaaagaaaatacaaaatcttattgacccaccattataaattataactatcaactaatagtatcctcaaaagtctatcctagaagactcaattattaatgaatctagaaagagatgtagtcataacctgcccagttatattccaaattttcaagaaaatcatcaaatacaaaaccccaaactcttaataacttataaataaagttccctagcttgaccattaaaagttcggccactcagttcctcataaaattaaaatgataattggacaaaaaacttgtcagtttcttttcttggaccttacagccaatgaaaatagatataaaagaaaaccttcccatttccaattacccccatctaccccttaaataacaattgataaaatccttttgcaccaaaaattaacatctgaatcaaaaagtaaacagaagcagctaattacatcacagtgatcaagtaattagggcaaaacaagccaataaacaacaccaacaactgggtggagaaagagaaactagaataacggaaaaagacaacgtaattcaggtcaacaacacagatacagaaacaaatttaaataggcagcagctaataaaaaaaacccaaattgaagtggaaagttgagatttttggaagcccagaaagggattaaaggaaagggcaaagaaaaattacgtacacagatctggaagcgaactgagatcgtttctgtccaggctccagccctcctatttgggacaatgcttgcttgggttttttcgtgtgtgattatgaacgagtatgtatgtgtgtggttgttatgtatgtatgtatgtatgtatatgtgtatctcgattctttctgtgtcgctcgctcgctcgcttcgtgcagtttaaaccgaataatagtaataattattttttttgtaaataattattttttttttgtaaaaaaaaataaagaaaaaaagggggagctgtttgggtgtattgtctttttggaaatgagttatcgcagaaattgactcctcttcttcgtctgtgcgcgtgtgtcacactctctctaataaggttgtgtttggaaagtaactagtaattaataattacacaacataatcgttacactatattttacactttttcaaaggctccctaaaaaaattaaaaaacaaataaaaagctaaatattaggggtgttcgcggt

SEQ ID NO: 43596 - DNA, 2850 bp, Cannabis sativa
  modified_base (41)..(54): a, c, t, g, unknown or other
  modified_base (118)..(118): a, c, t, g, unknown or other
ttgttgctagttatgtgaaaaaaatattttttttcataaannnnnnnnnnnnnnatattaaaaagtaatcaatccaaagtagccgattcaatccgcacttttgcgaattggattggantggatttgagctattgtgcggattgtattggatctaaaaaatgaaatcgccgcacttagttcgaatcggatgcactatgagcaaaatagtacggattagatttaatgaacactcctaagtagaataaaaatataaacataaaaatttacataaaatagattaaattataaacacataaatagtactcttactaaaattattgtttttgccaacattagcaaagacaaaaacttcttcgccaacacattttcgttttttttttccactaaatgtttgtttgaggggtgatgatttttttgaaattgcttcactactagttttttttttaaaaaacttttgatgttatttgatcgatgaaccttttcaatcttattaaacaaatagaagtgaaagagaaaacaaagactaaaatagagatcagaattagttatatattgacatatttctatttttttggtccctcatctcaaacatcacatcttattctaaaagaaaaatacatcttcatcaatatataatgcaatgataataaagaataatactcaaagtataaagtattataagaggtgacatgttattattggtataatttaatatttaatctcacatattttaatttaataagtaatataaaaaactactaatcatttataacgcgtcgcatcagtataatattagatactttaatgtaactaatatcaatgctcttggatagcacaaatcattcatagaagtaatataaacaaattcatatgaatgagtattgtagcacaaaccatacacacatttttttttctaataaaattaatcacacataatatttatttaatgaatattgttttgtcatttttttataataattattaaataaattaaaatatacgaaactcaatattaaattatactgatgatgtctctaagtggtgctaaacatcatttatcaaataataatatgaaaaataagtaggtaaatatattattagtaagtattaaaaatgtttgaggattagggaatataggaaaattaaccataaaaacataaaagagttaagatgatcaaaaaatagaataggggcttatatgcatagagagagatgaatgatcataattaattattatcatatatatgtgagaggtttagcttaaggatcgcataagaataaggaatagagattattgttaatacataaaccacacaaattaagtattgttgtcaccctaagtttaggcatatatctatataattcattcatatatatacacctcaactactcctactatatatgcaaccccacttttgcattgatcttctccaattgagcgccgggggctttagttgcccacatcaacccctctacacaatatccaaatatatctatatatcaataatcataattgattaatcataaaaatgggtaaggccaaagtgacggtggcaggaatctccatcattcttgtggtgggggttgtggtagctcttatagccggcgttacccacaaaggtggcggcgcgagcggtgacggaaatggtgatgatgacctttctttttcgtctaaagctgtggctgcaatttgcaggccgacagactataagaaattgtgtgttgagagccttggcgaggctgcaaataatgagacagcctcgccgaaggatctcttcaaagcggttttaaattctaccattcaacgagttttagtcgctgtagataagtcatcagtgttgtcccaaaacaccacctcggccccacataaaatgtcccttgaggattgcaaggacttgttggatttcgcggtggatgaactccaagcctcgttttcaacggtgggcgattctgatttgcacaccgttaaggatagagaagccgagctcatgaattggttgagcgcggtcatctcgtaccaacaaacttgtttggatggaattcaggaccctgagctcaagtctgacatgacaaacaatatgttggatgcgtcccagatgacaagtaacgctttggctattgtttccggcatttctagcatcttaggagcatttgatatcaatttcagtaatctcaccagtcattttaatccaacttcgaccacgtctcgaagacttatggaagcgcctgtggacgacaaagatagctcgtatccgcagtggctttcggctgcagataggaagctgttggctactcgtggaggtggtaatttgaggccaaatgttgtggtagctaaggatgggagtggacagtataagactattgctggcgctcttgcttcctatcccaagaaccataggggtcggtatgtgatttatgtgaaggctgggatctatgatgagtacattactgttgccaaggaccaagtcaatgtgtttatgtatggagatggacctagaaagaccatcgtcaccggaagaaagagctttcgagatggggtgtccaccttcaagactgcctcattctgtaagtcaattaattttgagataaaactccatctttcttataacatagtcaaaactgctaatttaatatataaaaagataactaaccactcgtaaagtcttacttctaatttcactacacaaaaagctattgttaatgatagtattttagttataacataaattttttattattaaatatagtttttagtcacaatagaaagttatttgtgactaaaatatagtatttggatacaagttgtcattaatttagttttagtcacagtattgtgactaaaaatacatt

SEQ ID NO: 43597 - DNA, 2974 bp, Cannabis sativa
  modified_base (2936)..(2942): a, c, t, g, unknown or other
gttgcaagtgaccctaacggctttgctggatgtgagtcactctaaggaaggtactacaggaggagtgggggtgctgattcagtgccaggacccgccaaattttgaagcgacttgggaacaatttgagagtgtccacacaaaatttccttcttctaaccttgacgaccaggttaaggattttttttttccccgaggggaagggggaattgttaaacctcctatcaggtttacttatgctttagaagggccaagagcaataagggaaccaatatgtaaagggcaaagagatgtgtgtgagggccttttcgtaattgttgagtggttggaaaggcatatagctagttttagcgggaaaggttatgtaagaattgatatttttctctctacatcaaggtctgaaaggaccactgtcttctctatctgttattgctttcatctttgagaaatacaatcaagaaccatggctgttacggtttagttttctgctggtgtgtttctattcttttctagttattgttctattgtttttggtgcttttttggtgtggttctatctcaggtggtggctaaatcatattaattaactttatttgaggttctaattttcatatctcaaatccaaatgaaattgagtgtccaagtactgcaaaattcctaacagtttcaacaactgccttcgaagccaatctcatcttacgaagaagagctgactaaattgtttatcaacaacttttccgttagcgtgaaaatcatgaaagaacccaaagatctttcatagtaaaaaaggccagaacagagcccttaaacaacttttctttagaaagtattagatgcatcaaaatagaagttgaagcaaagccattttttatttaaaaagagtgaattgactgactgaaaagccataaagtctcgacaaaggctattcagggttaaaacaatcaggcttgcacagtatatgctgatcagaatatgttagtgcttaataaattttttaagtcaataatcgacttacagaaattggtgcaatctctagctaacttaaactgccttttgttaatctcattgaagaataaagtttcctcattcaaaaacctgaataacaacccagacagcacgacagaacggctgtgattattaagcaaaagcaactaatttcccactacctaaattgctcatccaaaaagggagaaaaatatccaaccaaaaaaaagggtgaatcagactcaatgattcttatttttctttctatctgtgagttttgttccaaatgtttaatcacaccaaatagagctcaatgataagcataaacgttctattcaaactatgccactaatatgaatgtgtaaacaaaaacaacacaagaatatatgaactgcaacaagaaccctactttgtatcataaataatgaaaacaaggatcaagatctgttactttacctcatcccaaatctccaagcatgaaatttttgtctacaaaaatatatatttgaagtgtttatatcagcagttacagtcaaaaatgcacatctcataatatataattaaaaatattgatgagtataatactaaatatgaattatgaagcataatacctccaaaaacccaagatccatcagctgctgatcatccatgtttaacttcaaatacatataatacaccactattatacatggctttgatctatgctacagatccaaattcagctgaattattatcactttttaaccttcataataatagcataataatgagaaaaatgacccaaaaataaacatcttcgaagctcaaatctcaaaggctcaacaatcaaatacgaaaaaggaaattacggaagaaaaaggggaaaaaattaaagctttaattacctcagactggaaacttgaaaacgaccaagtcaacaatcaagtctatattcttttttaggcgaatccttcatttacaaccatcaatagtatcagatcgtataacatgaggataattaccaaagagatcttcatcgttatcctcagtttcaactcactctccatctctacagatccaattcgatctacccaaacaaaaacccaaaatctgatctttccagatacagattaggattttcaacatcaaatcaagcgtttcagcatacggatctgaaaacaaacaccgttctccgattccgagatcgaccggaatttcctcttctccaaaccctaatcgcagccagccgcatctgaattttttcattttttggacacatcgaagccctaagcccaaaaaatgggctccagaggtatcaggccgaaggcccaaaacttttgggtccgagttttggatcatgggccggtgagagaacaggagcaataataacggtagatgttacacgtggcgcatttttagtggatgcgtttgaatcgttaagaaaagagtgagacagagtaagaaccgttggggtgggtgggacacgtgatagtgaactaaagctccctctcattcgctttgattttaattaattaaaaaatataaatatataaaattaattttgcattattagtccttggactattaatatcttatgattttatccttaaaacgttttaatacttgcaattaaattcttagaattttaatttattaacaattaagttttttcttttttaaaaaataaaaataaaaacaattaagtctcttatgttaaaaatcaaaacattattaatagacagcagtagtactcagcactatcgtaaagtgtcaatttatgaatatttagctgtttttatcaatagtactaaacagcactaatgttgtttcttcaaaaattatttaaacataatacattatcatctcaattagggtcgggtattggttaagacggattaagtggcccacatgacctagaggactctaataaaagtttttttaaaaaacaatacatataggtggcgtttggtaacactnnnnnnntcagttttctgtttttaaaagtagaaaagtga

SEQ ID NO: 43598 - DNA, 2687 bp, Cannabis sativa
ttcaaattgttgaaaggaagttatttccttccggagcttggcattcttagtgggaggaaaatacttcatcaaaaaccgctccgctaattcttgccaagttgtgactgacgcaaaaaggcaaggagttcacccaagctcgggcttgatctctcaaagaataggggaacaactttaatctcagggcatcctccgtaaatccgggcaatttgaaagaatcactcacctccataaatagatgccgagattggttcaagttttgtgctcagcctgatgctgcaattgttcccatggttatggagttttatgaaaatgttatcaaccatgttaaccatgaagtgaaaatctgaggtagaaaggtatctttatcatgtcaggaaatcaataagctctatggccttaaagacatcgaggatgatgagtatggcaaaatagttcaagaagctgattatgatctaatcattaaaagactttgcaaattgggctctcaatgggtttgaattgaagatggagaatgaaggcactttcattagaatgagatggagtatgatggtcgtgtttggctctggtttattggagctaagttacttgcaatggaacactttttgactgttgacaccaccatggccaaactcctatatgccatccttcagaagaagtccattgatgtgagcagtgtcatccagcactcgattatggattatattcaaaatatgaggaagggattttctcatccgaatctaattacaacgttgtgtgctaaagttggggtgcaatactctatttcagatcaaagtctgcaacctcagcacatttttgacagaaacgatgtggcccgatttatggatcctaaaacaaaaaagatattagcatccgaatctagggaagagccactagaggaaaaggagcccagccaaatgactatgccacagtgccttgagaaaatagagaataagttggcctctattactgaatacatgaggcaacactgataacagatgcaagactgggcaatgtaccagtattcatgtggttggatgaatgccatgaacttcggagtcaacatgtctacttatctccaccacaatggatgcagcagtacaacccgtatgcagctcaggagtctaatgaggatgcagcacatgacatgggagatgagcatggagatgacatggagtgttgaaagcgtagttcagaaagtttttctttactttttttatttattttatttcaataagttccattagggacaatgtcatgtttaagtgtggaggggggtgtacctcccagtttactttttgtttttttttttatgttgttgtttttatgtggcatttatctttatgtcttttccttatgtttttatgttttggtagtttctttttatgactatttatgtgatgaatttgagcaatgactttagttaacagtaatgaatcaatgatgagacttttaaatgacctcaagataatgctaggaagatgataaattcctcatcaattgtgtgcttaattgtggttaattattactcaagcttgttttatttttcacaataattgaattatcaaaatttgtaaatatttgaaaacacaagctcatgtgtaattgttcatttctcatctaaacaactctagaacttctttgataatcatttgaggcaaaatcgattaattacacataattttgagatatgatgttaacgcagatcttcattaacgataatgagccttttttcgtgataggtttagcacaaaaattatagaaattcaagaaagaatcacaaaagcagaaataacaccaggtttttttatgtggctttgcagttaactctgcataatccacaagtcaatcttatccagacttttctaatacagaacaagggttctttacaaacagtgtattcttttttctctcaaggattttctgtccctttttttgtataatctgccgctatttatagtaacattggttggcagttaattacattcaaatttgaatcccacaataatattttcctgaaattatgggcctttattacgctccacataaattactccaattattatttaaaaatcacacagctgtgatataaatcactttaaagggtcaatgctgaggtggagtaagacacgctactaagtgtatctcgctgtgtcatctcgctcggtacatgattaacttggtttatccatcagtctttcaacaatggcatgagcaccagtgtactgagcaaattttagaactgctctttgacaataaggacttgcagactggacaatcatgtcttgggggttctcaatagcaacaataaccctggcagcgagctggagtttaccaagagtatgccttcctatagcgagatgggtgtcttgctatcattatccatgtcattcaagatattacacttagttagtataatgtatattatacgctgtgttctgacaaccaattcgccttgtcgacgcctctctacacataacgaggtaagtgcctcgctatgtattatagatgtcattcttgcgattatgtcctgtgacgcgaaatagtttctcatcaatatgtgaatcatagtttgtaaatttttgtctcgcttaagactatacagtcagcgagttatagatatgctctattaactctgtatttaatgagttattccatttgatgatttttaatataattgtcattatatt

SEQ ID NO: 43599 - DNA, 4657 bp, Cannabis sativa
caatgctaacatggctactcttggatctggtggtggtaattcgaacaacacttctggttttaatggtggtccagctacacagcctcgaactcaaactcatcaagaacctgtttactttaatcacagcatttcgattaggttgaatgatcataattttctcttgtggaagcaacaggttctggcagcaatcaaaggaaatcgccttctaaagttcatcaaagatcctcctccatctgaattcttaactccagaggatcgggtgcaaaacagagtaaatcaagcttacatcgactgggagatccaagatcaactccttgtctcatggttgctgtcttcgatgaccgagagcctcttgactcgaatggtgggatgcgattcagctcagcagatttggtccactctggagaagcatttcacattacaagtctcctcgaaaatccttgagtttcgtactaaattgcagaatttgaagaaaggaactctaagtctcaatgactatctcttgaaagttaaacaaacagttgatctccttgcatctgtgggagaagttttgagtgatcgtgaccatgtggctgcgatcttcaaaggtcttccaagtgaatacgatacgtttgtcatttctacaaacaccagaactgaacaatatactgtcggagaaatcgaggcattgcttcttgcttcggaatccagaattgagaaatctgggaaagaaattgattttagtgcaaatctggtgtctggtgatcaagatctacaaccagatgctttaatggaagctaatcttgcttggagaaggtttagacagcagtacgggagaggaaatcctcaatttcacaacaattcaagtcaattcaatcaacctgtgttcaggagttttaatcgtggagataactctggagtcaaagctaatttccctcccaaccaagcaaacagacctggtgcaaatctgagtactaaggtgcaatgtcaattgtgcctgcgctttggacacacggcacacgactgtttttacagatttgataaatctttctcagcaacacaaccaggatcaagtgctcagagtaatggattgcagaaaccacaagcaaatttgaccaccaataacagctccaatgactccaactggtatccagattcgggagcaacaaaccattgcactcctcaagctcaaaacttggctgtttgctatgactatgaaggacaagatcaaatgtatgtgggagatggtacaggtttgtctataaagcatattggtcattctttctttactccacagcatgcatctcattctcttgttcttaataacttgcttcatgtccctgaaattacaaaaaatctcattagtgtttctaagtttgctaaagacaataatgtgttttttgaatttcatgatgatttttgctatgttaaggacaaagtgagcaatactatcttgctgatgggaatccacaagaatggcctatatacttttgataagactcatcttggacctgtacactcagccccctcctccaaaatcaatttcaaatcattgcagcagccaagtctttctcacaccagcagcccctctgtcaaaaacaacaatctatttcagcccgattctaagtgtacttttgttgccacactcaatgactctactgttacagtgtctagttgttataggtgtaatacaaatgtacaaaaccattttactttgtggcataataggcttggtcatccctctgaaaaagtggtccaaactgtactcaaatcttgtaacatttccaatgttaataaagattctgaattttcaatttgctcagcttgttgtcttggtaaaattcataaattcccttttcctagagcatctcaaactatcatttctgaaccacttcagcttgtggtctcagatctttggggaccatcatttgttccatcctttaatggctacaagtattatattcactttgtagatgcttactctaggtttacatggctttatcttcttaaaaataagtcagatgccattaaaactttccaacacttcaaagctgaagctgagttacaacttggcaaatccattaaaactctccaaactgattggggaggtgagtacaggtcatttacttcctttcttgctgactgtggtatacatcatagacatccatgtcctacaactcatcaacaaaatggtcttgctgaaagaaagcataggcacattgttgaaaatggccttgctcttcttgcacaagcctctttacctctcaaattttgggatgaagcctttaggacagctgtctatttacataatagacttcccacacccttgttgcaccaatgttctcccttggaaactttgtttcacacaaaacctgattacactacttttagaacctttggatgcaaatgttatcccaatattagaccctacaacaaacacaagatagagttcaggtctgccccgtgcacctttttgggttatagtttgaatcacaaaggctataaatgtcttgactctaagggaaggttatacatctctcgagatgtcatttttgatgaattttctttcccttatgagcaagttcaaaaccagcaagcacctacagatgtgaataccattccctcatctgtgtcagcattaataccagtgtgtactcattcaaaaactccctattctgccactgatctctttgaccaacctgttactgtcccaattcccacaccagcacctaacattgcatctccttctgctgaaccattagaccaaattgcatctgcatctgcattttctaatcctgctgctgctgatgagttaaatattgtccattctactctcaacaatgaccaacttgctttatatgacaatgcttctacttctcatgattctgttgggcaaattaatactgatattacttgtccagatcagtttccattgcttgatacaggtggctcttcaggaacttcaccaggatctgcaacatctccacgacttcagctcacacccgattccaggacaccacctgcttgctcatctcctgcagccttacccttaattgcaggctgtgttaatgctcctggaaaacacaatctgcacagaatgcaaaccaggtcaaagatgggtatttttaaacccaaggtgttcttagcttctcgagaaccgacttcttataaagaagctctcaaacaagaacaatggaacagtgcaatgagtgatgagattcttgccttagccagaaacaaaacttggattcttgttcgacttcctgaaggacgacaagcaataggctgtaaatgggtctataaaatcaaggaaaatcctgatgggagtgtgctgaagaacaaggctaggctggttgctaaaggttttcaccaacaagcaggctttgatttcacagagacttttagtcctgtggttaaacctgtcactattcgggtggttttgactctagccttgtctaatggttggcaaatcagacaactagatgtcaacaatgcgtttcttaatggtgaattacaagaggaggtttacatgactcagccacctggttttgaaatccctggccaagaacatcttgtatgcaaactcaataaggcaatctatggtcttaagcaagctcctagagcttggtttgacaagttacaacagagtttgacatcatttggatttatttcctcaaagtctgatcactccttgtttattaatcactcctctacatcaacaacacttgttcttgtgtatgttgatgatattttaataacaggaagtgaccaaactgttgttgatactcttgttgctgatctcaacaaacaattctctctcaaggatcttggctgccttcgatattttcttggtcttgaagttgagtacactgattcgggtattcatctttgtcaaaagaaatatgctcaggatttacttgttcgagctcaaatgtttggttccaagtcttcaccaactccaatgacaagtggccttcgtttgtctgctcatgaaggggaacctcttgctgatgttcaacaatatagatccattgttggtgcgttgcaatatctcaccattacacgaccggagttatcctttagtgtcaacaaagtgtgccaatttatgcaacgtcctttgtcgactcattggcaagctgtcaagcgcatattgaggtacatcagtggcacaatgcactttggtctcaccttttccaagcctgaatctcatgatctagttgcgttttgtgatgccgattgggcttcggatcctgatgacaggaaatccacttcgggttatgctatcttttttggttcgaatctcattgcttggaaaagcaaaaagcaacaaaccatttcacgttctagtactgaagcagaatataggagtgttgcaaatgtgactgctgaattgacctggttacattacttgttctcggagcttcacattcatatgtctcaacctcctacaatatggtgtgacaacctcagtaccatcatgctcacacagaatccagttttacatgctcggactaagcacatagaattggatctctactttgtgagagagaaggttttgaacaagatggttcaaatcaaacatgtagcaacctttgatcagattgccgatggtctcactaaagctatttctagtcaaaggttctcttctttcagggacaaactcagaattactgatcat

SEQ ID NO: 43600 - DNA, 3100 bp, Cannabis sativa
aaaaaataagaaaaattgagaaaaaagaaaaatagaaagaatactcatataatccgccacctcacatgccctaacaacaacattatataagtatatagattatggagctttttaacgtagtgtttgcggttagtatgtccatatttacatatcatgtcatcaaattttttagtcgtattgtgtttgaatttatatttttttcggtatcaattcatgtttatatctttttattgtggtatcgtattaaaaagttcagctcgatttacaaccttacaattacaaataactctcaaattattataattattattgagaaagtgcactaaataatagtcatctagtttaatataataaaataaaaaccgaatttggacgcattgagttttaattaattagtgagaataattaaagggaaacctagtaattaattaatgctacaatatgaatgatataaaagtattcatgatttgtttttttttttttttaatggtaaatagattttttttttattaatatataagtaaactagatatcgagcaaaattactagaaatagacttactaagtcgtttacattaaataggacacaatccttatctatttttagttttttttttttgaataaaactaaactttattaaatagatgaatctgaatacttactcgattggaatagaagactaattcatatgatcaggtaagaattgagagtctcttgcaacaaagtgagcaatcgttttacaaatcttaatacaacatgatttaccgtgctaaaatggtgatttcgatatacttcttattctgtttcggcatctagaattacctgtaaatttttagaaaattttaaataatttacaacgctaaaaataaagttcaaatattttattgcatagttttcttatatgcatgataagaaattatttgaacttttatttttgttgcaaaatttaacagctatacaagtgcatacgctcgtaatttgtaataaatcttggtaagaccaaatatagtctcacaataattgattatcatttaccagttaatatttaatctctagtttctatttttattttataactcgaatctctggtctctatttttttttaaactcgaatctctagtctctatttggttcaataataattaagaaatttatagcaaaagaaataacaataaacagtaaaaattcaagaaataaataatgagaaattaattaggataattataattatatactttttttttactatcaatgcaatttacctaatttttcttcttcttattcaattaacaagctgataaaaatagttcataatcgtattaagaattacaaactcaatctatgtgaaaatttcttatatttctatgataaagattaatcatatcacaaacaaagcaataaacacatgactcataagatcgtacaatcagcctaaatgctttcgttctaaattgaaatttcatccataataatcactaacattttataatcccacttttaagattttgattccaaatcataaacaacaattataaattaccaataaataattgttaaattaacgtaaattttgtggaattgaatagaagatgaagaaattaaaaaaatacattaattcataatagagattcaaatgagtcacataataaccctaataatactaaaattagctcatagaattcattctaaaatatacgaaaattcaattacaaacacaaaagattaaggatagatgataaagaacacaagttgaagtcttcaatggtgattttctccttccagccgcgactctcctagtccccaagacttacgaaaattgaatggaatgaattaacctagccctctatcgtcattttttcgaaattgaaaagttgtcttttttagtcaatagtcgcaactctttgtagagagtcgcgacttctctagagagtcacgactattggattttgcaattctaaaatcctgttatgacgaatgatgatatttttgctatttactctctcgatattacttggaattgaacaatttaagatgttttggaaagctcaaaaagaaatctagaacctttattcacaacctttttcctaaaagtgaatgggtcatagttaaaagttggcttgaagcttcagaattaacttttaatcataaacaaagtgtgttgagtatccaaaacctaacattttttacccatttaaaatccatgccaaatctataaaattaatcttatttaacatattttctctcatttcaacccctatgattgatcataaaaacttgaaacaagaacaaaacaatcataaactcgaatattaaaacataaaatttactaaaaaatatatactaaaaccgattctagaacaagactcaacaattttttttttttttttgagcaatagactcaccaattttaatactataaattattcaaaaaatttcttaagattatatattatcttcaaattcaatgctatatcagtaatttgaatttacaaaaatgaacgaaatgcatttaaagaaacacatttgcaattttataatttatgagaattattttccaattccaaaataaaaataaaataacaaaaaaaaaaaaagagagaaagagacaaaactaaagaggataactattattttgaatatatatatataaatataaatatatatatccactaatattaatcttaagggaccaattaatattattatttgtgttggaaattattttgggtgtataggtacataatactgtcattaattctcaatattctacttgcaccaagtcatccctttatcttatattctagaataatatatatgtcatgtatatacatatattcatttcttcttattatgaataattataattttttttcccaaaatataatgtttttttttttttttttttgaggaagtacaagttagaagatcttatttatttacttttcattttcaatcaataattgagcatctactcaaatcaatttatttatgtgggaacataattatatacattttattataaatgatgctgcaattaatgcaatattatatatagatatgtatgattaatatcacacgtagtggtacgtactgtgctcta

SEQ ID NO: 43601 - DNA, 2053 bp, Cannabis sativa
  modified_base (1456)..(1459): a, c, t, g, unknown or other
tttatatttttttaataatgggatgtatttataattttatggggtgcaaatataactccccttattttttgtttttttagtaatatggaagcaaatatctaaaataaacaaaaatgtgttgtttcggtggcgcggcctagacctagatttcccactagttaagtaaccgagaaagataactaataacagtttagtactcgcttactaacaaagttgaattgaaatggataaaagaacgaatggagaatcgatgtcatagcccatacgccatacccacgcctactgcttctactcaatggccatacaggccctctcccatcatctctctcgtctctccttagcgccatttctctttccctccactcggatcgcgctcaaccctccttcttttcatcacgtcgttttctttcgccggaatcttcatcaggttcgccctttcttccgctccaattgctctcggtgtttcaccgttactgcttccaactctcgaggtatgagtagtttctgttcttgctttgttatctctgttatgaattttttcgaataggttgtgtgcgttgtctatttaggctctatatttatttgcgaactgtattgtttagagaaacgaacatcaacttacactctttgagtgactattatatcatgttcggcattttattaggctatctcaagtttttgaattatgcacttttttgtattagaaaagttaaaactgtttaatgaaatgaatgggagttttttagattttcaagttgggactcttaggttctatatttaagattaaatctaagaatcctttcatgtatagttttttttgttaaacacagttgaaatttatttgcgttgacattgccgcatgaagtaacatatctccaaaaccatgtttgttttatcttctgtatcttatgaaaggttgtctttgataaacattccatttaaaagaaacaacaaaaatttacgtgccaacatatatttttgtgatgatcagccaaaaggagtgtggtttagtgctagcgtatatgggatggaaattgtgcaactcttttttaagattcctgctttctcgaatccttccgggtttatgagttctataaattcatagactatatacatattggtgtcttacaatggtatgtttttttttctaaaaaaaaaaatgtattgtagacttcagtgacagtacgcatgatgaaaaatacgatgttattgtggttggaggaggacatgctggttgcgaagctgcccttgcatctgctcgtttgggtgcaaaaactcttcttctcacattaaacattgatcgaattgcatggcaggttagtaatctttttctaatgtcttctaaggatctaattctatttaatctctttctaatgtcttttaactcgcatactaatattctaggaaagagggaaatattagatgcaacagttaacttctctctctctctctctcnnnntctctctctctctctctcatgtctatttaggcaaaactcatttgaactagttttggccctatatattatccccacaatttaattatcaccttactgacccaagaggggtagctcaaatggtcaggcatgtgagttgctctcacaaggtttgaggtttgagtccttcctaggtatatagaaattgctacagtttcctggtccccaaatattgtagggttaggtggggatgctagtttaaaaaaaaaaaaaatatatcatcttactaagaacatttcaatacagccttgcaatccagcagtaggtggacctgctaaatcgcagcttgtgcatgaagtggatgcccttggtggtgagattgggaagattgctgacaggtaaaacaataaagaccccctgtggttattcctaaattgcccaagcctcgaggcatgtaatgttgttgtttcttgttattctttttcttttagtttttgggtctaagaaaaagaatagattagtagattgtgctcgtatgtggaattgtgaggttacttcagctcccattgtgggttttggatttgaaagcatcatccttacctttcagcaatgtgtcga

SEQ ID NO: 43602 - DNA, 3897 bp, Cannabis sativa
ggtttgggagtgtaggaggtatttataatgatgtgttgtgaagcagaggtgtaagaaatcgtgttgtgtacggcattggacttttatttttgactacttacgctaacagactatatgtatcagtgctgattctcttctcttttttctttctttttttttttctgtttaatgtagtaaaacatgttagatcaagagattgattgatacaactttcttaaaaaaaaaaaaaacgaaagattgatgcagctcaaaatatttggtttttattagaatgtgtatgttgctgagaactagattctcaccaatatgaagatgtatctcaaagattttggttttgataaatgctggtccgttactataataattttagatattatattagaaaattctgccgcctataccaaatatatgcacccatgtatttatatctgttttgatatttatgggaaattttttaatttattttatatataatcttgtatattttataaaattttaaaaaaaaattaacaagtcaaaaataaggtgtaatcaatctattacacatgtgaaataagatttctatattttatgtttgtttcttatttcactaaattttacattattaaataactacaatgtgcatggttcatcggtacactgcaaaagttcactattattttttgtttataattttttatataaatttatatgatatgagataggataaatattattttagaatttatattttattattataaaagtgacataatggtataatatttttggactattttacctctatttaaaacaatatttttaaatttgtctttttgcttttttattctttccctatttttatattgactattttctttaaagataaaattatctacttttgttgtttctctttaatcattattggtgaagaaaaattacaaatttattctattatctactataacataacattatgttatgttttatgattactctatgttgattaagttttatattatttttaatggcaaaatagtgttataatcaatatgtattttctactttttccgtctttgtttttatttttttttaagaatatgtccattctactatttttgagtgtagcgtagtggtattttataatcatttaatagcttaataacttcaaggtcctaggttcgaactcatgacctctcccttttttcgatccctccctcaccactaaactagccttagtagcttatatgtccattctaccttaataaaactaattttttcgtaggtcaatttttctctatttaaccatttttaagaaaaatacaaatttatcctattatctactataacataacattattctgtcttttataattaatctatgctcattaagttttacattgtttttaatggcaatattgttacaatcaaatcaatatgacttttctaacatttcgtttttgtttattttttaatttttatttttttaaggatgtgtccattctacctttataaagctaatttcttcttaggtaatattttttatctattttaccacttttaatttcaataaaattatttatgtaagatttattattcttattttgtgttgcatttaacctcactttaatttacttgatttattatttttttttatttttcaaattacaagtactcatagttcattaatttttaattataaatttggaaataatttgaaattattattcaaaaaataaaaaattaagcagatcaattaaaattttatagagttgattattaaattaaatagtgtgtaaaatatatataaataattggcatattatatatatgaccacttatgtatataattaaaatatccattttacaagtttatttttatttttgtatcacaaatataataattaaatatgtattttataatttttgtagtaacatgtaaaaattaaattatataaattttattataaatacaaatttatcctattatctactataacataacattattttgtcttttataattaatctatgctcattaggttttatattgtttttaatggcaatattgttacaatcaaatcaatatgacttttctaacatttcctttttggttattttttaatttttaattttttaaggatgtgtccaatcgacctttataaagctaatttcttcctaggtaatatttttatctattttaccacttttaattttaataaaattatttatgtaagtttgattattcttattttgtgttgcatttaatcacactttaatgtacttgattttttttctttatttttcaaataactggtactcaaagttcattaatttttaattaattaattatttttaaatttaaatttgcaaataatttgaaattataattcaaaaaataaaaaattaagcagatcaattaaaattttattgaatgtatcaaattaaatagtgtgtaaaatatatctaaataattggcatattatatatatatatatatatatatgagtatatactaaaagaaagttatgcgaggaacgtatacttaattttatattaagtattttttattttatttaaaaattatataataaataattaaataaaaaatattattagttattgtttgagattatttttacatatatttaattaatctaaataatagtgttacaaattaaaagtaaattgaatacaatatattaatgtttaaaaaaatttgataatctaactgcaaattattcttaaattaatctaagaataaaccaaaaattaatattcatataataaatcaaacacaacttaatgagtttgttattgctaagcaattgacactgtaatctttgatgttataaagataaatatacaataattacgatccattacacccaaggaaaaatgaattaacaataactactttcaaagcacatttgcttttgtttttacttgataaaatataccaataattaagatccattacactaaggaagagcagcgcggaattaataaaatgcttcaatacatatttaaagattcttttctattcaaatgaactactttgactattaggccacattaaaaacaatcagagcaagtctaataagaaagaaaattgtaaaagtgaaattgattcacatccaatagatgatatattgttctagcgtaaagctatcaaaagatcaagaggtattctagtgatttttctagtcgatcagaaaattgtgcatgatacattggagaagattaagaggatgtatgtttatagtgatttttctagtcgatcaactttcgatgaaaggctcaattttatggctgaagcttgcatctctcacaagtattcttttattagtatataaatgctaaagaccaaggatttgtgagaagttagttagattaattttttaaaatatctctattcaaaacttttagaaaaatagaggtttagttcaaccatttggtcagtatttttatgtatttattattttaaaattttaaaagttattgtttaatgttaaatttaataaaaaaaaataaaatctattaaattaagaaatatggttagataggcacttttaatctataaagacttaaaatatccatttaacaagtttgtttttacttttgtatcaccaatataataattaaatatgtattttataatttttgtagtaacatgtaaaaattaatgatataaattttattataattatttatgaaatacaaattcaataaataaaaatataaataaaatgtattaaagagagctaggcacatcagaggtgctaatttttataaaaataagagagaaaaataactagaaatcctgaatttttatatatatggaataattcttaatggggttattatccattaatgaataataaacaaattgttataaatattaataattatgtggat

SEQ ID NO: 43603 - DNA, 2710 bp, Cannabis sativa
aggttcaaatagaggaaaaagagccaataacagtggcgaacaagggaactcccccttgtggaaaaaaagccaaaactgggggggcaaacccttacgagagaatgagcctcgtttcaccacctacttcatcatcttgaccccaagagaggagatctgtacggcgacacagtccacagtgtcgtatcgtaaacctcttcccttcaaagagtctgggaagagagacatgaataacttctgtcgctatcacaataattacggtcatgatactaatgtgtgtaatcagttgcgagacgagatggaatttttcatcaaacagaatcatgttgctcttcagcagtatgtacgacatgaagttccaactgggggtatctctccagcctacgccagctgtagggaggctcgagattgtgattggagccctcgcctaactagaaattcaaggaaggccttcgaaaggtatgctatttttttgcgacatgagccaagagctaaagtattgaaggttgcataacgtcctccaaattctcaatgctacgaatatgcacccatcacattcagagattcagactcctatcatgtcaactaccctcacaatgatcccttggttgtagaggtgaaaatagccaacatgatggtggcaagggtaatgatcgatgatagagcacccttgaacatctttttcaagcaaaccctaatccaaatgggtttgttactagaagacctgaatccatgaaaacaactaatgtatgatttcagcggagctggcatagctccatgtggtaaaattggactgccactcacagtcgtcattgccccaaggtagaccaccatcatggccacaatatatagtggtggatgtgaagtctccgtaccacatgatgcacagaaggccagccccatacgaccttcgagctatctcatgaatatactacttgactatcaagctcccaacaacagctggtatcggttgtctccttggaaataaaggaactgcctatgcttgtgataatgcttcgttattgcctaccaagaagacctcctctgctctttggcactaggtagaaaaacaagacctctcctacgaagttgaagagatgacaaagacctttggagaagacggagatgacacctaaagccatttgaaggtgcacccaagatgtggactaccactgctacaaaaaaagactttaatcccgatttttaagggcattttatcccagttttcactaaaataaaaatcgggagatatgccagtggaataaaaagtctatataaaaactgggataaaatattcacttttagcaccttttaccttttatcccagttataatataaaaactgggataaaatagtggttcctatttatttatttttattttttgatatcaatattttaatctcggttggtaaaagaaaattgggataaaatgagataaaattgctcttaatctccagtctattataagaatcagaatcaaaactcaaaaaaaaaaattaaagtaaaaaatttatatttaaaaatatatcataaaccattttatcaaattaaatcttttttagattcttgaaaattagttacgcataagattataaaaatttagacatctaatagcatctagtttattgaagatataacattatacaaaagatccattaatcaacaaaaaaataatatacaacaactcataaatatcctacaatagcagaggctccatgaacccaatcgactccatgaacccagtcgaagctcactccaggatgcaccacgaacccaatagaatagcttcgtccactgatgacgttgactaaaaactacgataaacttttaagctccatccaccatcaacctagaagcttcgtccattgcaaaccttcattcacttgagaaaagagagaaggagagagatgagcatttcagaaaagaaaaagaaaaagagaccacagagagagatgagcatttcaaatccggactccattgattgtttgttgtcgaaaatgggttgatccctggcatgaatgggctactacacgaagatggaagagaaagggatagagagagggatgttggtggaagagagagatggtttgagtgaaaagatgtaaccttaaattttaaacgatttctttatatatttcaataacacttgaaaaaaaaaaaaagaaaaatatttattaaataaaaaggcttaaagggtcttagttatacccttttatcccagtttttagcaaaaaaactggaaaaaaagggtataactaagatccatttggctcctgcaatatttttatcccactttaagagagaaaaatcaatttttaacaaaataaccaaacaagtcccttgatatacataagtcacttaaggcatgtttggcttactaataataaaaattcaatcttgaacttatttttttgctttcgatttttttgtttaaatgttcaaccaaacaggacccttatctaaaagacatttagatgatatcaatgaggtaccaaatctaaaagtggggtaaaaagcttttatcccactttttatttttgttaagtataaaaagtgggatagaggtctcatttcttgtagtgtacattgaccactatttttgggaaatcgactcggtagttggtccgatcgagcaactcaaagaacttccccttagcacaatggacctaaccaaggttgtgaagattagacaaacctaacagaggtcttgag

SEQ ID NO: 43604 - DNA, 4515 bp, Cannabis sativa
ggtacggtttgtataggaaatttcaaggtgcaatgcagattgtagcgatggctgaggcagtggtaaggcactaggaattttatctactttagtttgtcaaaatacaatatttaccatcttcattacttacaagaaggatactctggttttcagatatacattaacttcgatgactcgtcagaaaattactggattcgcttactagtccgagaatgggctcagttatgcatccttgtttacatagggtatgcatatattttgatactgaacatattccattcacataaatgtaaaaaccaagtttagtaagtaacctacataactaaacctctcttgtaggtggactttcaggtcacaagatttggcaccacggttttcagtcatgccaactctaaaatcaaaaggggagaccatagtccctccaatatacagcatagtaagaattcttaataggttctgatttccaatagttctacaagttttacgattctaacatcacgccactgcaggaaatggatgctgcaacgtttaaggattttagatgccatgaatggcatattggtgtggtaataaaggttttccctatgttcatagtcatatattacttatttcgtatattgagattactaaagggtggattaatttatattacttcaggcaacttcaacctatgatgagaagagcaaagatccagtcattgtaataattcaacagcctcatgcattgcataaacatactccagtcgcaatagcgagttctcttcctttaccacaagctcaacagcagtagaaaattttgaggcgagataatatacaatttcattatacacttgtcaaaagttgcattcaatttcaaggcacgaagaaaagaaagcccaatatgtatttaatgttaaaattacgactacaacagagaaaaacctgacagaggattctaaatctctttaattattttgtgtactacatgtaacaatgacataagacacgaggcattgtataatccgacgaaatatagagaaaaaaattgtaaatactagttcgcattattgatctactttattttataattatattgagtatagagcaccaagcaattatatgatagttatccttaggtttatgtgattttttaaacattgaaaagaaaaaggaaatatcaaacataaaatagatgaaaatactgggaaccaaaatatgaaaatatatcaagatataaaagaaaagtgagaaaacataacctaatcatataaaaacaattagaaagaaaccataaaaggggaaataaagaatctgagcatcagttttaaaaagctcgaatttggaagctccatgtataggtcagaactcaataccaatttttctcatcatatgctcagatctttaatttcttatgcaagaaaaagaaaacactaagtaaataggcaaataaatatgaaagtaaatcaaccatgaaaaagtagaacagaatcccctacgattagaaaaggcgcaagagagaactaaaaaatagactagaaggaagggttaggtcagaacttaagaggccgatggaagagaccgctgtacttagtgaagtgaactaaagccaaaggcaacctatttataggcaagggttaaaccctaatttgagttatttcatagtacgacgccgtttttcagttaaataaaaaaatatataaaaataaagcgttattcatcttcttaacgacatcgtttttttttttgaagttaaacgacatcctttaagtctagcattcatctaaacgacaccattattcatctaaacgacatcgtttaataccattttagtttttttttttttcactcgaccattgcaagacctgaaactgaaagtgcaatttctctcagttgcctgaaagctcccttatggcgaatcttgtatattgaatctcagattgtggatcatttatcaacaaggcttcaaaatgagtgcaggttctctctccctctcagcgttgattatatattattatcatattttaggttttttctttcttcttctcaactttaatttggctaattttctgtgagaatcggtgtcttaaaggagaagagtctcctgtgattgttttgggttaatctcaaaacttgtgaacatgaaacaaagcagaaaatgttgttaattggttttatgatttttatggatgaatccaaaattgaaaccacttatattgtttcaatgtcttctatgttattgtaaaggacagttcttgaaatcatatcctacgatgtctctgaacttgattggtaaaaggggattaatgggttgttaactttgacgctcatggcttacaagacgattgttttacttttgtttttatttgagatcaccaaaatttttgtttggttgtagaacgaaagtttaggtcaatcttaaataatgttgtgtcaaatttggataaatgttatttcttgtaggtggtgcctttggtggaaataggggactgagaccagtacctccagagaaaggagtcttccctttggatcatatgcatttgtgtgacttggtaatggtgcctcttcatttttcccaattgaaattatttcactattttgctctctgagtatgaaaaaaacacaagttcttcaaaatagttcctctgtgtcacaagtcgaggctatatattagaaaaaaattgtacatctgtgtcccttacttgccttaatttttgttaacgctcaactgccttataaatctctttttccaggaaaagaaagaatatctgagctgccttaaatctctaggccatcattctgataaatgcagaagcttctcaaaaaagtacctcgaatgtcgaatggagaagtgagtttgttgttttcagtgtgctatgttgatatttttgaatagctagttgtagaccctatcgcccttcattttgactttgagtattagtcttaggcccgttaggtggataatttcattattagcaaagttgctaagcaccatcttgtcacttttgctgacacaaacgatctactttagaaacttaacactcatttcttgtgttatttcccattctagtaatggatgtcttgatgtggaactcaaaccttctttttttcttgagttcagttattgtgttggagtacttattacaattatacatgtcatgactttttcatttatatcttgcaggaatttgatggcaaaacaggacatgtctgaacttggatttggaaaggaaggtgacacagaagggtctaaagagaaagccactgagagaattgatggccagagctaacaatatttctggaaaataaccatagaaattatttttacccccttaattcttgagtcttcattccaaatgtatctttaatataagtgataccttctgtgttatgggttgtcttgtaaagattacaaaatataatttttatcacatgtcttataattttaggcataattagagtaagaaaactgagtatacttttggggcccgtttggttggggtaatggaaagtaacgagtaatggaattaaagcactggaataatattctaaaattgtttatcttttgcttttcagaagaggaggaaaaggaaaggctatttcaattctaatgggtactgataaaatgaaattattgattttttattatacattaaagagtcctcctcgttaacaagattataataagcctctcaactcccccaagtggcaagtagtgaaagattttttgcattgaatagtgaatacaactccatgcctccactctgtccaacaactccaaactaattttaattaattataaccccaccatcataattcatagcgtcgcctagattgcccaagtaatgaattttacattcaaagacctgtctaccctctgattcggagtggatgtgcatattgttttctcagtaaaataagaccaagtccccttgttactaataatgagacaagacaacaagaaaagaaaagaaacgaccccatgatgttattttaacaattaattcccacccaacaaggtatcaaccaaaacaaaattactttacttaaatggaaaaaaagaaaaaaaaacatctgttacttcaatcttaagtttctcttctatttttttttacgacaaaatgtggcagtagtagtagtaaatgatattaataatcatgtgtgctgtaaataactagtcctcctcgtatcgtatgatttgaaattcagagttgagaagcaaactgtccaagaactaagaagacaagacagctggagtggcgggagataaaccctaagacagtaaataactataatgtatatatactgtcattattatattaatattaatatccattgccaactctttattattattataatagtattaataaaaacctttgccttttctctttctctctctagacgtgtgagtgtgagtgtgtgcacctcgatggttacgctcaaggctgagttaaatggctcacattttcttctatttcttcttttccattttttatggctttccatttgtctctgcaaattacccacttctatccct

SEQ ID NO: 43605 - DNA, 2827 bp, Cannabis sativa
acttggagacttttgtgggcaagtctccatagccccaaagcaaaaatcctgcttggtttcatccaatcgatcattagtacacattgaactcatggcctattgctgagcatctgtttcacctatctcttcaatcacacatttacttggcatgttcatatttttctcaattaccacaaagtggttattaagatcaatggcaagttctactgaggcagtgttccaggagttggagtaatgcttactaaccttatttttcctcttattgttgctttcctttttgaagctccttggtttcatagctaaattcaaatctttggacggtcttcctctctttctagttgactccaaagactttggaacaggggtaatctttttccttggtcttcctctccttcgttgactctcacccttctcaaaggatccaggtgaaaaaccttcttccgaattcggtaatggggaatccagcttttcttcatttcttggggcatccaattgatcatcttcttggtgaagttctctatcatcatctttcttgggaagcatatagaaaccatttgtcgcttttcttttccttggtccttattctgcttcatagcatcgtatctcctcaatgtccaagattgggttgaatagagtaggctcactgtggtatttgtcaatagtttttgctcccaatagttggtcaaaggctaactcccaacattctttcgatagatactcaatgatatgggcttgtgtaccaaaagggctttgaggttcagggcccaacttcttcttctttaaatccttccatgggattgtataattgatttttgggtccacgtgggctttagcttttgtttccttgggattgatattatcttcctttgccacctgtagtccaacggctagaaaattgtacttctccatatttggttcattttcagtatcctctctcgagatctcattaacttgaaattcaaaaagggaattttgtatagcgtgcctgattccagctttttcatgtctgggtttggtactgctgcaacttggtacatcttttctctgctgcattgtccttattatctccaaaggaggaaggtcaaggagtatcttttctacaaccagatctgcagtgttctcaaatggagtaacttctccaatccccggcaaacggaccgctgggtatcgattgaggaccacttcaccggagttagctctggtctccaccaccgtttctacttgtcgtctttttccagggtattgcatccgaagctctcgcaatttcgcaccttcaatctgaaggctaattctctggttctttagtaattgcctaactttctcatccttggccgccttttggttcacaatccactcactgaaccaattaggtagaggtaggtggaagggagacctttccatggcatccttggccatccaattcccgtacatagggaaaaactcacctttggcatctttaatcacaactggagtcttgaaacagaatttctgttcatgtgtcattaggccacacttatagcaaattctagggagtttctcgtattgatattgaagccaaagatccttaatccatgttctcctaagaaagaaacctgagaaaagtggctttgatagctccaccgtggctcgaaaccagagagtacccatgccaaacgatcccctttcaaagttcttctcaatatgacggggaagttcatacactgctgaaacttttcctgccatctcctgcaagtttgttttgttccaataatatggagggatgcttttaagccggacccatattggcgaatggtcgaacttaacctcttctggagtgagccatgaaggccagggcatgagaactagcaaatatccacacacaagccagggtctccttaaaaggacattctcagcatcgaaactagttctgaatgtaaattgtagtagcccgtcttcacgttctttccagctccatccagaaatggatgcccaagcatttttcagagaaccctgtatcacctttttcccaagtctggcgtggcaaaaaagtttccccaaaataatattgcaaggctcaattggggggtcaacttcgcctgggtgaagatcacaggttatgtcatccacactaacttgaacagactcatcgaataagtcggttagagttgaatcagccatatctcgttactgaggaaaatacctaaaaaaaattttgacagtagagtcgtttaccttctttgaccacacacaacacaaataatggtaagcttctctatgaagggaatgcttccatactcttccaccggaagttagcaccagagtgcaaaaaagtttgacttaaatgtagtagtagtcaaaacgactagttgttcacgttaaaagttaaaaagttggcccactttttttcttcttcttaattattttcgtcaaaatttacaatttgcaaaatttatatatccctttctcccctctcctaaaatgccaactgttgttaattctgtcccttccctacaccgtttataatgttagctaatatcaatattaggttgatatttttttcattcaagaaaaggagttgcacaatctgtttattgtaaagttgatttgcgtgtcatctttgctgcagagtggccatgttaatctttttttactttcgttctattttaattgatgggacatgctctctaaggagactttgattatcaagtctttgttaaaggaaaattaatgtgattggtttaggatttcaaaactattttatgtttttgaaaattaaaatggtggggtctacctaagaattcttgattggttgagtgttttcaaaaacaaaatttgaatactattttga

SEQ ID NO: 43606 - DNA, 2685 bp, Cannabis sativa
tactccactcattgccaattggttttgagatggaacctcatgattctcaacattgcatttaaagggtattagttacttatgaaaattacattccagttatgcctcagtttctacacatagaagtaagatatgaaattaagcattggcctatatatttcttacacatgtatcccttttaaggttcaaaatgtaattataaaggtagattgtggaagcttatggaaataaggtcattatctgaatttttcatgcatgtgtgctacctgagatgttaataaatacgtatgactgtgaccttgtatttgtgtaagcgtggatgtgtgtttacaatctcatgttattataaatctacacataccatggtggcgtaggatccattacttttgttggctgaggaacaagtaaatcttttaggtttcccaggtaaatctcaagcatactgaatgtgaagacatatacgtggttgctatccactgcctgtttaaaaattgcctccattgaacgagctaccactcccggagactgtggaataccttcctacaatatagatgatataaaacaacattagtagaacacccaagcacataatttgattgtgtgatatctaggccaatctgggtcatatagtagactttcagactgaggttactaagatcttcaactagtctaacatgactttttaaatgggtgcaagcaccagcactgttatttttcctcacatttccatgccctcttattttttaccttggagaagagaataaagttaatgagttcatattttcattgttattccatgtgttaaaacaattgacggagagcatattacagtaagagaggattagtttcttgccagcacccctctttcttgtttattcatccatcttaataatatgtcataagcgactaatgctgaattggcataagtaggagatacacaccatggtgaagctttttccagtgccagtctgtccgtacgcaaatatacatgcgttgtaaccatccaaggctgatttaataactggctctacttctgcaaagacttcatctgaaatttcacatcaaattcagtaacaagagataagtactatagtttgagatgatcataggaaaagttgatggtccgttgagagtatcatatagaaaaacaatgaagtaccttgtgatgaacctggatggaaaaccttgtcaaagctgtaagttttacttttgttctctgctagttttaaaacaacattacttgaatccaaagctgcaactgcttttaactggccaaagttctctggaactgcaatgggtctaattcggcaaaagacacgaatgttccctgcgatgccaaatgtgataagttttttttttttcttgattgaagtagaatcaatgaacatttgctatggctttggttttccttaacagcacttttcattgaaatattatgttaaatgattttttgagataaagatgactaacctctcaaatctagaaactcatttagtacctgccttctctgtgtgttcagttgatttatgtaggccgttaaagctacaatttcatctgttataagaataaacaaggtgattccagactgaagatcacattgctaaactatgaagagaagtttttcaaatgcacaggtgctagaaatcaacatctgagggcttaccttcaattttcaaaacggaattatgcagttcatcatttttcttcttcattgaattctccattacaccatttatcggttttgaaatgatagatgcaccatcaggtggtgcacttttcattatatcacaaacagatttgacccagttggaagtcacatgtgatttccatcctagtagagaatgaattgtttcagaaagtttgtgaacaggttttctagactccatggtcttgtcttctgaactcagcatactattgaagggttatttgctcctttgtctacgtggaactataatctgcaactgactgtttacaaaaacaaatgaagaagtctatttcttttcctttatatgtagaaataataataatgaaaaaaaaaagagagttacatttccatgagatgctttaagtattgattttaaaacgattaagaagaaaggattcaactgattaataattcaaagtacaattcatcaatgcaatcatgcctttatatttcttgtagtgttttaccacgagttatcagtcttcatctcaacatttatagaaaaaaaaaggctttcaaaaagtattaataaagaaaaggggacactttacaccaccaaaatctagatagaaaatattgactattatgtaggcagagattgagcacaaagtttcaataacatttctccctacacggcatccagtcattgaaaggaaacaactttcctcaagtacatttctcccttaagactgcaaatggaagaaaaataaaatgaaaggccttctatattttagtcatgattttgttttatttttctttgcatctgtcttgtataattatctttaattaagacaagaatgacaagcaagcatttaatcagtaaggaaaacccaatattaaaagcttgaaaaccacaaggaaataataataaagagcaaaagaaacaccaatcaaaagacttaactttatgggcgaaagattaattaaggaaacaaaaatttatggaagtggagagtgaagaaatgcgaggagtgaaatcctta

SEQ ID NO: 43607 - DNA, 2850 bp, Cannabis sativa
ctacttgaaataacatgagatatatattactcaacttaaataaatgttattttttatttaaaataattactgtcaaacttatttattgatatgttgacacaaaatacaaaatataatttagactttggagtagaaaaaataaaattgaataggatcattgatcaaaaaatggacctccaaaagacataacatgaccatgatcacctcttattttccaatcatcaacactgtacaatttttttgcatcaatgaagacttcagcattgtcaaaaataacttgtttatgagattcatcaatggttgtcatttgttcaataaatgaatcttttttttgatctcctgttgtacggaacccattacccatttctggattaggttgtcctggcggactgtatgcctctccaccccattccatgtacgaagctaaatctgtatttagagcactaaatatgcgtccgggccaaaacccgatttgagtacctgcttttccatattcaagccaccaatttccatttgttggatcctataaatattatatgtacataacaaagcaatacaatatattgtcaatgctactaacaatgaaataaatcaaaaattcaatacaacaaatatagataaaataaatcaaatacaaccgatgggaagaaaaatattcatttttactatacatagctacaatcaatgctaccaaaccattttgaataactataagagccgtaaagtcaaagcaatcatataaaaaaaatggttctaagactctttttttcttttttcaaagtaattatattatttttttacatataattttataaattggcatcattaaaaattaattataaaatatgagtctttttttgaatttgataagcctagcacacttatttttagggcaaacttgcataaagtttaatatatttttgtgtaggtaaaaattagatagtaaactagttattactaacccgataaataaaaaattgggtatcgtatattgtttcaccacgttgagaaacttggtcaaaagtgtagtcaagaggtatctcagtactaacaataacaaagccaggacattgtgtgttaaaacaagaatttccaccggcctgtaaagaaaaaaaaatatttgtaacattaaatatatataaataaataaaacttttacatggatggaaagaagaaaacttacttgtaaaaatgtgaacgcatgagttttactgtccccgtacaaagtaggattaacctaaaataacaaaattttttgaaaaaaaaaataaggtaaaagaatatagcatgtattaaaagacaaactctatttatcaaatattgtacttaaaaatataagaagaaaatatattatttgtggcatgtattaaaattgcaatttattcaaaacaataaaaaaaaaatataagtgttacttactgtccatccaacttgtatggaatcaggtccatttttaatagtcatttgagatgagctatattgtgagccagccacagtagggttataaatactcattactgccccacctccattatatctccttttaggatcagatattgttcgaagcacagcatgctaaacaaatatattattatttagtttaaatattaaatttgtattatgataaaagaaaacaaaaattatcatataaaacctataaaaaacacaatttttttaaagaaaaagcaatcttcattagctaacatctttcaataacaaggataaaatgttagtagagacattccccctactaataatacatagataattacttaccaaaattaaaataaaaaatgataagtaagcataaaattttgtataaaggaaaatacataaaagaaacttacatgaagacctggtttttcaagagtgagtgaaccatatacttttgtaaataatttggatttgataagatcttcttttgtagttctcctaataggaaccgttccaattggacaatttaagccttttaattttattttagatgaatctttatgttcacttaaattaggacgagacgagggtttaatctgcaccaacaataatataaattttatgcattaatttcatatatatataaattataataagatatatatgcacacaaatttataataaccttataatggtaagtatggttcttcaacgaagggtgatcaaatgcaggttgtttgaagaaatcaatacaatcgtaaataactccatcttctctctgcatatatacacatgtcaaattataagcaaaaatgttattttcatacaataatattttatatgtatgtatatacaagagcatataaaataaaattatatataatattaccttaatagtctttattggtggtttattcaaaagattaagctctttctcaatttccaactcttctagtcttgatagttttgtggtgtagtctccaaaagcattacaatagtatgaaatataacacactatagtaattaggaaaattgccctaatagccatggatgaatgtgtttctgtataatatccaaaatcaagaaaataatattgaaaataaatattaattaacttaaaaaaaaaaaaagggaagaagaagaagaaagggataccttgaaggcttatacgaaattagttgtgaagatgaatagaaaaatgtgtaatatatatacttaaagatatggccaaattaagattaattcttatcagaaaacaatattaattactattaaattatccaaatattaattctatgatttccaatatatgtattcttatcttattaattttaagtttttggatttggaaaataattaataaatctgatattttgtaaacatggtataataatatacaccaattaaagcatatat

SEQ ID NO: 43608 - DNA, 4377 bp, Cannabis sativa
aatgacattttcattagtacatattgaaagagtaacttgtagtataaatttaaactatatttttaaaacttttgtaaatacttggtcattaagtgttaagttaatagccacacacacgacagttttaattgatcaaagtcattaaatttttatttgttatttaaaaattaatttaaatataataaaaaaaaataacatgtaaataataaccacacttaggtacctacaaaaatttcataaatataacttagtagtattactgtcaaaaattaaacttaagtatttatttacaaccgatagttaaacttaagtatttacgccgcaaattactcaaattgaaatacaaaagttatagttaataatttaccattatttttaaccgtttttccttacccaagaggacaagttttgttacatgccaaaaactatattttattttgtcactaaattttgttttagaaacttgtagtactactctattttgtggatactttattggcaataatactaatataaggttcagttaagttgatcagttaattcaattgaatcatattttaagtaagctgtcacaatcacaacagttaacaaatgcatctattctgtaagaggaagaaggaacctatggagttcaccaataatcgaaatgtatggtatggtttcggggaagtagattctaaagtttcgagcttttccttggacgacaatgtcaagcaactagggtagaagaaacccccaaaccagcttagcttacaaccaatcgagatctcaaaaaaaagaagaaaaacaaatcaagacatcacaagaggttgcatagaagacttcatttcaatgcttgcattcagaatctactattagaaaaatctgagttcgggttttgcaatcggtacaataacaaaattagattgcaagactggttcctaacatcaaacaaaaaataagaaaaagagcctaagtactcaccattatctgaaactagcaaagcgagcgaatctaacgttccatcacagcctcatcaaagttccagtctctaacaatatcccttctcacggcacagcttctgactaaccgaggggtatctgttatactactggttggcattgaaggttgcggggttactttagatgttgataaggaagaactcgtcgtgtgagtaggtagcgatgatctccaggtggttaagcagttggcaatagcagaacatctaccattattatcggaacttgaaaccgagtaactcctgaatgagtgtgatggactttctacattgtggcatgcaagacatgctaggctcatatttggaccggagaatttccaccaatgcaaaactgtgctatgctgcaattcattattcatatcgaaaagcaaaaagaattagtactatggattcgtcaacagaagattctacagctatttcgtggcatcacatggagactaaatattcacgacgcaaaaagaaatcaaagaagaccgagtaaaatatttagaatgttgtagaatccttaccaatttcctctaatactggattaatcaggagtagaattttcatttgagttgttttaaacatcacaaagtaaaggagataatccaacataacacatagagaataatcatatttgaaacataagtgattcaaacatgctatgatgctacacaggcacaaaaaaagttcatatatatctgagaggaaggaaatatggattatgagatataaccgatgatgtcgatttttataaccaagatattgggatcatgccaaagtaaagtaacttggttttcctatgtcattttccacatgtattgttatgcaattatccgaattacaaaaccttttcttatacctctaccactaaatctaaagccaaagagagaaacatctccacaatatcagaaaaacctcactagtaaactttccaagagaataaccaactgaaaaactttcaccttgtcactgatcacctttcaagacactagaaataattgaaattaatcatgtaccctgatgagctatgcaaacaggttagatcctctcttgttttttattttatttttcctaaggcctagatcctctgaaagtgtaaaggttcactttcaaaccaaaatcttgcaattatttatttttattttttaaaaaaactggccgaggaaccagctggcccaagtttgcaagggccagtgcgatcctgattggcagagtgcaaaggtcactcccgtgctccatagcagattactgcggcagagggtttggaatgccaatctaggccgggtgatcctacccgatgaaacgcgccaacggatatagttgtcctaaggaaggaacgtccccacaaaccaaaaggtttccaaagaatagtacgagagatattgcatcagtagtagcactatgccagggaaaccagtaacccaaagcacaacgtggtgacatcgcgatttgagccagggggtattttgggccccccagtggcttgtttttttttttttccgctaaaatcttgaaattattcatggtactacaattctaagcaaacctctaacctttcactatcatacctattgaagtcttagaaaacactcattttcatgataagaatggtgaaaatcaatctagaatttctgatcaaataatgctcaattaacacaacaattaccttgaaacatagatagtaacacaatcttacttatacatacacagaaagaaaaaatgccaaaattaaaccacatgtaaatagtctaacaaaatttacatctgtaatctgtatctcacagtatccaaccaggtaataacatagtaacatgaatgaatagataatcattacatgaaaatgttgaaccatgataatcaaacttaaaccttcaaacatttataaaggagtggaatggatatgggttatagccttataggtagcatgtcaaaataaactgaattaaaccaacaagctaattcattctgagtataaaacattcctaaattccccaaactctttggaaaagttgatgtgtaagttctgatgctaccaccaggcaacacccttgaatctaagctgacatggattgtcattaaagttatagattctgttgctatataaatatatatacatgtgtgtatttgtaactcttgacaattaatcgttcaagtggttgagtgtttaacccaaagattaaatttttcctcgtcctaatacacaaaattaatatttctctgctgacttttctttcttagaattcttcattcatcaaatggaaaatttccaaaattcaaattttacgtattccatgcctaaagaggaaaacccatcatccaaactaaccaataatctcaaaaagacacaaaatttatacaatcaaaaactcataatcaattacaattaggaaataaaaaaaaaagaaatttttaataattgacttgaatctgtagcaattaagcaataaggattacctgatagcgataaagggtctaccggagtaccaaaatggagagaaaaaatctagggtttgtatgtgaatttgaagagaaaacgcagtgattgattgtattgaagaaagggggtagttaaaaaaggagaaaactttggttagatagatgaaagagaagaatatgatgaggaagattggaatagggtttggagagaaggagaaaaaggtgtgagtgtttgtgaagagaataacaatggcgggtaaggtggattggattggttgggaaatggagaaagaaaaggatctgatgtggtatggtatggtctctctgcccagttgagacttgagagagtgaagagtggactttgttttgttttgtatttttcctaaactatattttatttatttatttggtcttaaaaaatatatattatttgattgtttattttccaaatgataaaaggaactgggtgttatattaataggataattaggataattaggtgttatttgttgatttatagtttttttttttttatttatttatggttgtttttatgttgttgttgagatgttttatagttgttattgtttatgtgtattttttattgtgtatattttcaatttattctaaataatatttttgttgtatgtatgtgtatttgttttgtatttttatgtttttagttgtttttccctttatagttaattttttaactcaaaaagaaagaaaaaaaaaaagttgaaagaataaagttgtaacaacaaattttatgaaaaaaataatataatagtacaaaaagatcaaaaactaagtaaaaaaaattgtaatataaaaacatattaaggagttgaaagtattttactaattgcaattaggtcaatattttgttacttttatgttgctatgtagttatatttttgttgttttataattattttcatattgtttgttaagttgtt

SEQ ID NO: 43609 - DNA, 2766 bp, Cannabis sativa
tatctctgttttttctttttcattgaaaaaagatttattttttatttaaaaaataagacaaaaatacaatttttaaaagggaaacttaaaaaagctttgatttttattgaaaattctctatataaagccataaactttcactcttttccatctcacactcactactcggactctatctctctctcttctctttctctctctaaatcttcttactggtcgaaatctcacttgcccagattcaggtacttcgttctaatcacttaattcccatctgggtcttacaaaagatcaattttttctcctaaaaaagtgatctttatttatttttttaattataatttgatttaatcactactgtctatagtccagtgtagtccgtacacgtggtcttattgtgggtcatgatgatcataataatttgtggctattgtgattgattcaatctccatgattttagctctccttatttttgggtttttcagttctgaccatatttgttctgttttttctttctctttgttttagtttttgtttttcttcttttgggtattgattataataacccaaaagtgagaaagaaggaagcttttgttgtgatttgaaaccaataatggctactaggaatttggagaagttggcatcaattgatgctcagcttaggcttttggttcctgggaaagttagtgaagatgataagcttgttgaatatgatgctttgcttttggatcgttttcttgacattcttcaagatttgcatggagaagatctcagggaaacggttagttaatctctctctctatatatttttgatcattattgatttgggtgtttatagatttgtgtatagatcatttgattagatggttaaatcagagtgtttttgatttatgtttatgatttgactttttcaatgattgaattttaagagatttgagttttcaatgaattggtgtatagagtgttaatgatgattatggcctcatttggtatattgtattagctagtattgtattaagctgggttatgtatcatatattataacattatatttgattagatggttaaatcggaaggttttttattactgtttatgatttgactttttcaatgattgaattttaagagatttgagttttcaattaagtggtgtatagagtcttcatgatcactatgggttcgtttagtatgctgtattatattatattgggttatgtatcatatattatatattataatattatacaaaacaatccagtttgtgatattgtttttcttattggtgtgtatatgtgtgtgtttataggttcaagagtgttatgaactttctgctgagtatgaaggaaagcatgatccgaaaaagctcgaagagctcggtaatgtgttgacaagtttggatccaggggattcaattgtgattgcaaaatcattttcacacatgcttagcttggctaacatggctgaagaagttcagattgcttatcgcagacggaacaagcttaagaagggagattttattgatgagaattctgcaacaactgaatcagacattgaagaaactcttaagagacttgttgggaagataggcaagtctcctcaagaggtttttgatgcattgaagaatcagactgtggatcttgtcttgactgctcatcctactcaatctgttcgtcgatctttgcttcagaagcacggaaggtttgcttcggtccttagctcttaattgaattaagcatacatttgacaagttcttagtgtctctgattctaatcctaactctttatgtgtgattaggattcggaactgtttagctcagttgtatgctaaggacattactcctgatgataagcaagaactcgatgaggcccttcaaagagaggtataaagactcttcttttgatgctttgaaaatctatagctatgaagacattgtaaaaactgaaatgtcattaagttcatgcttataagttcttagtggacaaagaagttgattagagttggtagaattcttactactattctttatttcggtgttgtcatttatgtagattcaagctgcatttcgtactgatgagattaggagaacacctccaactcctcaagatgagatgagggctggaatgagctacttccacgagacaatctggaagggtgtcccgaagtttcttcgccgtgttgacactgctttgaagaacatagggattgatgagcgtgtgccttacaatgcaccgctcattcagttctcctcttggatgggtggtgatcgtgatggtatttccctttctctcctaaaattgtgcttgttctctctattgtagtctcttctccattgccctattaaagtgctattttcggttttgatatttaggtaacccaagagtaactcccgaggttactagggatgtttgcttgttggctcgaatgatggccgctaacttgtactattctcaaatcgaggaccttatgtttgaggtatacatataatacatttctcttctttaatcaatagattatatagtttctttttgatattttgttttcttttgattttgtgtagttgtctatgtggcgctgcaacgatgaacttcgtgttagggcagaaatgatccacagctcctcgagaagagatgctaaacactacattggtaattatcgaatatttctataaattattttacatttttccttaacattctatcaattccagttagtattaattgctgatttattttttctttattttgtgtagaattttggaagcaaattcct

SEQ ID NO: 43610 - DNA, 3045 bp, Cannabis sativa
agaaaatatgtaaatgactaatgaaattaaaaagaaaaaaaaatgggtaagagacatcattgagggatccgtcgtttacacgactcccatgaactttgtttagtatatttttcaaaccaaagttcgatttataaatatgtacttatcattttaggaccatagtttaactaaagctaaagcaataaataagaaaaataataataacaaataataaatatataaataaaagagtgagctttaaatcaatgaaaatggaaatgttggtactagactcgtagtaagagaaggaagctcctcttcatgtgtttaagcaagctttggccatcattacaactattcacattaataaggaacgctcctctaccgcattctctgagtatttctctgtgaaaaacccttcagtttcaaacatggttgaatccatatggaaagagctttcacccgccaggagggaagaatagagaaaacccatctgggaaatccaaggtcgaagctcagaagctgtgttagtccaatcccatttgctgttttggggttttgggtctcgaggaatattcgcaacttgtactgtaaagttcggtttttggataatggtggcactggttgtggctgttgttcgagcaggtttcggtttaatggtacggtggtgaacaactctgttttcttggcttcgcctggtttttttcaagggagagctggtatggagagtttggatgtgaagaaagaaagggttgaagataaagaatgtcaagtgtttgataaaaatgttggtggaatggagacatttggggatttaataatttcggaaaagggtcgtgagagcagttcaagttctgattttttgacttctgagacgacagggcatgaagaacatagtcatagtagctctgaagagtcatcttctccggccacattgggttggtctgccgagaaatctgaggcaccagattgcaccagtcacagtagtggtaaggaaaccaaagagaaagcttgtttggatgatagaaaacttgagaaacaaggatcatcagtgtcaggtatggcatagcttgtgtttgcttcttcttctttttcacaatttctatattttagaaacacgtttatgtaaggattacaatgtttaatttgatctgattaacttatgtacatgtagagattgaaatgatgaaggaaaggttctcaaaattgctgcttggagaggatatgtcgggttgtggaaatggggtttctacggcattggctatatccaatgccattactaatctttgtggtaatgtggtctatataatgaactttggttctttaaaagcttagctttttaggactaatttgttcttaactaaagtttattagtttgtatgataatcttatgctgttccctttttccttcgtgtagctaccctatttgggcaactttggaggttagaacctctacagtccgagaagaaaatgatgtggcgaagagagatggaatggcttctttgtgtgagtgatcacattgtggagttgataccttcttggcagacatttccagatggaagcaaacttgaggtataatcagaattcatcttcaatttttgtagctaaatatatcaatctgtcatgctttcagatagcccttcagcaagatatactgttttcttatgtgttaattacactccaaaatgttgctagtccatgtttcttggtttattctttcaaatgctcgaatgccatgaacttcagatctctctttagaggctaacacaaagcttaagacttaaaaatttgtttaaatttggcaactatgacatagagtagtaactttatcaaggattctttttttatataattgaaataactgatccagtatgttcatacaataatgaattgtatgtgcttagaaatgtcaattccctccaaatttagatgtgacattcttttaatcataggtttctgttatcagaaactggagacaacacaattcctgaaaacccctaagaagacaaaaggaaactaacaaactcagcatagggtagttaaggtagctataaattataagggccttcttataagtattagtcagacagtattctttttttttttaaggaacccctattacttctaagtgattttaattcaattgggctgacttataccttcagcttctttaaatgttaattattttattctgttcttcagatcatgacttgcagaccgcgctcagatctgtacgttaatcttccagcacttcgtaaattggataacatgcttcttgtaagagacccttacttttgttaaattgtaaataaaatgaatccatttctacaaggccactttacttataaaatgttagctgattgtttcaggaaatattggacggttttgagaacacagagttctggtatgttgatcaagggattttgacccaagatgacgatggatcatcttctctccgaagatcacttcagcgtcaagaagagaagtggtggttgcctgtaccccgagttcctaccggtggcctccatgaagatacaagaaaacaattgcaacataagcgtgactgcacaaatcaaatattaaaagctgccatggctatcaacagtattactttagctgatatgggaatccctgaatcgtatctagaatctcttccaaaggtatgaatcgtttgtattgtttaaatttaccattaaagccttccagattttgtgttccatgagatgtgatgaaagtgtttttttcattttgtcttcagaatggaaaagcctgtttgggagatcttatataccggtacatatcatcggaacaattttatcctgaatgtctacttgattgcattgacttatcttccgaacatcaagcgatagagattgccaatcgagcagaagcctcaatatatgtgtggcgcagaaaagtaaactccaaacccgccagtaacacgtccagatccagctcaagatcatcatgggaaatggtcaaagatctgatggttgatgctgagaaaagggaactacttgcagatagagccgaaagtctcctgctttgcttgaaacaaaggttccc

SEQ ID NO: 43611 - DNA, 5645 bp, Cannabis sativa
tgagtgcctagcaatagcatgagcaacacgatttgctgatcgtctaacaaaacataaattcacagattgtaaagaagacaataaaagttggcaatcctgaataagtaagccaaaacttgaagaaaattgttgattacttcgaatagcctgtaccgagagcaggctgtcggtttcaatttgcacattagaccaattctctctctttatccagctcagtgcttccttgatccccaatgcctcaacaatctcagcagtgtaataacctccttgaaaacatgttttagcttcaatgagattcgctgaactatcccgtgcaaccaacgcatagccataagagccttcttgatgaaaaagagctgcatcaacatttattttgatgtgattttcttcgggttttatccaatactcagccccttcttcattattctcaattaataatgataaaagggttgttttatcctgagcttttttccaatgatcaaaagtagttgaagcagaaattataacatcattcacggcagcaattcttttatcccacacggtgtgattgcgagctttccataccgcccaacagagaacggtagcacgacatatcatatcagcatcaccaatatgtagtagcgcatccacccaagcaccaaaagatgctgagctgttagcattcacaggagaaccgaatacattccagcaggctttagcaaaatcacaaaacaagagtgcgtgagtggtggattctggatgattcttacacactgggcatttaactgaaatcggaacatgtttgccaacaagattaagacaagtagggaggcaaccattgatagcacgccatagaaaattgatgaccttcggagggattttcagatgccataatttcctccaaaaaccagagttgttggagccgtgagatctgtcacgctgctgctgtagcagtaaataagcactgcgaacagtgaataaaccatttcggttttcagcccaagaccaacaatcagatgtatcagtatcatagagaggcattcccaaaatcaaatcagcttcattaggcaagaacaaatcgttgataacttcactatcccatctacggatgccaacttgaaagagtgaagcaacattgttatgtttgagagatggatgagtagaacttacaaatctgttacttggttggggcagccaagggtgaccaataattttagtatttgctccgtcaccaacaacccgagaagcacctgtacggaccaaatcttgtgcaccccaaacgctccgccaaacaaaactaggattattcccaatatcagctgaaaggaaatctgaattaggaaaatatttcgccttgaacactcgtcctaccaaagagtttgggttacaaagcagcctccaaccttgctttgcaagcatagcaagattaaaatcatgcaaatgcctaaatcccatgccaccatcttctttagaagaagcaagctgatcccaagtcatccaagtaataccacggcctttacttgattttgtcttccaccagaaattagccattagagtttcaatttcattacaagttccaatcggaaggagaaagacactcattgcataagtaggtagagattggagaacagttttgatgagtatctctttaccagcccgagatagaaacttcccttcccaactattgatacgagatatgactttatttttgatgaagccaagaataatctttttatttcgaccaataatattggggagaccaaggtagagacttccttcagtagcttcagccatattgaagattgaacatatttgcgctcgggttgataattcagtattggggctgaaaaatattgaagatttagagcaatttaccttctggccggaggcaacttcaaacatctgtaacagagaccgaacaccatcagcagcaccaattgttgcttggcagaaaagataactgtcgtcggcaaaaaacatatgagtaatcgcaggtgctctttgagccacacgacatccttggataactcttcttgtttcgaattgttggattaaggaagacagtccctctgcacatataatgaagagataggtagacaaaggatcgccttgtcggatccctcttgagggagtaataggcccaaggctgtgacctccatgaacaatcttgtattggacagaagagacacaagtcatgataagatcaacccacttttcagcaaaccccattcgagacataattgcacttagaaatccccattcaactcgatcatatgccttactcatatccagtttaagtgccatgaagcctttcttgccagtccttttacgtttgagatagtgcataatttcaaaagcaaccatgacattatctgagataagccttcctggaataaaggcactttgtgtatccgaaattatttgatcaatgaaccccctcattctattagcaaggacctttgaaatgatcttgtagataacattacaaagggcaatagggcgaagctcgttcatggtagagacatttttcttcttaggaatcaagcatagatttgtgtcatttaagctacaaggcaagacaccagttgagaaaaagtctttgaccagattaataatatcggtcccaacaatgctccaatgatgttgaaagaagccaggtcccataccgtctgggccaggggctttatcagggtgcatttgaaataaggcatttttaacttcatcatcattaatgggctggagcaattcttcattgtgagatacagtgacagaattacgaacattgccaataacatgagaccaagaacttgaattagttgtgtaaagagcagagaaataatcaagtataagattgtcaataccattaccccaagtcctccagatgccattttcgtcttgcagatattgaatcttgtttgatctctttcgagcactagctacagcatgaaagtatttattgtttttatcacccgaatgtagccaatgttgtttggatcgttgtttccagtataattcttgctgagctaaaatttcaaaataattgttcttttcctccacaaaagtttcagcatcaaattcatcctctgaattctttaacacagccattttttgtttacttcgagataatcgtaccttgaaatttcctgttagtgttcggccccaagctgctaaatggtgactacaaccttttaatttttcaacaatgttttgctgcctattttgctcccagtaattcccgacgatttgtgcacataaaggttctcgactccaagcattttcataacgaaaatggtaaacagtggcatgggaatttacggattcaggctcaagaaaaataggagaatgatcagatgacgaaaaacccaaattagaaagagttacctcagtaaattcagcaagccaatttgcggaagctaatgctctgtcaaggcgaatctccacactccgactagtgcccaagcttcgttcccaggtatacggatacccttgcaagtccaaatccaagagatggcagtcattgattgcagcttgaaaaccagaaatgagattagatggataaggccgacccccttttttatcagtgttactggtgatgttgttaaaatcaccaataaggcaccatggtaaagtggattcagcatgaagtgtacgtatgagggtccaagttcgatcgcgatgagctcggttaggttctccgtaaataccagaaagacgccatggttctcggccagaaatcttcacttcaacatctatatggttttgagaataaccaagtaaatgagcttcagaagaattttgccagaaaaatgcaagccctccttttctaccaacaacatcaacagcaaaagagcattcaaagcccaaacggactttcactctctccacaatttcttttttacataaagtctcacttaaaaacaaaaacttgggtttcttttggacacaaatgtcttcaaggaattgttgggcccgtgggttcccaagcccacggcaattccaactaatggtactcataattcttggtgggcctggaggccaggacccaccttcttcatgttttttgtcaccataacaacattctgggctgagttgtcttttggaatgacatcagtatccattggctcctttgtagcaatttctggcccattaagaggatcagatccaagccttttccttttagaatcatttatctcaagcaccgtatctgtagtaaaaacagagatattatcattgaccacaatagtatggtcatgaatgccatgcaattgatttccatttatatacgtatgagcagcttcaatattgggatttgttggggtaattaaatcattctttgctgattttgtgggctgatttggtggcaagacattctcatcatgtttttcaacagtagcctcctcctcttgccgccgcttctccatcggacttccacgaagccatggtgatgcagtaagaaaagtttgtcttttagacggggctttcatttcaatactgtatggctttttaatatcttcaataggagtatcatatattttagcacagaatcgttcagtgtgccccatgacaccacaaataaaacaaaatgaaggaactctttcatacttgaagtttgcatagaagggatcaccacccctacggcggaacttcattcttctcttcagcggttgatcaacattaatccttactcgaactcgtaggtagtcgcgccaaatcccacggaaattattaggatcggtatcaacaaattctccaatgtagcgagcagcttcacgtattgcccaatccgttttgaaccctgcttgcaaatcatgaatctgaacccacatgtctaacgtgttcatgatagtcagcttcggatcctcaccaggtttcaatctctggataataagttgtttgcgatcataggtccaaggactgcctgagataactctttggatatctatttcatgatagaattgaaatagaaatcggttttgttcaaggatcttaacatacatacctttgcccggtttccataagtcagcaataatattctgaaatatctgaaaatcagaaatttttccagttaaaggcgaccagacaccatctatcatcaaaatcaggatcactctcctctgcattgccatcatcgaaaaaggcttcctggtcttcttcttcttccaagcagatatctgcccaccttcttgtgattggatcagtcgtgctactgcttgaagccatgaagagattgacagaataactacatcacaattagttaatggtaatgaaaagaaaaattaatttaatttgtatttttacagattgtattgaattaattttgattaaaagtgccgattagatgcactatgatcaattttgcagattcataattttgtatcctataaattggacacaatatgaaaaaatcttttgaaaacacatccatccatccggggagagtgatcgagggacatggacataaagatctttacgagacaatcaacaactaaattcatttttgctagctagtgaaaaaaaaaagcactactatcataccgttattagtataattaaatatcaggtctcgtaaaacttaaaaaaaataactttcaacaaaacctgctgtaaataatttatttttttaagaaatgttcagtattttttttgtacttagattttctttttaa

SEQ ID NO: 43612 - DNA, 2233 bp, Cannabis sativa
cattccaacttatgatcttcatggctgaacgcggggctgcttaacagcaacctccgctgaaacagaagggttcgcatcagtagaatctatggaaataccagaaacatactgatccgatggtacatcaacattggaactctcttgaacattgccacgacatctctttagcacacttctgagattttcaggatcaacctgtcgtttgaaggtcttgccactgccattaagatcctcacaaccatctgaaataaccacagctttcccttttcgactagcagctacagcagctgcatctgagttgttggtaagtttgtcataattatgagagttttgaggtatatttggaggggaactatggacaaatgaagcagaagcagtgttagctggtgggagaaattcagaagaaaaagaggtgggattaaaagagggaaatggtagtgggagttcaggacatttctctttaggagcaggggtaatggaggcagatttggaagattcagccgtggttaaaagggttggatgtggtgatagcccaacagccaggtttctatgtgtttgaagagaggggatagcagaggatataatctttctagtaagacgggtaaggagtggataagcattaactttggaaaaatcacttcggtaacggtcatagatagaggatggaagtttgtcccccatcatggatggcccataaggaaggtcaggatcaactccattatccaccagttccatgaaagccaaacatttatcaaaaggatgtcccagcagtccacaatgaaaagaaaaaacaaggagactttcatatcgaaactcaagccaatattcatccttcaccttaggcaaagagaccatcttgcctctcatcagaggcttagtaacatcaatatgaaccctcgtacgaagaaaagagccccacccttcatgtaaagaatcttcatggacatcaataaattctccaacccattccccaactttcttagccaaggcacgagatctgcttaagaaagggaggcgatgagtttgaacccagaattgagcatggcacaaataatctttaaacacattctgaagtgaggcaggggaatgcaagagaataagttagttgaaaaaaatgccatggctcgcccgtgaggattctgtgttggtcaactgcacatgccatagttaagagagataagtcagtgtgtaattcagaaacaattacttcaaaacggcacttgttactctagaattctcccatctttttgataaaagtcttaggattaacagagttagatagacatctggccaccaaaaagaacttggaggatttgttcgaatcagatagatcggactcagagagagagtggacagttctctcatttttagacaaaataagtgtagaattcatatctttaataatggattccatacaatatagggaaagaggataaaaaaacgcaagaataaatcataaaggctgctatgatatttatacaccagattagagaacaaagtggagatcatggtgtaggctttggtggaggaccgacacgaagaagagtgggaagattggtagtttcctatgaacatgaccatgatcaaagaggaagatgaagcaagaaatcagggaaaacaaatgaccataccaaccctaaatatataaagactttgaatatggtgtatatttatacacggtgtatactttaaatatgtattttgaaaaataaaattaaaaacttagtaaaaatagtaaaattactaaaaaaaatatgaataattatcaattccacataaatcgtagtttcgaacccaaccaaaccgttcttaagggtttggtttggtttggtttgagaaattttttggtctggtatggtttttaatattgaaaaaaccgttatactggtttggttcaaaaactatgaaaatccggaccaaaccaatccgtgagcactcctagttgagaatgtccttttttgagtttcttttcagtgaaagaggaattagtaaaaatgaatacttttaattatctcattaaattattaaattacaaaaaatgaataaataatgaggaaaggattgaggcggaagaaaattaatgggatgacttttctttaaataatattttaattgagtcacctacaacaatcgacagcggaagaaaacaagaagaagaatatgagagaaataaacaacattagggacacacactcaactcaatttgagtcgttgattttccagatcgccggag

SEQ ID NO: 43613 - DNA, 1853 bp, Cannabis sativa
acataatgagaatataacttataaaagtgggtataaattaaagagtagtaaaatgaaggtaaaaattaaaatatgagacaaaaagtgggtacaaagtgtaatttcctctttaagttgctccgttagttgtcataagagtttttgtgtggaattccataaaagtacaaaaaaaacagttttaaagtgtaaaattaaaaaatcccaagaattaaaaagttgctttctattttcttttgattgtaaaaaaacatatacttttcacatgtcagaaaataaattgctaaaaaatactttttttctttttttggattttcactttttaaatttggttacttatttcttaataaaatataaaagaatttctatttacctaaaaattatcttgaatcaattttttataataaaaagtaactaattgttatattatttacaataaaaacaattaaaaggttacttttgaaaaaaaattgcaaaatactgaaatttcttaaaacgagatttttcacatttttccattttcggtacttattttagattttgatatttatactgacgtgatacatcgatatttatgcaaataattttcttaaaactatttttataaataaaattaattttaattataatattgaaaaaacctcttaattaatagaaatgcatgtgatgtgtcagctgtaaatattttagaaaaatagaaaataaaggttaattaggttatttttccttaaatttcgacttttaaaatttttaggtagttaagaagtattcgatttatgaaattgctaagttcaataattttcaatccaaataaatctgttcaattttaaactaacagacccctgaagaaaattcagggaatacaatttcatacatgaacagctattaattaaaatcataataagttgttatgggtcagctaatatattatttgatagcaaaattaattaatatgtgatatatttaactgtctgcagaggcattttcaatgggtgatgtatatgatttttcaatatgactaagtaacaaccatgcatatgtgtagaatttctttagtgacatgtacagcaatacttccaatcctgttggtattgaattgactaattacttacaattataacaatgacacttatcgctttatacaaaatgtatgagctgagtattaatttacgtatacatatatatgaactaacacctacaattttgttcctcatcacttaattaatttgtttctctttacaaattattgaataagtgcaaaaaactatcacttcaaccattaaaagcttatgggttgccttttcctataattcaacattgctttttagtagtgcatggaataattttatttaagcttaattattagttaatgttatgtgtattttttctcttatattagtcgccactaaataaaatgagatcatagcactatcatcattttaaaactcatagacaaatgactcttttatatagtatttattatttatattgtcttttattatatgaaaaaaaattaatatttttttttatatatttttttaaaattagaaaaatattacttaaagattatgttatatctatattagttttactaaaatattttttattttaaagttatgtcgattttttaatttttataagttattgtgaattgctggtatataatttttgttgtacaatatatttatgttttattgtattatatattattattcttaaaagatatttattttttattttgctatgtataatagaaatatacaattttattaccataatacaaatattttaatatatgtatataattatattgacatactacatatatttaattattattttaattgtatgatata

SEQ ID NO: 43614 - DNA, 1687 bp, Cannabis sativa
tcttacattttccatcaaaataaaacgtttttgttagctgcttgtcttttacttactatatgaccttagttttcactttaggattcaccaacaacagtattgaacaagatcaacaacatgttatccacttctggttcttgtgctttatcccccgaaagaaatacatgaactttccctttcatctgtatccaactacatccaggaaactttctcacacctttcaatcccatctccttcctcaacattttctcctcttcatgctcgtcatttgctgcataaatattacaaagcgtcacatgagcaggagcgtttagaggatcgagttcaagtaatcgtttggctgcctgtctagcaatcttggcatttgtctcgcctaagccacatactccaagcaatgctccccatacagtatgttctggttcaaaaggtagcttcaacacaaaccgataggcttcttttactttcccggccctgcccagaagatcaatcatgcatatgtaatgttccaagcctggttcaacatcataaacattgttcatggcattgaaaatttcccaccctctactcacaagtcctgcatggctacaagctgataaaacacccaaaaaagttacagagttcggaagagtcccagattccaccattgtttcaaaggtctccatacatttctttgccagtccatgatttgaaaaccccatgatcattgaattccaggaaatcgaatcccgaaaaaccatatttgagaatatgctatatgcagcatttatctccccacatttggcatacattgaaatcaatgaattgtcaagaatcaaatcaaacttatactgtgtttttatcacctggcaatgaaactgccttccaagatcaagatacgccattgcacccatggctccaataagagtacaatatgtggaatttaatggtgaaacaccatgaacctgcatttcagaaaatatatctattgcttccttgaaaagctcactttgaacatgccctgaaatcatggttgtccatgccactgcatctttgtctggcatgttcgaaaacagatgacaagcctttgaaacttctccaacactgaaatatccacttatcattgaagtccaagagaccttatctcggataggtaccatgtcaaacacactgtgagccctttctaattctccagtctgtatgtaaccattaatcatataattataagattgaacagtaaggttatttaaattcatggtaaagatgatataggccaatttcatgttaccaaatgcagaatacatgtgaacaagactcttacttaacctgccattatagtcattgttgtccaaactgttaataattatctgagtatgtaattgcttaccaagacaaggccaacccaccccagcacaagcataagcaagtgatataaaagtctcttcatttggtttcaagtcaaaacttcctttccacttaacaaaaagcaaaagggcttcttcatagaagccattccaagcaaaacccccaatcattgctgtccaagaaatgacattcctttcaggcataatttgaaacaaagaatacccttcatccacatagccagacctacaatagccagatattatactagtccaactaacaacattcctatctttcatctcatcaaaaagagcttttgcttcttccattctacaattctcagagtacc

SEQ ID NO: 43615 - DNA, 1474 bp, Cannabis sativa
gtaattagtaatttattcttgattgcgatttgaccaggctagttcttagtttcgcagactattcttctattaaaatggacgccaggcagaacacaagaagccagggtaatttggtggtatccagtggcagttaggaagttcagtttcccctgaataactaggactaccatcctattttggacgagataagaaggaacttcctagcaacatcaaagaaaatatttagaagctcatgcacacacactaggagtgaaaatatttttttagtaaggggtcgtgaagtccttctcaaagtcgtggtccaatctattcctacttatgctataagttactttcgtctaccggtctatatctataagcaacttgaatcaatgctggataatttttggtggactatgaatgaaaatgctttgaaaattcattggcgctcatggaacttgctttgcaagacaaaatgtgaatgaggcatgggtttccattcttttgtccactttcttcaagctttgcttacgaaataggcttggcgacttattgagaaatctgaatctctccttgggcagctgcttaagagcagatactttcccaataactcatttattgaagcaaatacttatcactaaccctcattaacttggcaaggtattcattggggaaaagatctccttgtgacaggtttgcattggaaaattggggaggggacgtcagttaggtacgggttcaatccttagatctcgagacataacgatttccttttttttgatataccgaccctttgaatggagtggttgcaaatttaattacagaggaagacaatgaaatattcctctgctacaatagtttttttctcttctggatgtggacataattttgatggtgcctttgagttactttagtaacaaagacgcgcttatttggcaccaccacaactctgatctttacacagtacaaactggctgccatccctcttcatctcttaaagactttaatcaaggcttaagctctaacttgacctctttatggtgaaaattattccggtccctccaactacactaaaagtgaagatttttgcctggtgagccatccacgatgacttacctattaccacctccttagttcgaaggaaaatcatcacaaatttaatgtgctccgtcagtcgtcaagcttgggaaataattggttatgtactctttagttgtaaatatgtccgagcagtatggagatcttcgaatctggtttttgattggcaagcgtgtttcttaatgcgaaaaggtgattatttgttccatttaacctttatctactcaaagtctgagatggaacaaatcttttgcgcactttagtcaatttggtcagagagaaataaagttgtccatggttaaaatactaaaccaagtaaggatcttgcctccttgccactacctacctacacaactttctctctaccaaccttaaatatcaagcagcgccactgctg

SEQ ID NO: 43616 - DNA, 3455 bp, Cannabis sativa
gtaattttgggatttaggtaaagtaggcatatttttcatagtataaaatgtattggttcaaaaaaaaaattttgaaaacttttaagtatagaaaatcaaatttcccttttaattttgtgataataaaaagaggataaagatgcggctgagccgagccatgtagagaaaagtgcctggctgggtaggtaatgagaaaatggtctactcacgtgttgaatgaccagtgagcacaagataacataactacttaattcagcctaatgatgagtactcgtactcacctgtgatagtcacgttaatcttacggggctgtgactcacttcatttgccgtttcctcactacccaatcagattccgtcgttacctggcggccttcacgctataggctctgtaggttggtggaatttataaataaataaataaatattcaatttgctactactattgtactgtctataaccgataaagctatatatttaatataaaaaattaactttatttaaactaatgttattaacctaaactaaactaaactattaaatagaaaaggatatgaacgtgcgtgttagtggttttaattattcgtttaagcagacagaatggactgcaatatgtaagggaccttatgtgttattctaattcaacaccttttttatgtttaaggttcaccatcgaattgactaggaatacaaggaaattggatagaatgaactaagaaccacacgtacaaagattgtcttattctgagatttaatttagattaacttgacaaaaattatgtaaacttaaatcactaaaacccagcttttgagcactcccacatgtttctctaccttttattttgtttaaaatggcgaataatttttgggaggaagagtgctattgttaacctcctattataactttttagtcaatctctatgctcaaaaacacatgtcgaaatgttttttttttttaattttatacttacaacattatcactgtaaatttttaaaaaaattcaaatagtttacagtgccgaaaatacgtttgaagttttttgaatacgcgtggtaagctagaatatctgtaactctgttttcgatgatactgtaactataacgaatatcgctatgaaaaaaaatattccggcatataatttcgaacgtggagattgactaagaggttgtaataggaggttgtaattagcactcttcttttgggagtttataacttaaaaactgctttcatttatttaaaacataaaaatcaattttaaaaataaaaaaggagtggtgatttgtgcctgataatatttttaaaatctttccaatcaggaagcaatttgttaataacaacagcaatttggaattattcatctaaagagataccttcagaaattattttgtgagcaatttcctgaagttcatgagactgagcatccactaacttatcgttagtcatctagaatttgaggtagcggctgacaacgtacttcttagttcctcctccttagtgtcgtgtttcttttaaagtgcgtcccagatttccttggcagttttgtcagaattatagtagtcatacaaatcgtgagataaactattgagaatataatttttgcacagaaaattattctcgactcaacttgctaaatcagcagtttacttctgctttttatcatccttagcagtatcacaaacaacaagtttatcagtcgtcagaacatgagcaacatttttcatagtgaggaaaaataacattttctgttaatatcttttaaaatggtttctctcaaaacgaaaaggtttgtttatatcaataacaccaaaattctcatcactagtcatggcagaaacacatcatcttaaaattattgaaaatagttgctataaaaaataaaaggaatgaatttactgaattaaaatctgggttgagtcgcggactaggtcgctctctttaagacattcgcggcactacccagatatgtgcaagcagactatcagcctcgtcgttagaaggataaaacagctcagtcgaacacattgtatcggagatctattgcacgataaagaattatcgaaataccacacctaaaagaccttactactgctcgaaatatatatatgtaatattatcatgtgtatatattgtatatgtttttcagtgaaaaaaagagatatgtttatcctgttggttcagatatattatataggcaatgcacgtaaggtagtaacgggaagaaaaatgttactaaagggaatcttagaacgtgggatagtgtgagattaggggaacgatgctaacaattaaggagtctctatttaccaattaattaaacatgtttaaaaaaaaaactgttttaagtaattaaataaataagaataatttaatcaataaattttctctaaaaaataaagtgacactacacccgcctgccagctcggtatggtcggttggatgacggtagcggcgtgcgcgtgtgagtactcacccatgcgcataaaactgggtacccttggggccccaacccaagttccaaacttgcacattatatatacttctagtgaagtgtttctatcccatgtgagactctattcactcacacatttcacttttcaattttataaaatttcacaaagttccaacagggtgtggtcaagagagaaactggcggccaagaggaaaagagaaaagggaacgagaaaagaaatggaaaaattttatgagaggggtatttttaaaatgaagggaaagatgggcatcaatttattatgatgttcaacttaaggacaacttttttaattttggtccccttttagtataaaaaatcaaatatgtacccgcaggtgctacattggatttcaatcaaattttggatgaatccataatgattagctgtctccattttttatcttccaaatcattttcgcaggagatttgaacttttttttttctaaactttcggtaaaaagatttattttcttcgtaaaataagaagtagaaccaataaatatttctttttcgattcatccctaaagttgaatagctcattcaagaattattttttaatcaatctgtaaaaattcttatgatatactaagatttaatttaattattgatagtgtgaatagatctatcatttctctcttctaattcaaatcatattcaaaatcaaggtgtaatgtgtatcctcttgttggaataaatgaactaaataaaaaatgttcaagaataaaattttattggaactatccatatgcaattcatccaacatgaaataagatgaattgagatggtatttttaaaaatatactaagctttcatatatataattatatatagggattattttataagtacacaaaaataacaaaaaaaaattacaaaaatacaattgtacgaaattttagatatttttacgatttttatgattttatttatagaaaatgcggtttttttgtgttgtaattttgtta

SEQ ID NO: 43617 - DNA, 2384 bp, Cannabis sativa
  modified_base (69)..(73): a, c, t, g, unknown or other
gattggattggatccaaaaaatgaaatccgcacttagtgcggattgaatgttgtttgaccaaaaaagtnnnnnttggatcggatgaacaaccctacacaaaatacataagtttgaggagagagaaagtatcgactccatcttctccgaccacggccgcgtttgatcgagggagcagggtggatttcaactgagatttctgagttctgatgaacgggtttaagatctgagtagaagccattgttgatgaaaatgagacgatgggtattgtcgaccactacaagaagccatggttcgcaccttgaagaacccgggtaaaaagttcaagtactattctagatacaaggtttgaatattttttctttttttgtccactcttttcttttggttttgagttatgtaatttaagtattaatcttcccctttccctctttctccttaattgatgaatgggtaaaaaaaattctccttaattttggtattactgaatctcacaattattaagacgttttttattttgtaatttttccacaaggttgtgggtgggtgaactttgagatattttaccccaaatcaccaacgaatctcacaaatatttcaaacaaaacccataaattatttttgcaattcttaccataagcaggggatcaccaccatcttccctaaaaaaaatcatgatctattccaacacccttgaaactggaaaactccagtcgaaatgctcaaagcccccacgatcgatcgcttgccgtgctcggagaagaaggtgttgtgactttatcttgggtttctttttgagatattttaaattttaaggtttgaaatatgtttatattatctttttcctatcatattacatattagttattctgtaaattttttaattttatataatttaattgttaggtttatataaattaatattgtattattgagtttttttttttttttttgataataattgtattattttaatttttgttttaaatttttttctttatttattaaaacaaattgagtaaactgatactcattaggtggcaataaagtataaggatgtggccttattttaaatgatgtgtcttaccatctggcactcagcgtgtcagaaaacgggaaggtacttatgaaacttctaaatgtgtcacagaaggtatttttacggccaaaattttaacttaagcattaaactacaactagataataaacttagatttttacgctgcaaattactctgattttataattaaaactattaaaacatgaaaaataaagattatatattaatttatttgatataaaaatttaagtatttataagtaagtatttaaattcgaatgatgttaataatttgtttatataattctgtttaaaagtcatattaatataactaaagttttgaaatatatataatttagtaattgtaaaaaaaagtaaaatataaatttaagctcggatataaaaatagattgtcctatttaagaagtacgaactggcacgagcaaagcatgccacgaaacttatatgacatgaaatattgaacttacgaagcgtgtcatacttattctttaaaaagtttagcactacatgtcacgatccatattttattgtacgcacatgacacaatctgttttttaaaaaaatacaaataaatatgactggggcaaatgcacgaactcaaagcactatccaaaactagccaaatgaataaattatgagagaaataaacggtatgaagaagaataaactttgattgatttattttttatttggtcactattaataatatagaaataataattttgctagaatgcatcttctttttctttttctttttctttttcttttattattagtttttatttgttttaacactggtatgcatatatatttctactttctttagaaaatagaaaaagttctcaattatagaatatatgtttatatatttttttaagaaacgcaaataaatatagaatatgtgtttgtttatttttatttttataaataagaagttcaattggcttttaaaaaaaaacaaaaacaaaaacagacaaattgtacaatataatgataagtcttttttaaataataataataataatttaatagtcaaaagtattgtaattttcaactcaacagcatcactgaaatatattaaatgttttaaacgctctcgttttagtcatctcgcgttgactagctgtagctgatattagaaatattttaagcattcaataattatttaaaggatttaaaagcaagaacataaaaggtttgggaccaatatgcaatatactaaaagaacgaaaacacaaaaaactgcgttcttataaatattatagtattgtcttttgtaactcttattgcttcatcccaaagttaa

SEQ ID NO: 43618 - DNA, 2422 bp, Cannabis sativa
  modified_base (2293)..(2308): a, c, t, g, unknown or other
tcaaaccttttactctttcaatcaatgggaaccactcagagccgcgatggccatatctcagactcagatgattacgaagaagtagatgatcgcgacgaagaagacgaagaagaagaagaagaagaagaacattacgacgatgctctggctgaccaccaacccaaatcccattcttttaccactcctaaatccagaaccgcctccgcttcagactccattaacgatctagatgccaagcttaatgcccttaagctcaagtactcttctgcttctccatcttctacttcttctcagaaccctaattcgaaaaacgctgttaaactctacctccatattggcgggaatactcccaaggccaagtggatcatctccgagaagtttacgtcttatgatttcttcaagatgtccgatggtgatcgtgatgatgaggatgaggaagaggatttcggtgagggatactggtttctcaaggttgggactaaggttcgatctaaggttgcgaccgatatgcaattgaagatgtttggtgaccagaggaggattgattttgtatctaagggtgtttgggcgttgaaattctacactgatgagcagtaccggcggtttgtgacggaatttcaggattgtttgtttgagaatgtgtacgggctcgaggcgacggaagagaacaaggttaagatctatgggaaagagtttatggggtgggttaagcccgaggtggcggacgattcgatgtgggaggatacagatgatgagctgcaaaagatctctagtccggcgacgcctgcacggtccaatcaagacttgttggaagagttcgaggaggcctccaatggaggggttcagagcttgaccctgggtgctttggataatagtttcttggtgagtgataatggtgttcaagtttataggaatctcaggcatggtattcatgggaaaggaatctgtgtaaaattcgatagcgggaattcgcgtggaggttcttccagtttgggtttggggcaatcgactccgaataaggcccttctcatgagagcggagactaatatgcttctcatgagtccattcaaggaagggaaacctcacaccacagggcttcaacagcttgatatcgaatcagggaagattgtcaccgactggaagtttgaaaaggatggtaccgaaattacaatgagggatatcactaatgatactaaagggtcacaattggatccttcagaatcgacatttttggggttggatgataacaggctttgtcaatgggatatgcgtgatcgcaaaggaattgttcagaacattgcgtcttcgaattctcctgttctgcattggagccaagggcatcagttctcacgtgggacgaattttcagtgctttgccaccaccggagatgggtctattgttgttgggtctcttgatgggaagatacgtttgtattcgaagacctcaatgcggcaagcaaagactgcttttcctgggcttggttctcccattactaatgttgatgtaacttatgatgggaagtggatcttgggaaccactgatacttatttggttcttatatgtactctcttcactgacaaggatggaaagacaaagactggatttaatggtcggatggggaacaggataccggctcccagattgctgaagctgactcctctggattcacatttggctggctcagacaataaatttcatggaggtcatttctcttgggtaagcatactatcctttgtctcaataactacatagtttttttttttatttgtagctgctttctttattttcagctttctcggtcatttcattatgtttctaatgagagtttcttgctgtggttattttattaagaacttgcctaaattcatcaccatatgtatttccttagcattatgaaaactatttgttccagtagcgtttaactaaatactcagtagcatagtttagttatatcctaagttgcttgagaaattcaccttgcttacaatgatgatgtctccctatccattgaaactatttccatagctccacatcagtctctttagacctcataaaataaaatggacttttcatgcattgggaatgctctttacttctcgaaatacaatttcttcttggagccctaaatgtggccaggatggtggaggtgatttccctttagggaacagctcaaataagcgtttataagaggattctaggcacaaaagtgaccatgttgaactaaagattgagcattgtacatcaaccactttctcttctttctctctcccctctctttctctctctctctctnnnnnnnnnnnnnnnncacacacacacacacacactctttgaagttgataattgatgcatttcacgtttatagcttccacatccttgtttgtttttagcatggatgatgttgatgaattgtaactgtgga

SEQ ID NO: 43619 - DNA, 2889 bp, Cannabis sativa
ccaccaaaaataaagataagggggttaagtgtataaaaatcaaaacataagggggtttcgccgcaaattgctctaaaattaatatctattatatatagcgcagctagaaaattttccaagtgtcaaattttagtggagtgtttgaagaattgtttgaaagtgaagtcagcattgctctttatatgattttatacttttaaaataaataaccaaaagatattttttaacaatagtcaatgtgcaactttgaccatactcgatattacatatttgctatagattaagtgtttaaataaataaatataaggtggttggtttgtgctaaattttttatttatttatttattcatttttcaattctcctcccctatcaaaaatcaaaaacaaggagagcaaagtgttgatgataaacccaaaatgacattctttgatagccatataaaccacttctctctcacacacactattgttcttcttttcatttcagtaatcaaattaattgatgaaaatataaaaataacaaacattttatttttttaaaaaagaaaaaataaaaactccatacaaacaatcatttcatatcaaaagtcataccctgggctactttctcaaaagcgggcctcgaagaaatatcgtcccaccaggccttaacatgggcccgatcattaataagtgaagcccaaggggttttcatgaaatagaaagtgtaaggcaagtgatgaagatcaggtaaggtatagaaatccccagctaaatatttggtctcactcaacttagcctcataaatgtctagaaccttccctaacttgtctagattttcatcaataatcttctgatctggttctttcccttgaagtggggccacaaaatgttgaaacacaattgaagatatcaaagggtcgtattgatgagactccacttctctccacactttcacaatagctgattcgttcaagttttcagaccttaaaagatcatgccccgagtctttgaacttctctgccaaatattcatttattgctctagattctgacaaaaaaaaatccattttcaagagcaattaagacataaataaataaataaatatttgaaggatttttttgtatttttttcatttttatacctcaaaataggttttttttttttgtatttttacggaattctacataaaaactctgttacaactggcgctgcaacttaaattgcaacaaaaaatcgtataaaaacccacataaaaatcaccggagaaccactttaagaacccaagctgtaaatttgaagaaaaaaaataattccccttttttctatacgtaccaaaaagtgtgaggtcaccatcttctaggactggaacctgaccgaagggctatacatttaaagcaagaagagaaaatgtgagtgaattaatactacataacaataaatatagtgaaggaaaatgatgaacattgattaataaatggtggtaattattaattaagaaaattatacgttcttagcaaggaagggaggttgcttatttccttgggcgaaaaggtcaactgggataagctcgaaatctagagctttttcatggagacatatcattactcgagtggtgcatgatgacatggggagaccatgcagcttcagcgccattttctctttcaaagatgaaaatactagctatatatagagagaaagagagagctgtatatatgttgatattacacatataacagaaggaccttatatataagatttgtttatagtaattaggacttaggttgtgggaacttattctcaagcatttgtctaataataatttttttttatcaataacaacttgaattaatttaaagtaattaaaagctcagtatccaataaataaataagtccgtgaattgaatggtcatacttacatatgattcttctttgttcaaatttatcttcttttttttcttctctttcatctcccaggccacgtgaattcagaaattacagctaaatttatctacttgtttttacttaatttttcacaccattgatttaagtctagtctttatgctaaaaattgctaaaatggcacaattaatagcatcttttaatgtttctcaactctcaagcccctgaaataataataataacaaagattaattgatggcatagatgagcgtaattacctaccacatgggcaatgaagcccaaattgtttagtaaagtacaaataacctgatatgatccagtcaaaccacaattttccagtgcactgatttcaaagtgtttgagaatcaccttgagatttggtctatggttaatttaccatggacacagaattttatgtaagaaaagactgtcaatcttactagagtaaatttgtaattagaatctacattaattttcaacaaaaccaaaaagactattaatatttacaaccactctaatatttgacggtcaacgacattttctaataagttgtaattacagtctaacaaaatagtgtgattaattgggtttcgagtcctttttttagaaaaaaattaaaggcatttaatatgaatcaattagaaagtacttttgttttatttattttttattatttcactgattttcttaatttttaataattaaaacgaagcaattaccaagaggaaaagagctgtatataggaatactcactcagccttactattttctgattgcatagggttgtgtacatacagatcatcatctgccgagtattctgaccatataaattgccaatttgtgcatccaacgatgaagacaaaagtagcttgtgttttataagtatttcgttatgtatataatgatgatagaagttgtaagtccaatatatccgatcctattcaggatttcgagaagaaaaataatcacttatttagatatgaagaa

SEQ ID NO: 43620 - DNA, 3255 bp, Cannabis sativa
tgacaattgtacctagtcttgacaattttactattgttgatagtctgatgcagattggtaggagagaatgagatgtggaggttgttcaagacttgtttatagagagagatcaagagttgattcttggtattcctcttagtgatttggttgcaatggactgctggttttggtctttggagaacacgggtttatactttgttaagagtgcgtataactttttacaaatattgtttctacaccaaattcattttgttggagcaagctatggaagttgaatcttccacccaaaattcaccacttcttgtggaaggcgttaacaggctgcctccccacacgcactcaacttaaacaaaaacatttgccagtggaaatcaattgtgtgttttgtgatgttgctgagaaatccatctcctatgtgttcgttaatttcactttcacaatgtcttgttggaacctcactggtgtggcttctcataatctccgtacagctgagttctcaagttggtttgctggtttggtggacactcaacccgtatctgttgttgaagatcctgctgcaactgcttgggcagtttggaaggggagaaataatttgttatggcaattcaagtccaactttgctgctgccaccgtctatgttgctaagtcagtgctccagcaatgaaaacatgcccgtgaacgatgctttgatcctctttgggtaccctttggcccagccaatggtgttgtgatttggtataaaccagcaactgattttattaaaataaatgtagacggtgcgctatttgttgttgagggtgcttttggtggtggtgctcttgcccttgacagtgatggtcacatccttgaaggtttcgctctgcataggatcggttctcctcaaccggttcttgctaaaattatgtgtatcaaggaggccttaagttgggcgacgattaagcattggatcaatgttattgtggagacgaataaattcaatccaggcacttaatggttcagttgaaatgccatctccatttggtttaattgtcgaggattgcaagctcttattaaactctcttgttaatgttatatatttttttattccaagatctgcgaatagagctgcccgtttcattgctcacaactctcattctttgtcaggttgtcagattattgctagtaatacttcgacattactgcttgacattattttggcggatttagtttgaataaagattattcaaaaaaaaaaaaaaataaatacaaaacattgtattttacaccttttcgtcactacttctattaggtgtgaaatattgtacacgtgtgaggcccttattaaatcccatttttttgtttgttaaatattttgtaaaaataaaaaacttaaaacttaatattcataatatatctctaatcaattaaaattaatattcctaaaataaatttaataaattaaaaaaagggaaacttaaacccagtcgattcattctctcccaatcgtagcaccttcatcttctctacaaatctgaactcaaaaaaatgaaaagaaaaaagtagtcctataaaactaaaccagacagagacgaggaccaacccatcgatgaggagagagatgaggttgacgatgaagcagacaaagcgacaactaactcaccaacgaacctgatgaagacaaacatgaaacacactgacgtggaggaagaagaagtagatcgacaatgggagatgcttcctcttcatttcgtgtaagcactcaaagaaatttgtgaagatttaagaatcaaaaactaaatataataatatatgataattagtaactacaaatctaaactaaaactattataactaattaattatgcacatatacagtgcatttgcattgctgaatttgcaaatgtttatatatggatgcaacctgttcatgcgaagaagacaatgatcaattataactaattagttgtgcatgtgggtgtgcaagacgatggtttgacgagtgtgatcccacacatttggctaacatgggcaagtatgtgtcttcaatagtggttgctagagctagttacacttattcaaggtagcctcactatgatcccttatggttttcaatagtcttggtcactcatgtggtggctacaatctatcagctctactgggattttgttaaggacttaggtcttcttaactctaaatcaagaaattcttggcttagagatgatctaattctcaaaaacgaatgcacctgttaggtttccatggtaactaattaatttctccctctcattttcctcctaattatacatatgaaaagaaaacaagttataacagtaatatgaagcatgggttgaaagcttttttgagagtagcatgggtgaaaacaatgacgaggtatcaaattggagctgttgagtcaaaattagtaaattttcttttggcttcattacaagttattcgtagtggccattggaacttttacaggtaaatttctcccacgggaataggccttgcagggacctactcctaatgaggcagggatttcctgtctaaatggggaacgataattactttttgtccctgaatattaaatgggatggggattacttttagtgtcgttatgatatccgttttgagtattttcttttagtaaagtttttaatattatcatagattttattattaaatctattagtactaaactagtttataaaattacacacgtgacgtccctagatattagggcattacagaagaactcgagaaaggctgaggatttagagagtgaattcaaatatcgtacgacagtcttaaagaacttctgccgaggaaggttggtcaaggtgcacatgcctagtttgaagggaacaagctttattaatgagcactttgatctctgcttgaagatccaggtgttccaatggagtcaaagattcaatgagtacgactaggggcgatgctcctgggtattctcgtgcacggactgaaagaagaagatgaagacactcattgaaatagtgtttcattcaccagaataaaattccaactcagaataaaatttgggcaaaagtgttaaatggaaattttttactttatttatacaacaaagacagtgattcgcgtgacctcagatcaatggctaaaattgtatctaagaaaacacagttacatccaacaatacgaatgcaacaccctaatactaaggcacgctacagtgctttttcaattacagtgaaatctttgctaatcaaagaatttttctcaaaaatcgtgtcaaat

SEQ ID NO: 43621 - DNA, 2274 bp, Cannabis sativa
attagtgtaatttaatattaggttcttattttaatgtaataaaaatgataaaagaatcacttactattgattataagaccacataataaaggtgcttgtgccggttgcaacgctctagctaatattaatgcatatatatgtttttaattaacactccgccgccggctcacatgcttttaagtaacattttatttatttttttccgttttatttgggttggaaatggaaacacaatccattgaattagccatgtcatacatcatcaatcttcccatacctccccaccgtaggatcagctgacttctgaccatgcaaacggtccaagaacaattcaacggtctcgacacaatatccactacatactgcatatatatacgtaaacactagtacaataacttatccaaatctgtattattaccacaagaagacatgggcattcatgacaattcaacctattagattaaaaaagtcaagccaaatctttgatatatatatatgtgtataaataggcaacactcttcacacacacacagaaaaaaaataaaaaacaatgggtaagcttagcatattggtattggctttggttttagtagtggtggccatcggtggagcaagggctgagcaatgcggacgccaagcgggcggcgttaaatgcccgaacgggctgtgctgcagccagtacgggtggtgtggcaacaccttcgattactgttcaccccaagctgggtgccagagcaattgttggggtggcccagcaccaccgagcggtgaaactgttgtaagagcaacataccatttctacaatccagcagagaacaactgggacttaatggctgttagtgctttttgctccacttgggatgccaataagcctttctcatggcgcagcaaatatggctggactgccttttgtggaccatccggacctaggggccgtgactcttgtggaaagtgtttgagggtatgactatgtatatatgtataaatgatctatgatctacgatcctttttcccttttttatttttgttgtgtaattatgtttgatttggtgtatttgaatgtttttgcagctaaggaatgtgggaactggggcaaccataacagcaagaattgtggatcagtgcagcaatggaggcttagatttggactttaacactatattcaagcctttagatactgatggaagaggatttcaacagggttctatgcaagtgggttacacatttgtcgactgtggtaatgagcttagtgaagatgagcaccagcaccctctgagctccattattgaggagaaaactcaaggagtgtaattataaagctgttatggcttagttaagcttaagattatgatttgaataaaacttttggaagtttgttccaaaaggtatatccataccacgtgtgatgtgaattgttcttcttgagaacatagatttgtgtcatgttgtattcttcgatctgttatatccaatatatttacaggggattatcatggctcagtttgtgggtataaattatgctatattaatgtccaattcagtatacaatgcataagatctcttgtttattttcttttgaccagaaaagaagaaaagaagagaaaaaagatctcttgtttttgtcgtatgtgaataaattacaaatccttgtattttaaatcaacatcttgatcgtttctaagtcaaataaggtatatacatatataaaatattttattcaagaattaagcattatctaaataagcaaggaaggatcaattattagttgcgtaaagactagcgcaacaaggtagacgacttaataagaaatgctttccaatggtagttacctacgtggccttattttatggaaaacaggtttgaaatattaattaaataaataaattagttttgtccacattgccctaattaacatttatgtgtagccgccgcctcacatctgagtgacagtcaaagcaagtagccgccatacgtcattggtgtgatcaactcatgtatttgctgtagctccccctacccttcaataatgaaatttcttattttaatattctcagtattgttatttaattaaacagagaataataaaattagtattgaaaacaatttttctgtaattacaaaaaacaatttttgtaactctagaagaaattaaaaaaataaacagtacagaaaaataaaaaacacacaagatttttgtacgtggtttcaacaatcatttcagattgttactagtccactagactccctcttattatatgccgcaagcttgatgta

SEQ ID NO: 43622 - DNA, 2612 bp, Cannabis sativa
atgctagttagggtgttacataaccctagaccatataatcgctcactttagggtaataaccctaatcctagttttatttaattaatcacaactataatattcaacatgagttccaccgcacttaactctacgtgctaactactgtcttacccgttgtcccgagtacgtggagattccaaatccctgggtgctcctgactaagtgccagtattcctagtcacaatttctgagattcataaatagggttaatccctaaatctattttcacataattataaaattggcattcaaatccagataaacatatagagctcggaacaagctttccaacaatactcagaacacccaaaacagagtctgaatcacaaagttacgaatattcaaataactcattcaaaactgcccaaaaacacaaggcgggccgcgacactccccacatggggcctcggcacttgggttgaaaactcaggattttaaagggggtgggccgcggtgcccaaagagtggggccgcggcgcttgggttccaaacccaggaaaccccgatttctaacttcgaattcaggctacaaaacacaccaattcacagcaaacaagcctaaactcaaaaaattagcttccacaaattaaatccatcaaacagagagtatagacactagatttaagctttaattcacaacaaaaataatcatctaaaaatcatatttaaacacactcaaagcaagctcaaactggagctaaaattcaacataagttccattcaaatgcttgaactacaaaaccatatctttatgcttgaacacaaccatcaacagggccaatactcagaatccaaccacaaactcaaaccctagaatctcatctaaaacatatcaagaacaatataacaactcaacaacttaatcatacattgaacaccacacttcatccaatttccacccacatgcatacatgaacaaaatcacaagtaaaacatatttcttcaacttaatttcggaaacaaaattcaaattaaagtggtagaaaagactacctcaagttccttataatctcaagcaccaaaatctccacaacacaagcttgattcaagattcaattcacaaatattaaaaatttaaagagataagaataaagagagatagaagggtcggttaagggctggaaaaaaccagaaaaaatacattttaatttcagtcaaaattcatttttgttgaaacataaacaaatagtcaaaaagaccaaaatgcccctaggccataacatagcatatgcacaattcaagggcaattaagtcatttaatcacacaccccatttaaataatttttaaaattattcaataaattataaaatgccaacataaaatcctaaaaatgtatttcagcctcgaacccggttcggcccgaaatactcgattatgactatatcgcgctgacttgtcagaaaacacctgcagaaggacaaaacaagtatactatataatattatgggagattatattcacacccctaaaaattttaaatacaccccatttctaaatttagcccattaaatattattttttataaacacaccccattttatttaccaaaagggtattgtcaatattttttttttcagaaataaaaataaaaaaatctctcaaagaagggaagaaatccctcaaagaacgggacacttcatcctcttcattcgccatcgtttcttctctccctgagccaagacctcgcaccagtttgccggtccaccagcccttctctctactccgccatccctaaccattgctgcctgcgatttatctgagatgaagttgagtttcagtcatcttctttgcgcggttggtgttgacgaatggctcataacaacatcttatttaccgtccatcgccatcgccgctagcttggtgatttttccgtccaatcatcataaaatggctttctactccatttttggttagttatcaatatttttatatatatatatataatatatgtatttaggttgagtttgttcgttctttgaattttttacttattgttatttttttttctctttccacatatttatatatgtgatttagtttttagagttgtttgtgataaaatgtgtgtactaaaggtggtttgagtttgtgtacctataaagtatttgatataattcctcaatgacttgataaagtattattaataattgcagtttaagagctaataatttgcctcttgcttttatggttcattttgtttcaaatttaattatctgtttttacagaacaatgggagactcattttgctttggataaaataagtattaatcaaattaagttcatatgtctattttgatgttttctatgtgtgattattctttagagcattctagtaatgattttgtacttatcatcgccagtggcccagctgatgatgacataagattttttgtggaaaactcagaataagatgatttggttgatagacctatgtataaactgctattgaaagaggaaaaggcccctgagatgaatgtaaattcagtgtaatggagtattggagtaagaatttttcagaaatactttatttatctggaaataagggtattttttttatatataatttgaatct

SEQ ID NO: 43623 - DNA, 973 bp, Cannabis sativa
cccaaaaattttaagctaataagggaaaacggccaaccaggtttataaacgctaaggataagctcaagaatcaaaatcgcaatcttgatgaataaataaataaacaaaaaatgaaaggtctgtaaacgaggacattgagtacctactcggaccttgaatcttgaaggtctttcctacagtagccgcaagcatgcaatttgaacagtaggcttctcctgcagaatgattaacatagaaaaaccaagccaaaatttagagcgagagagagtacaagaacattaagaacccaaacatgtagggtggtgaatcgaaagggcatatttcctaaaatcgaaaattcatttcgactgagacccaaatatgtacatatataaaatagagatacagggggagagagagagattaatgaatgaaaatggtggaagaagtctgtacaggaatggcgaagccaagaggagggagcgcggaagcaaagatggtgtcagtgtggaacactctgtacttgaaaagaaagaagttgtcagagtttaagggagccttagcgcggaagtctgaacgtcatgcacgttcaaattttgagaggaatttattttcaaggaatggcaaacgggtcgggtaatgccacttatccgacccgttagcacccttgaattgaattgggcccaaatattttgaaaaattattataaacaaaaattaatatacgtaaatgtctacttttttaaaaaattaagaaaatgatcaaatctaataaattaaggcctgttcggcaatcattttacttttagtttttttaaattttacttaacaaaatcttgtagtttctttatagtttttaattaattaatcaaaatattaattttttaatgattaccgaacaacatcttagttaataaaaattataaaaatagatttatcacatatttttttaaaaaaaaaatatatataataacaaaattaagttacataatttt

SEQ ID NO: 43624 - DNA, 4829 bp, Cannabis sativa
aaaaaaaaataacatttaaacaacataaaaaaatatatcatacaaacaacaaaaaatcaataataaattaacacaatcacaacatgaaatatttcttttaaataaaatggtttaaagttttgtaactaattatgtattgaaggatcgatgtgaacaccacatgattaatggttgcgaaaatcatattttattaaaattgtagtcaaacaaatattataaatcttacccataacttcagttacaactaattacaacttgcatacatacataagtgtcaccaatatatagttatatacacacacaatatccgcatttattgatttaaaatcatataatacattccatgtgaattgtgtattactttaattatatatatacatatgtcacttaattaattttacgtcaaaaaacgtgtcaatatcgtttgatctcattatatattttccccatgatctcactacaactacaatatgtatatatatatatactactatatatagacacaagaatggtgattggtgaaaatgtcaagatctaaatgagcagagagtattataataatagtgattgaagatgatgatgaggatggtgattttggtgatgggtttattattatggggatctgcaagccaattaggattaatagtaatggctcatattcctccggcattgtatgtgtttggagattcattattggatagtggtaataacaattttttgcttactcttgccaaagccaattaccttccttatggttttaatttccaagatggtcctaccggaaggtacaccaatggcagaacagtcgccgattacataggtatttatatctatatataaatatatatatatattaatttgtaaatagtaatttattttgttttctgatgatatatattattaattataattgtagctgaaaatcttaagttaccatatgctcctccatatctaagtataagagaatcgacctcccttactggattgaattatgcatctggctcttgtgggattcttccagaaactggcactcaatttgtaagatttatatacatatatatatatatatataatatattatcataataaatactagcttgcttctagttaattccatattccatcatacatgcatatttttgtgttcatattttaagtataatgaggattatattgacgcattttcataaaattaagtattgataattaagcaaattactaattaaggatatttatgcctagatgcacatactattatgcatcaatacatatattttagtatgttaattaaacgtgattattagtctcacactcacgtaatatatatcaacacaatttgatcaggctttaattgttctaaaagaaaatttggagttgaatatgaaagagtcattaatataatactgaaacctgaaatgattaattaattaataaattaatgaataagtaatcatgttttacatgtaataataatcctataaatatatattgatgatttttgcagggggaatgcttgaatctgaaccaacagatgggtttgtttgaaatcacaataaatacagagttgaaaaaaaaattcagtaataatgaattttccaactacctctcaaaatctatatttatattctccattggcaacaatgattacataaacaattatcttaccgatcccaccaagcgtattaaatattctcctcaaacatttgcacaacttcttatcaattcactcgctcaacaacttgaggtaataataataactctctctacatattaatattaatatataatataattaattaattaatttacagagattatataaattgggaggtcgaaaggtaatagtgttcgaactgggtcccattggttgcatcccatcaataacaaggaaaagaaagatgcagagcaacaaatgtgtggaagagatcaataaaatggttcaaatattcaaccaaaggcttggtgtaatgcttcaaaatctaacttcatctctcaaagcctcacatttcattcttggtcgtgttcatgcgctaggctacgacgcaatcaaaaatcctaaaaattatggtaaaaattatttaattatatctagctattataagttaaggatataattaataagttgaatttaattatttataattgttttattattaggattggtggatacaagcagtggatgttgtaagagtttgttgaatgggacatcagggtgcattcctttgcaacagccgtgcaaagaaagtacaagtcattatttctgggatgcttttcatcttactgagactgtttgttcactcatagctaatggttgttttactgactcatctatatgctctcccactattaaccaacttgtacaaatttaataatttgaatatatacagggacacgattttgtcctgtgatatactttcatagaatgtattttgtcgtacattagatgagtctcaggatacattagatgagtctcagggtacgttactattttttaaccctaattacccctagatctctagcactcagatcaaataactctcccatctaacggttgccgtacatcacaaaatacattctatgaaatgtacattatgagacaaaatcgtgtccctatatatataatagctagctaggtttgaatttaattatttaaattcaaaatatggatgatgtggccaatattatcatgattggttaaacaagatggtgctttacatggagaactttctgcaagtatttgatcactgttatctgtctgaattgccattcaaaggagatccatacatgtgttggctaagttattttacacatataatattgaggttcaaatccattccaacaaaagtatttttattttttaatatttaaactttatttttttttaacttctatcaataaaatttgtagtcagtaccttaattattgaacctaacttatttatcttatttttttcactttcaactaaatttagatgtcacaaacttattatgataattaagcccaattttaaactatataaaatgtgtttaattaaaaacttaatacttaatataaataattattcatttattcaaaagggtaattgtcggtaataaaactacctgaattttatattgtttaacatttaaccataaaaactaaaattttagtgacaaaactacccaaatcccctttctgttagctatttattttttctgtctaaaagacatgtcacaatgtacacatgataaaattttagtaaaccacgtaattttaattattgtaataagttaaagtatgatgttcctacccttaatacgttaatgatatgatgatatttgtatgaaactaaataattgtgaatttaaaacatttatatatttatgatgcattgaatactaatatgtgttaagtatttttttattggcattttagctcaccccttacttccctctacaggtattagataggaaagtgctagtatgtaagcaaagttaattctgatatgtacactgtcaagtatagacaaacgatctaaaatatcggtagtgtcttaattttattttagcagttaataattctacacataatatttaaaatcacacacttactatatatacatatatttttaaaaataaagaatcattccatgtcttatttagatttctagttaaaatttactgttgtatttcaaatagttttgaatcgtttaaagttatgtattaaaagagtatttttgtaataaagcgattcatattaatgcaacaccttggtgcattattcctttcaaaaaaagtgaaaaagacagaagtattcactatttttgggatgtttttaattaatctcactgagactactgtttgtacttcaaccgtatcaactctatgttttcataactcatccattcattaaacaccttttacgattataactaataatatataatataatgaatttatctttattattattatcatatttataatatatatatataggacatgattgaaatgttgaataatgattatttttttttattgagctctttcaaagaggtaaaaggtcaataaatttattagtggttttaattaccttctaaaagaaaggtgaaaggttattagagctaatagtagtatatatgccaatacgagagataataatattaaagaaaagcatcatattattaatagcaaaaaaaaaaaaaggaaaagctcaaaggttattagaacaagtaatagatatatagtatatatgccaatatatgagagagagatagcaatatagaagaaaaacatcatattaattattatagcgaaaaaaagaaagaaaaaaaaaacaacaaaaaagcttatgaagtagagacttaatgtatacatgtgtttaattatactactttttatctaacctatgtcattgagaatatataagaaacattaagaacaaaaacagtgctagctagcacctctaagctaattaataatttataagttcacaaaaaagaaaaaaaaaataaaggaaaagaaacaaaacccattattatacatatcctatatatggtgatataaatatgtatagatataggttacttaagggggagactatacttgatatttattaattatgattcccttgtatattcacctatatatatatatttatatatatatttggtttggcaaaattgtgagtctacctaatataatcaatgaaaatgtgagtcaatgggatggctcatgattgttaatgggtggcttgcgacgacccattcccttgtaatctttatgcattagactcactatctctttggctgcctcaataagccttcttgtttcatctgttgcttcctgtga

SEQ ID NO: 43625 - DNA, 1434 bp, Cannabis sativa
tttcttttttttttttggcgggggggttctttttcccatggattcatatgggaagctctccaacaacatcttttattgcatgtatattactaataaaagttctatctatgtggagtagattggagtaggtgtagctgttgtggtttttggcttggtatttgctcttggggactttcttccaacgggaaggtatgcaatggtcaattaaactcacacatgcacacatacaaacacactatattttaatatacataaatatataatattttcaataagtaaatgttacaaataagaattgtaaatcgttcaccttttcatttatttcatttcagaggtcctgcattcttatgtaccaatttatttgccagtctttagtttacattccttttaaacagagttgtcaaaaactcttgtaattgtgtaatgctatttggttgtagaaacttctatttacatgaaattggtctcaatttccaatttctgtcatatagattatacttttgtcctttaatcaggctggaaggtaatcgatattgataaccattaatacaatttttgattagatcgaattactttagcattgtcaaagaaaaatatgtatactacatttattcaatcctgatttgtttgtcatatgtttgttttgcattactttattgcttacttttctgagaagtgattgcatttgatatggtctacaagttttcagtgttggtcctgaggatgctgcagttgttggtaatcaactgtcagaagaagagaaaactactcttcaggtaatattcatattagtaggtgcgtgcttttcttcaaagctagaagtgccttggatcaatcagcatggtctgcctagacattagacatgatcacagtactcagtattgaaacagttcaaaatctaaaaaagaaaactttttgtgctctattgtgaaacattacatactatttaagagtaatagaaatttcctttgcttctcaattattagagagaatgggtttttcaaacaacaatttatggtccttaggatagcagacttcgagagttacgaactacaatatagaaccattactttgtggtgccttccctctttggaaggaatgttgatagaataaaagctaaataacttgttgcacatccatttaaaggaaacctgataagtgagaatttaatgactgaccttttgctagtagaaaaaataattgcagctaatatatatttttttctctctattatttttaattcgaataacttgtggagtaagttaaataacttgggagccatttaaatatattggtagtaggttgagaaagttggagtgaacataaaaataaactgaatgacattgtgtggatttaaattagaaagagtcactctatcattgattaatttaacatcactggtcatttataagactgaaaatattccattgtact

SEQ ID NO: 43626 - DNA, 4011 bp, Cannabis sativa
tttttttttttttttacattttagcaccctttagcttgatttctttctagtttggtcctgaatgtatgaatgtgacatagtttctaattaaaattaatcaaatttgatctatttttgatagaaacaaggatccaaaataagaggctcttttagtactattttgaatccaaaatcacatatctatatatattatatatagctaggctggcattgggatgaactagtatttatggaattatttcattcatatccatttttctacctaattaatcaccccaaataaaactcaataaattactatgtacccatttttcaaaacaaaagcaatgtactaggtttttcctaccctaaaatggacaaataaatagataaataaccacaaagactttgtgcaatatgtaataataagaaccatagaatggtccaaacaaagccttaaaagttatgcccacaactaaataagggacatttcaactgaaattatcaatgctcccctcaaagacttcttatatatacatagatattttctttgataataaagattaaaatatatcaacattaaatagatcatgtgattagtatcattaatatatgtaacgttattataaaccaaggtagataatttatacatacaatgtgtgattatgtagttacattcactaatgtcacttcactttaagcccctcacctaataaaccctattcaataaaaatgaaccgacctaataataaacttcatttggagactcatgtcacgtgactttaataactcaactataattttcacattaatatatcacaacaaaatctttctcattattaagtaattttgtctattgaaacttcaccataattaaatgctattttaatttgattaaatttatagatagaaaggtaatttgttatatttgtctcatattatttatgtataagtaatttataagattattacatcaagtcataatctcagtcataatcttgtaatagaattttgataatgaagtattttttgcggttaaatccttttaactatcattttatttatatttaagtttaaattttaatggtaaaatcctttaaactacactgttagtaaatttaaggtatcatttatttttcatagataactaccaatataaactgctcatgtgtacactcttgtacacgtgacataatgtctatattggtacaccaatctatcgggaaaaaacttacttcactggcttataccattaacaaagttagtgaacttatatttgacacaattcaatcaattccaaattcatcataattatatatgtcccaataagacaaaaaaaaaaaaaagctaaaaaactaacatttttttaactatatattttttaatattttatttataattttacggtctacaattttaatttataaaaatataattttaattttttaaaattataaaaatactattttcaaccaaaagtaaaaaaaataattcaaaaataaagagaaatcaactttataataactattaataaattataaaataacaaaaaaaaaaccaatctcatgataattatagaacaactaaaaagggaatatagaacaccttacttactgaaatcaatttttgtaaataaaaaagtttaaattataaagataaaaatttctccatgttaatgtatttttatattttttttttcaaattttagtttaatatgtaaaattttgaaaaaaaatattagtattgttcaacattattacgatatattatattattattgatataattaagtatcatttttaaattttatataaaataatctgaatcacaagaagaagaaaatcgaggcaaactttcaaataacaattttttttatcaattcaaaagatataaaatcatattacttttaagaaatgttaatttttcaaacaccaaataacaattctgtaacacaaagtaaaatcatataatgtgaagagttaagatgttgtggaagaacccaacatattatgaaattagatagatatatatagcatttgtaccataataacaaagtcaattttaagcctttgatttctcttaattggggacctatatcacatatcacaagctaaacatttatttttctcttccttactttgggattctattctactatttgattggtcacactcaccctcaccctcaactataatttatatacatttttgtaagaaaaaaaagaaaagaattatcatatattttatatatatagctaggtcattagaaatttagaataatgaggtagctaggtcacatggattgtcgttttctgtttctgtgtatagttagtgatgatgatggtgatgtatatgaaagagttgctattaagctttttcaaaaccccaccaccccataatattagaaagaaagaaagagagaaaaccatccaaatctcacgagtcttttgatgttgataggtggaaattgactgattaatttagttgaattgttttctttgagtttttgtaaaatggggtgcttttaatttcaatcttttttccttctttatctataaaaacttattattaacttgaaagcaacattcataaataaagacaaaatgtaacagtagtctttttaattaaaaaacttgattaaacttcaccaaaattaacagataagaaaattatacaagggtagttaaataaagtgagaaagagaaagagagagaaagagaatgtgagtggtttattgatatgtccacatgcaaaagctataatctgatatgagtgtgactcatctgagaagaagtgttaaaagggattaatggtgtattattctaatttaatattgagtcttactttaataagagtattattattgatataaatataattagtgccaaacatattctataattaatgatattttttaaaaattattattattattattttagcaaaagatgatatattcattcagaaacttttaacatcaacaatagacataagttcaggaggagcatttcgctcactaaaaatacaatttaaatggaaacaagatgttcgggcaacacaatgagcagccatattagcagaccaataataataccaataataaaagatataatatttaattacaccaataataataccaataatagtatgataatactcagaaagatactaaatagtaaacactaatagtgcattttaataattctatggctaattatgatttttcccctaaactttaacatgtactaaattatgctctttgaacttttctggccgttaaaaattatccttgaattattgagattgttagattttaagactcttgtctaatttcattcaattttactattttagtgtttgtttatgtactaaagcatgcttctcatactttgatatttaccaaatcatgtccctcgaattttgacatgtactaaaccatgccccctgaattttcatctatgttagacttttttttactaaaattaaattaaaatttttaaattcaacaatctcaatagtcatggagcatgtttaacgaccttgaaagttcaaaaaacatgagttatacctgtcaaaattagcctaattctataatcgtttgagtgactataagagcaagcaatacaacaagaccatcactcaatatatacataaatatgtgaatagtacatagtgacagaaattgttgatttagtttgtacaagtcagaaaactaccattataaattatgcctctgacattaattctgccatattttagaacttggccccatatcttttattttcatttgaaaaaaaaaaaacaatatattatgttaacaataaccaactacaattaagtatatgaattcatatggaaaaataaacccctgtttcatctttctccaagtgactttgacaggaatatgaactcatcataaacttataatttaatctaatattgcctaattaaacttgatactaggaacttgtttcacctaaaatcattttatgatacatatttataaactggcatgatttatgcaactcataat

SEQ ID NO: 43627 - DNA, 1565 bp, Cannabis sativa
agtattaccaaataggtcacttgtgtggtgctattaagttgtaaagaagttttgtttggattaatatcatctcacttgctgatttaacaataaaaaacttcagaagaaacttctgaaattattgattgcactaatatatacatatacacatgcacacaaggtcactcatataccaacaattatttactgatacacaagactagactactacctttctatacttttgtgctcttgctagtttggttaatagtcgatttcattctcaactttctcaactctggcaagcttatcaatgcttgcactccatagcggctgcaagaaggaagtagcacacagctcctgagccacataacgcatggtgggtcgtgactcgggacaggttctggttcaagacaaggctaagctcactactaacactaccatagctgataattttccagttggagggagcaaacactttgttattactgcattctaaccccttaattataaggaaggaagatgtttagaaggagaaaatatgagcaaaaacatgtatacacaagctcactcacataccaaaaattatttactgatacactagtctagactagactactacccctctaaactattgagctagagctctttgctagtgctactaggttggttgaatagtagttgttacttgaaagtggtatagggactaattagtaaattgttagtattacttagctagtataaatatgtaatgctatttcacaaatggagaaggaaggaaatcttattagagtttggtactgactcgaagagtgtgtctcgatacttgtatcgagtgataggaggtttggtgcatgttgagaatcatgggattccatctcaaaacctatatggctctgataccatattgagaatcatgaggttctatctcaaaaccaattggctatgagtggagtaacccatgttcttatatatggctcaattctctactatttattccatctgggacattgtccacaatagtgcaggacaacattaaggacagaaaaatcaaacccctgttttgtttattttaatctataagaaatattgcagtttgcaatatgaacttgttaaacaagtacttgtaattaaaaacatttgacttataataagtatagaatgagtttcaatcaattgcatacataagtaccagttttaattaaacaaatatttattttttctactactcatattgaagtccagcaagcttctcaattgtaatcgtcctcaatggctcgaagatcatagaaactcgactccttgttgatagttcttgtgccacaaaatgcatagtgggtcgcgaatctggtctagttctagtacatgacaatgctaagctcaccgtaaacaccacaaccattgataatctcccagtaggaagtaacaatcgttgatctaacacatcttttaataacatattatctgataatgtatccaatcgagctgatgataaagattccaacagttctcccgggtgctttcccatcataatttctaaagctaccactccaaaactatacacatcacacttttcagtcacacgc

SEQ ID NO: 43628 - DNA, 2741 bp, Cannabis sativa
ttgtgagtctgggactacacattcatatgtagcgtcgacagtaattaataaattaggtcggccttgtgattttattgagatagggtttgacaccctactacctagcagagagttggttatctccaaaagattgattaggtctatgccagctagaattcaaaatagggagttgagtgtttacctagtggagttagaattaatagagttcgatattatacttggaatggattgtccagtatttgaccagtattgattgtaggcaaaaaatggtaacttttcagtcagagggtgaagatccatttttttaatgttgggtcccttcaggattctcggaccctaatcattttggcatgatgatgtcagggtagtaaaagaatttctagatatttttcctgaggagttaccgagattgccaccgtagcaaaaaatagattttgtaattaacttggcacctggggcagagcctatttcaaaagtaccatataggatggctccagctaaacttaaggacttaaagatacaactttaggggatgctgaatctaggatgtaatgaccgcatgatttaattatggattaggagggctttagacactaattattattattagtgatttataaatatgtgttttgtgtgagagaggtatgtgtgtggagaaaaatagtgagttgtgaaaaataaagtgtgtgtgagtcagctgtgtggttagagtgacgaggaagaaaatggtgtattgggatttgggtggagagattgagatagggaacatatgtaattttgatgtgataagtgaaatatctctctctttatgggtttggtagttttatcaaactgaataaattactttgcttcgtttctttgttatttcgctgcacttgaagtttattgttttcctcaacaagtagtattagagccaaatgttaagagcattaattgggatagcaggttgcatttgcaatgtgtgggagaagccctcaatgtgatgatctcgcatttaaagatctatatggatgtcttgtatcgaaattttagctaatattgaggtagtcgggtggtgtgtcccgttggtgattacagcggtacaagatggaaatcttgttggcgccttgtgtcagaagtcttcttgacaatgaagtttagacaatgtgttccattttgtgatagcaatggtgcaagatagaagatcatttgaggggaggtatcaaaaatcctaaaatcgatccaaaaagtagagccaaaagagtcaaccactcgtgattcaaggatatagtaagccaaaaaataatcgcgcttgtgatcgagttatctaagatggtaagcaaaaaatatctactatcttaaaagagatgtcagagagtctcacattgttaacgtatagaaaaataataaaatatataaaatttataaaataattttctcattattaattaattttgaaataaattgagtgagtgaaaatatgatgataaattgggtgagatatcgggaggagagaaaaagatgaggcgtgatgaaacttatgccttttccttttccatagaaaaagagtgtttcaactttatgcatttattaccgttcagttcactctttctctctcctcatttgtctcttttatgccccatctcaattctccattttacccctctcaactttctctattcacataattgcccttcccacttataattaattgattgcaacaataataacctcatttaacaacatcattattggaaatttattgtattgttatttatttttgaagaaataattggaactaaaataaataaatacaatattttaagcattgtatcgaaataatttaataataattaaaaaaaaaagacaaaaacaaatatatgcagtgtgtctctatattatttgttgtctttttctttgttgttttaataatatccagacatttttatttttaagataagagaatttagcatcatataactggctattttatgttttacacaatattgtatatataattacttaatttaaaaaaaatatatacataaccatataaatattcacacaaatattttaaaacaatgtcaactcattattatctctataaaaactactatagctagctcctttaaaatatttatattaatttattattatttttctaaaaaaattgtatagttagtctacttatttgatctcattaagatatagaagaagtactaaaatgattactaaacttgactatatatatagttacacatggaaaaaaattacatattatttttcaactaattcaaacatagtgattgctagtctttgtacattaatcataaccctatactctttcttataggtgaaggttaataataattaattaaataaaataaacaaatatattttacatatatataaagaatccactcattgtggctgcatttggtatgaaattattatgcttgtgtttgactccaagaaacattaacccaattatttaatgacactctacgatatatatatatatctatatatatcatggatgacaacaaattaatctctctatataatataattaacataacaatatgattatatctatatatataatatagataaaatcatattgtatagtgaaatgtacgtagtaatatatatatatatagattataaattgaagttttagttacttaataaatacaattagagatttttttttaataaaaaattatatttatatgtatataaaaatagatgagggacaaaga

SEQ ID NO: 43629 - DNA, 1727 bp, Cannabis sativa
tgtttgtattccaagatcgagtcacccgcccagtagccactcttcaccgtatagtagccatctttagtgataccccatcactaaacatcctctctcgatctggacccagtcaacgccccaaaaacctaatccacatcatcctgagggagcacattgcccacccaaattaaatcccaagacccatcctccgtcagtagagaattcacacacaccctttttacaatagcaactttttgtcaaaattgaaaagtcttaggccacctaatccatttatcctcattaaccattattttttgccattatcaccgcaaccctctagctagaacatctctcccttccagattactcctccaaacaaaggagctataagaactattcttcccctccattaaggaacaattaacaaaataacattcctttagcactgtagcaaggaagacaggttttggataattttccaccattttttttgccacaagagaggagttaaagtcataaagattctaaaagcccattcctcctaacttttgggctcataaaacttgttccatgtgctccaatgaatcttctcttttttctctgaggaaccccactagaacttggccaccatcccatggagatcattgatgatattattcagaatgcaaaaataactcataatgtaagacatgagagcttggaccactgctttaatgagaactttacgacccgcttgagaaaagaggctcaccttcctgtctctaagttttttccaaactttttgtttgagtttttcaaagacctccttctttcttctacgcacaaaagttggcatgcccaaatagtagggtggcactcaactagtttgacccccaaccactgagcaatattgacggtaatccccgaactaaccttgttgcccatacttacttcagacttctcaaaatggatgcattgaccagacaccctctcataagctttcaaattttgttgtaaggtgtctgcttcttttaaagaagccttaaggaaaatgaagttatcatctgcaaagaagagatgagacaatcaaagcccattatgcctaaaatgaaccccatcaataaggccttgtctttcagcaaccaagattaaacaagataaccctttcgcacaaaggaaaagcaattaaggagatagatggtctccttgacggagcccacgctcggaacaatcttccccttaggtttaccattaagatgaaccaaaaaggtgaatgttttaacataacccatgaccttatgaatccacacttcttcatacccaagccaaaacatcatattctctataaaaggccactccacctagtcataagttttggacatgtcaagtttcaccgccattcaattgacattttcaaaacgccccattttcatcacattatcgatatattttaagctattaatatatctcttttcaaaaatttgactgaaaatttttaattttcaatgattattttatcaccaaatttcatatattgtagaaaatattacttattttggttggtgttaacccaaaaacttttcctagtgacgtggacatcaatgtttgacacgtggcaagaaggatgacgtcacagagttgggtagacccaagtcatagtagtcgacctaggaggggaccctagccctacgcccaagttgactttgggagctttggaatagaagttcagacttcaataacttgaatccaactcactatatttttgtatt

SEQ ID NO: 43630 - DNA, 2227 bp, Cannabis sativa
atgttcttttttctttctgaacaaagcaataactaatgtgtgttcaactggttggcggtgatttcacatctatttacagggtaaacagttatgcttgtcaatagcatgcacggccattctagaacacagacccgtctctatggttgccaaagcaattaatgttttggtgacctcgtactcccactcaattaagacagggagctctgttaaaacaacaaaatctgagaagacatctgcttctggtgtgcctcatgttactagccctagacccggtgtagatgagtcagtcaatagagtagatgcccttggaaaatctgtcatacataattctacagccggagataatgagccatctaataggtctacagctttctctaattcagattctgacgatagtgtgaactctgaatcagcacggaataattcgaatggtcttcataccattgatagtaaagtggacaaaagaaggttgatgggtggtgaaacttcctgtgttgcagtcatgccatcggctgttggaccaagtaacaactcattgattgccaatactgacgagcatcaagaatctcaaattacttcacctgcaatttcacctgatgagatatataactttgtgtttgcaactgttgaggaagagatggtgggggatccgtcttacttgattgccatcattgttgagtttcttcacaggtaagaattttcatatttagaaatcttgaaatatgtattgagttgcaagtgaatattaggtaacccgttatataatctgacatgaatctatatcaagtgatctaaatagacacgtttcctctcttgtttcatgattgttttgctgtttttgtagtgctaatttggaaaaggtgaaagttcatcccaatctgtatgttttgatgatacaattgttagcacgtggcgagcgatgttcagagcttagtttgtttgttataaacaaggtggctgattattcttcttgtgtactgtatacttttgtagtaatttgagctctttgtatgcttcttatgttgagctgaagttaacgacatagttttttgttgcaacagattcttgaaccttctaaagaggttgcagtgcaactcctagagtctggtcgtcaaaatccccaaattagaaagttaggtctggatatgctaaggcagcttgctttacatcatgattacgtactgtcgctagttcaagatggatattacctcgaagctttacggtatgctaggaagcataaggtaattcctactttatccaaatattggagaaactgatgccctgttcttaattcaatttgtcaatgttttaaactttttgcaaaattgactatgtccaacattgttgtgaagtcatctaaaatcaactaaagtgatcttgtattttacaaagggaaatttttagcgagagaaaatagtagagaaaagacactgaaatcttaaaatttaataccaaactttcttcagaatattttgcctctgaatgtatttaaaattctagattttataaaattatactgcacttaactaatacttaatacatttaatatatgcgaattttttttatctacaattttgtttgaatcaaaacaagcgaggatgatttttttttcctcataatatctaagatcccaaaatagggttagcaaaaaaactgtcacgattgtcttttgccaaaatcttagtatatatattattttcttctaagcccttggtgaatcctaaatcatttttcaaagtaaagcattgctttcttacatttcagttaaatgctttcattgttctcatagattagtttggtttatgacgaacttttaaactgaataaaatgagtaaatgtacaggtcgatacagtacggccatctctgtttcttgagacagcattagcctccaatgactcacaaaatctagctgcagttctaagattcttctcagattttacaccaagctttagaaccacatcagatcacagtacatactaccggattctcaaggagatgaactctatggctgctacagcctgaaacgtgcatgtttttttttggtaaaacagtacaagtctaaattattaggaaagaactacacgtctagttcaagatacaacagaagcaaaataagtttatttcagttaaatatatatattattttatattattctttttagttatttatagtacattgttttgtgctcaattccgaaattgcaggactttgtggtcatcttgaat

SEQ ID NO: 43631 - DNA, 1461 bp, Cannabis sativa
agtatgttaaaaatcacgttaacacgcctatgctagttagggtgttacatttcatctagggtatttttaccattgattgtgatccaatgattgatatgctcaaatgtgacttcagatgatgaatgtaaattttttgaggtcagatcacgtctgtcagatcgttttcggcttatttgtgacaaaaagcgcactttgtcttgggagtgattttttgacttagaaacttcagaattgagatatgagtatacgacatgtgtataatgaacttgaaaatatcttttcaaaaacttgtaattatgtcaatcgaatttgtattgagtgagatatggttgatttactatagacagttccgcaacctgcgaccaggttgacattcctacgattaagaaattttcagatgtcaacctgggtgctggctacttgggaaatcatgtcataatcatattttgcaaactctaaatgatattatttcatcacttaactaatttcttgatacgagtgaagtcgttcaccggttctcaaaaattgttctcgttcgcaaatcgagtgtcgatttgtaacttgtttgttgatattcaaccctgtcgtaaggtgaaatatcaaagtatgaatttaacttgccacatgctatacatattatttgcaatggaaaattaccttgatgcccgagacaaaactaaaattggacaagcagatccatgcccaccaagttgagagtcaacatgggcgctaggagctgctctctggccctctcggtgccattttcgtacattgatcatattttagtttacaaaaaagggttcctcccccatttggaaccaaaacaattattggaaaaaattggcatttgagtaacgaaaccatgtgtaccatgttaaatgtcagattgggtgttcgtcgccagtgcccatgtcaacttatgtgttgactagtgcttttggccaccagatcatctcgtttgatgttcaaaagcacgtgtatctttgttattgatgaattcaaagaaaatacctagaaaatatctatgaaaaacttgtcgaaagcgcccaaggttaacaatatgtcaacttgggcgctagatccaggttgaatctcatcttttttatgcttgtccttctttctagtggaagttactcacattagttcagttttatcaaattttcactggtattactcatgaaatttgagctggtgacctagcgtccatgagacacactatgtcgacctaggcgttggtctcatgatttgtctttcctcagcacgatttgtaaaaaactcaagtcctagcgttgttcattgttgaattttaggaatcaaagtccaaagaaattcccaaaaaggtaaattctaattgtcatacgcctaacttgactgaaaatgtcaacttgggcatcgggtgcccgagcactccagattggaagtgttccaatatttgttttagggcttgtagcttacttatgg

SEQ ID NO: 43632 - DNA, 3066 bp, Cannabis sativa
  modified_base (2691)..(2695): a, c, t, g, unknown or other
tgtgttggaaaaatttcgagggaaatctttgggagctcaagcaagtgaagagcttactgttttattcaaaaggtttcttctttttgctatggattcaaatccaaacagcagtgatggtcctagaggagcccaggaggtactacatgttctggacgctttgaaagattgtcttcctcttatgccatccaaatacacaaccgagatactcgaacatcttaaacctcttctcgcagtgcataaccccaaattatcaaggcacataacagattgtttgcttttgctctgcctcaatccagattctgaggtttcttctaagacactgcttgatgtgttgtgctcactagctctttctgtcacctctaatcagacctcagtggatgccctgacattcactgctcgtttgcttgatgctggaatggtcaaagtttattctcgtaatagacagctctgcattgttaaacttcctgtagtcttcaatgctctcagaggtttttcagagtttgattatttgaactttttttcaagcttaaactgtttttaatttaatatgttgctgggttttatgcattgtaatacttttctaagagtggaattttgtggcagatatattagtttctgaacatgaagaagctacacattcagccgtaactacattgaagagtttgatacataagtgtatcgatgaaagcctgataaaggagggggtggatgaaattaaattgatgaatttaagtgtgggttccaggacgtctgggccaaccatcattgaaaaagtgtgctcaattatagagagcttacttggatatcattacttagatgttttggacccttcgtttcaagttatttcatcactgtttgataagttaggtaatattattgctttatcctttacttctgtgtttttttagtgatctattatatcatcttttctgattttgttaaatctagtttatggagaaaacgtttataaataattcttcttgcaggttttgattcttcttatcttatgaggggaattctcaagagcatggcagagatgcagaagttgcctgatgaagagttttctaagaggaaacaggtatgattgttattttaaatcctcaagtttagtagactatttattgtcgttatcctttttctgttttatgtatggtttagttcgactattacaagctatatatcagcaagggactgtcatccttaattaaaattttgtcacaaacttgcaaacatgatttgatggcattcaattccaaatgtggtgatctacttttttttttgtcctttcaaatgaaaactaactattgatgagaaaaacaagaaggaagagtctttccgtgaatgtattctttagtttttgaccagtgctttgaatctctttatttgatattgctgttgttttaacatgtttgtcagtaaactaacatttacaaagatcttataaaatttatagccatgatgttcttgtctttcatatttctcgttgttcagtactttatgctttcatctgggtctataatggctgtgaaatttggtgtttcttgttttaagttggattcactacgttgttttgatcttagaaaaaggaaaaaaagacagaaagattacgatgttagctgtttgttagtttgtttatatctatgtagcttcaattaatgatttcattacaattcagctccacgaatgccttggaacagcccttggtgcaatgggtcctcaaactttcttgggacttctacctcttaatttagaggcagaagacctagcagaggtgaatgtttggctctttccaattctgaagcagtatactattggtgctcacttaagttactttatggagattttggatatggttagacagatgaaaattaaatctgaaaaggtttgcaacttttcatacaaatgctcattgttttcttagtgatcttttttcaaatttgttatttatttatttactttttttttttgcgtcagcttgagcttcaaggccgtgtttattcttctaggggtgtggatgcacttgtgtactctttgtggtcattgttgccttccttttgcaactatccttttgatactgcccaaagtttcaaggatttggtggaagatttgtgcagtgcccttaatgaagaaactgatattcgtggaataatatgctctagtttgcagagtcttatcttacagaataaaaaaattctggaaaataagaatgatgaatctgatttgaatgacactgaaccggctgcaagacaacgtgtgatgtcttactacaccccacatgttgcagcagataacttaagtgcgttgaaggaatctgctcgtgacttattgcctgttctatcaactatttttctcaaatctagaaaagatgatggaggttctttgcaggtacttgttctatctctttgaaacatttggtttgtttgaaccaaattttatttgtgcttgatggcatttatctgggccactggagatatccattttcttaaagcaaaccattaactcgtgaagggtaggacataacaatcatgttgccaatgttttaaaaggtgtttgaggcgtacgccttgaggcgcgcctcggaacgaggtgttcaaaaaacgcctttgaggcctcagtcattgtccatgaggcttactcctcggccttgtgaggcgtacgccttgaggcttaagcctctgaggcgtgtgaggnnnnngcctcagctaattgagttgttttgagcctttttttaaagagtttaattgagttttttttaaagagtttcagtgggcctttttttttaatggtcagtgagcctttttaaaagagtttaattgagctttttttgaacttttcttgggctattttgagttttattttgtaaattttaaaagccgaaaactaaataaaaaaccctaaacattcatcattttccatcatcctccacgacttgccttgcacgatactctcccttctcttcactcacacagcagcaacaccaacacaaggctctcctctctcccttggaacatggaatgtgtcttttaatctttatgtttgaaactttagacttcaaatttatcattt

SEQ ID NO: 43633 - DNA, 1606 bp, Cannabis sativa
ggttgaggtggaagccataatgttcaaggtcatgagttcaaatcccataacagccccaaaatttatttcgtcttgggcccatatattttcagggccggccctgataacatagttgctaattaatgaaggaaataatttttcacagaggacgtacgagtgtgagtttttattttttacacattaacatgtgagtgtgaattaataatgtaaagaaaaagagaaaatatcaaaattatagaaaatggttgacgaaaccttttaacgtcactgcatacgaattttatatataataataaattttgaaatgtctgtaattttatattatatattattattattagtaatctcgtatttactttattaaatcatatcgtttagcgacataaatattaatggtccgacagcaaggcttgtcttataataatgcattgtcaagtaaacatttttactttttagcattgctaaaacaagctacgtacagccgctgttttttttttttttttttccttttaatatttagtatatacatatattaaagtaataaataaagtaatttccttgttgaataaaattaatgttgatattgtactcaaagcgaaaacaatggccctagacacggaattgtgttcaacactactttgatatgagaagtttgatcgaaactttgacgagatattatataaatataaatagggaatcctttttttttttttttttaagaaatttccatgttattaaaactgatcgtttacaataacagagaaaataggatttgagatttcacccatccaacagacatcttcatccacctcgagagcatacttagctaaaccatgtacaacttaattagcttgtctcttaacataagaaacaattactcttgagaaaaaagataaaagagaacttatatcaactattaaatcataaaactagagaggtcttgggaagttgaattaagggccgaagaaacacgcaacgcatctgtttcgatatgtgtaattgaaagttgtagttgcagcacccaattgagacgaaagagcgatttagcctccatctcatcagatcgaaagcacccttggactggttttgatagagcaactataatattaccatgatgatctcttactatcgcaccacaccccaggataaatagggaatccctttaaatattattattttttatttttatttttatagttgggattgtgctaataattactacatgagttacaatttaaatttagatttatttcctcataaatacaaaaaaaaaaaaaaaaactgcttttaaatataaaaataaattaaaaacacaatataaatataaatattatagtttcaaaaaatatatataaatatttatcgtgcatatcgaaatgtgtaagactactattatatgtttttcatatattttcatccatatgcaaagtactatgtatactttagatatttctttacgcgtattaagaatctttataatatacgcttcaatgtcgaaaatatatgccatgaattatgtttgtattattaaatagttttgatggattaatcaaagtttttttttttttttttaagataacaactctagcaatttactctcattcta

SEQ ID NO: 43634 - DNA, 2268 bp, Cannabis sativa
taatgtaattaagagacctaattgtgttattgcctaggacattaaagattgagacaacgaattacttctcctaaaaattaacatgagagaagagagagagagagaagtaatgttcagctgtatttaactactgtctaattgatttatgttgtgttcaaattacttttatttattgattgtaggtagaaatgagagcctaatagtggaaaagtaacttaagtagtgaaagctatgtatgattaaattcacgtgtcaacacctaatttcaaccgcatcatgtaaaagtagtgttcgatcaaagtggtgtatgcgttttgttgaagagtacttactttggattgggagcttgtcatggaagttccccaagtggcctagcacgataactttattattcagcttttatatcctcttttcgtgaaacaaattcggaagttactgagaaactaatttatatatgccaagggttaattatttggttaatttgaattaatgcttgggaaattaaagagagagttagagaaaacaacaaaaacaaaaaagggtcattagtagaagccaatataattgagaaaactcaagttgtttatggaccacgtaccccagtaataaggacaccactttgattaggtgaaaaggagggaaaaggaagaaggaaaaaataaaaggagtagctttcgatagcctctggaatggactatggagataacatatggctcccacccaccatgtgaagcccttaattagatgccttgagccagcagttaccttttgctcctttgaaagtttaaactggatttgaacttctaattccactttttttttttttgacttctaattccactttaatgaacaaagacagcccaaaaaatgtgttatttttctaaaaaaatatagataatgatgataagaccggaaacagagcagagtgagttatttttgacggatttttactcagagataattgataaaatgtggaaaaaaaataaactaacatttaagaatacatgttttttaacaataaattggatttaactttctattgcacatgaaatcatgcaatttaaatgcttttctaatttgatgtttctgtgagacaataaattggtgaatttattctcgtgaatttgtcatttttattaacaacacaactttaaccaatttaagtaggaaaaagttaaagtatttattagaattcaatacaatccaaaagggttaacttttcttgacaaaaaaaaaggtttaacttttaacacagaggataagatactattttgtgaggtaattaattaataggattcaattaaaaaaaatggctagagctaaaagacagcagcacaaaatgataaaaccccagagatgatgacaaatatatggtaaagagtaaagaaatatatatattggccaatgaaattattaagtgtgcctcaatctgtcttattagaggacaagtacccattattctgccactcacggactcttattctatgtaatatgtttcgattctgtgactatgctttggctttgtactaattcgtttaggataatttgcctttaattatgctttaagtgattgatcatattagtttatttcggttgaaagctacaggtcacttggcaaagtcggcgttaaaaccttttaagggaatatatactattaatttagtgataagtctactgttcagagagacaccccatcccaaaaaataaaataaaaatgtttgttgcataaccaatacttacagctgttttattttttgtgcctgctttacactcttcagtcttatttttataatttaattaaatcttcacatggtctcaactcataatctatgggttgatcagtggctaagctaatttaagctttgttccataaccttattgaataaagtagctaaagaaaatatatgttacggcaaccaatttaggatgatgagtatgtcattattatgactattaattgctcatatcatgagttgattaaaatatatgttttatatattgttgggcactaattggggattatggtgaagctaagatatgcgtacctcctaactagtctatgctatgtgttggggttatttttatgcttatgaaatgttaggtacaaaatgcaatttaaatgcaaagacacgatagtgatggcttgagtcaactttgagtagagaagaagggatattcaatgcagaagcatattagttttcttggggtcttttaaaacattttatcaaacacttgcagagcattgagtaatagttgaagagttccatg

SEQ ID NO: 43635 - DNA, 2861 bp, Cannabis sativa
gaaattgttgtcatgagtattaaaacatataaaataattaattacaaatggtaaactttttatgcatttaaaataattttgatatatattctttaaattaaaattagctatgaaagtgtgcgacataaaacataataacatgaaaataaatccatttttgtaaaaaaaaaaaacaactatagtctgtaaaaaatgtgtaaaactaaatgtaaccgtattttgtaactataaaaaatgaaaaatgaaatatttgtagtaccgtagtatttttcaagaatcgatagatatctttgagcttccataacctactatagtttcccgaacagttatgatctaacccccgagcaatcgatcgacccatttcttgcaacaaatcatgcatttgaagtctaccattaacatcagttatcaaacacttatcaatgagaacttcaataatagcatcaaatgagtcactatcctccaatatgattttcacatgacattttacttcaccattaaagaaacatgctatatcaagaaacaaattcttctccatgttgtcaagtccatcaaaacttattttcaatacatttagaattccttgatcaggatttactttcaacttcttcaacaagctttcccatattttcttgctctttaagtatagattagatcccaaaactttgagagccaacggtaaaccttgagcatatttcaccaactttattgaggattctatgtagctttcgtcaaccttttttcttttgaaagcatgcaaatggaaaagatcaagagcttcctcgtcgtttagaaatttcaggttgtatatgttatcgtcatctccaacaacatttcgaagtacttgttgatccctacttgttataataactttactttcggaacttaaccaaaaattactatctttaagtaaagcatcatatttgtcgaggtcatcaagatcatcgagaactatgagtagcttcttatgacaaagcatattctttacaacatccaaattttcatcatcgaaatctttaatttttgacaatttagagaacaactctcttgtcaaataagttgatccatacttttgttgcaattctctaatatttcgaagaaaacaataactgtcgaattgatgacgatataatttgaatacaacatcagctagggtggttttccccaatccacccatgccacaaattcctaccatgggagcattggacaacaacaggttgatatcatgaatagacttctcaattccaactaagtctaattgcttcaagtatttagttgaagatattgtaaatcttaacatcccttgaatatggttgacaattacttcaactaactcagcttcgtttctacacatgtataattatatataattaactttagtaagtctatagtacacctcctaattaaaaaagtgttttagtacaccttttatttttttcaacatttataacaactttttagtttttttttttttcacataattgcgtacatcatttaagatcgtgtgtaaatttttagaaaattttaagtactttacaatactataaataaataaggttcaaatattttattttgtacactcgattgtttattgttactgtttgaatcttaatttcagtactgcaaattattcagatttttttttttttgaaaatttatagatagtcttatgtagtttcaatgtacgtgatcataaaaaaaaaatcgatctaattttttttagatatcgaaatagataaaaaagcctgctaaaacaacccttttaagaaagagtgtaccacataaatttccatacatctacacactacaacaattttagtttttacgggcgacaatattagaggcgacatattgtcgcctctaaagagggtggtattagaggcgacataaagttgtcgcctaaagaaattgagtttttttttttttttttttgcaactttgtaaacttttaggggcgactttagtgtaaatattaaaatatttaatatatatatacaaataaaagtgaattttgagtaatcattgaaagacaaatacaaaataataaaatatatatagaattgaagttggaaagaaattttagaacctattttttgatgcatgccatcctgagagattagctattgtagcaagagcaaccttccatctatgtataatactattgttgtaatgttcttcgtattcccgaaatatttttgcataacttcttttttgtgcgcgcacatctcctggcgatacatgataaaacacaggcagaacgatttgtgttttcttctccatgcattcgagaatatgcaccaactcatccaagcaccacgacgaatatgcatacttttcagaaaaaacaactatggaaaatttagagttgttgatagcatccgaaagagctttggaaatctcatctcctcgctcaagtctatcatcaatatacgtttcaattcctccgtctttgagtcctttatatagatgacttacaaaatttgcgcgagtgtcttctcctctaaaactgatgaaaacgtcgtatttattctgcgaacatgcgacgggggcacacggcttatcatgatcatcaacatccatactctgtcttctatgaaatattgtaatgaatatactcagctttgaagaaagatcaagatttatatatatctatatatatatcttgatatattcctgttttcgtttgagacatgttctttgtgagaaactagacagactatataataaaaaataatataatatatatttttttatgactaaaaattaatattttttttgtgaatagaaagaaagattaataatacaagtatttattattataataaaaattataattgttgtgattaatatatgttgaatta

SEQ ID NO: 43636 - DNA, 1688 bp, Cannabis sativa
ataagaatagaaatgagaatgggaatagaaatagaaataggaatggaatggaattaaatttaaaatatataaaaaaaaatgataaatcttgcattggaatgattattctttctattttaaaatgaaatagtcattccatcaaaatgatggaaaagtcattctattgaaatgacattccaatattttaaagtgcaaccaaacaaaagaatgaaacaaattccattccatttcatacctccaaccaaacatcacctaaatttctgcaagtcagttgtttattggaacatgatgtacatgaaagttaaattgcatgtattacttggaatgtgcaggtaacagtacttatcggtgaccctatccattttgatgatttactcgatgctgaaggagccaaaagtgaatctacaggaaaactatatgacgctgttgcttcaagaattggtcgtcaattacatgagttgaaagttcaggttgaccagttagctctccaacaacaactcgaattacaaaaccaccatggaaggagtgcagaacgagctgctgggattttgcagcaggtcgattgggagtcatttggtatggagagctttacttctgatgactatgaagcatcatccatagaagaaactaaagcaaaggcaaatacaagttatcagcaacaggatgaagtagtaactcctgatcggtattttagagttgggttctcctatgatggtgttatcgggtcaaggatgcggagttttgtggacccatcagagctgatgggttttgcagctagaggcttattcatgaatcgtaaagcgcagaacatttcttccatcactcatcgggaggtcggtcccttgcaagcatggaagcaattcttagaatctaatgtactaagacaactaaaatactgctaacatacaaaccagtgaagcactcgtaactgatacaaaatagagtttatgttggtaaataagattttacaaaatatgagtcaggtatgaagaccaagtatagtcgaggctttaaatattttattacaccattatacatgtttaaatttgttttgggggggaaataagcacttgggacaggtggatatgtttcgagacaaagcattcaaacaatcacatctgctatgcaagttgttctatgcttttcgtaaggctgcaatgtggttactaatgtgtcaattgttatagtagttggcacatgtgaagagacaatgacccacttaaagaatatattgaaacttgttcaacatcgtaatcatataaaatatatctaattatctataactgcattttagctgattcaaattttgatacccattgacgatatatgaagcaaggtaaaagtgaaacaagagaagtaggtagactgggatttgggatccgttggtttttaaaatcttatatgtattcattttccttttcttcttattttttattcttacatgtattcattttcatatcttacagtaatgtacaatcggtattcggtagctcaaaaagtaaatgaaaaagcatgctgataaaagaacatgtttgccttttatgatgcaaatgccatatgcaaacagcccttcgcatatggtaggttccttgcacaagatatactatttatattggttagcaaaaataaaaatatatactattcaaacgttgtcgttttattaacttttttcttattaaaagattttg

SEQ ID NO: 43637 - DNA, 5098 bp, Cannabis sativa
cttagccttggaatccaccgtttccggctccggttgaggcttgaagtctgtagaaacaaatggaaaatggttggtgcatctgggtattatgagtcttgaaaaggccagacttttaaaaggtaatatgtcttgatggaaggactagggtatagaagtattcctagtggtgaaggccacatttacttttggttatattttctatatatggactgaattggtggaagtgatataatccctcctctttttgagttggacttttttttaagtcacaaaggaattttaatttatagggagttgggataggccaatttctcaagcggtagaagatgaagaaggttgacaggattctataactatttgggtttatttggtaaggacatactcccaagaagtccgctattgatataaaccacagatgcaaaaggaagtaagcacccacattcatatggaacctcgaccaagctctacagcaagggttctcgaacccattgagacatccaaatcgtggctttcatatgacactttctagaaggagatattcatctctaattaattgtgtttggtgttcggtgattatactaaatacaagagatctcaacataaagcctagtctctcgggtcatcactctgaatggcagctttgaaaagttcaattgccattactttcccgccaagtgccttgtttaagctcttagacttgggcacaatcactctagctctaatgaacagagccacatggggatcatgttcatcaggcaatctttagcttctcttcattcgaggcatagtgacttcaaaattcaattgtttactactcaagaaaagtctattttggctttggagatgaactcaaggtgatttcaaaataagaaagtcttaactcacaaggatagtgttttggaattttgaaggtctcaattagggaataaagaattccttgggagttctagaatccttgaagcaagctcaataaagaaaaagaataagagaatttaaaaataaaaaaaatcagcgctgaaagaaaaaaataatatttttttttctacattgatggataaagagcacttgaagaaatgagggagataaaattccaagggcgttcaggaaggcttgggtgtggagatcataatgggaagtgaaaaaaaattgattgaaagctatcttatttataggtaagcttaatcccctaaccctaaagcaattgtgagtcttttaaatttaaaccttaaaagaaaaagataaatgataagaaaaagatgagaaatcttttcttttctccttttagcttttgaaattcctatgagaataggaagaggggttctaaatttaaaatgtaacaataattcctaatgttattaagattaagctaaagttatagtaaaataaaaaaaaaaaaataaatgataagctcttcttcttttttactctaaattttgaatggaatttcaacaaggaataggatttcaatccaattaatcctaatgccataagaaatacatgaaaattttaagtttttaaagaaaaagataaaagataagtgaaaaatttttcttcttttttttttttgcttaacaatttttgaaaattcccaagtacaagagtaagagaattcaaggtcataattctattaggaatgcttgaagaaaagaaataattgtctaagattgtcaaaattgatgtccatctggtagtttcaagagaaataagctccgttcacgtcaacaagtcaactccacacaagtgtaaagttgacttggggggcaaatattaacccgaaaacttttcctggtaaaatggacataaatgtttggcacatggaaagaaagatgacatctctaagtttagtattcttgagtcatagtagtcgatctgggaggggtccctagccctgcgcctaggttgactttgagaactccaaaatggaagtttagactttgataaatcatttctaactcactatttttaagtattttgtaacatgaagacatagagaaatcaactctaggccttaagagctgaagatacacgaactagcatctcaaaagtcaacttgggcacctagggtttcaccgagcgtccaagttgaaatccttaactagggttttagttttaggtccgtcttagtgaaaatgggtcaaaattttcattgggacatgaactagacataccacgaacatatttgaggtatcagaatcagattcggagaactttcatttttgagcactcgagcaccctagcgcccaagttgacaatatgtcaatctgggccacttccaagcatcagatcgaaaaaaaaatttgactcgtgtattttcttcatcttcatcaaaaataggaaaatatgtgcttttttggaagaaacaacacataaattcaaatatttccatggaccaaacagaatttccagatgaccttaagctggacccagcgcccaggttgacacatagcattgggccatttctagtaagtttctcaaaaaagtattcagggcatttttagtcatcagaaataacgaagatacaagaaaactcggggagaaaaccacaatattgcaagagcatgaaaactgagcccagagctcaagttgacaatgaaccttgtgtagtggtttcaatcattaaaatgccaattctactctgagcattctctctggaatagtaaaaaatggggttaaaaacctcatcctcaagttctaaaaccttggaagtatcaaaacgacattcgagaagctccgaaataagcacttagtgcctaggttgacaaatagcatggtgcgcttctgcttgtctgattctgattccatctcgaccgtttgtctaatttttcacaataattgagagtcatgaagtcagaacagtcaaattcacaacttcatattttttattttttgaaaaggtgattcacttgaaaactaggcaattttgagtctcacgttttcgctgaataacaacatctctgagaactaatgatcagttttattagaatccaatggactaagtgatgtcaaaatatcacttaaacatcaaaaaatacatctttggtacgttttcccactcatgtcaacctgggcgctaggccatgaacaaccttcagtaaaatgggcataactcactcaatattgatctgattggtgcgattcaacttgagttttcaagttattttaatgatctatcaagttatgtgtcacacttcaatcgcaattattaagatatcaactccaaatttcaccccaagagttacaaatttaagctacaacttcccagagcaggtcccgccgttgcgacccatactccaaaaattgacgattaacctcagagttaatttttaccgttagatcatcatctacggtcaaaaatagcctaaatgtatccttccatattttttggattattttttttttcacatttaataggatctcctttacctataaaagaagagctcctctagctcatttttcaaactcagaaaagtagtcataaggttagagcatctctctctagtttatctctctagaaattagagcatctagacttagccatttttctgtaatccatcctatgagaataaaaactctaagtagacgtagctctattactgtagtaaaacagggagtaaactactataaattgttgtgtctctctatttatacttgacttacaattcattctcgccactctagcactcaggtgtggctcaaaaatctctgtccaaatttttgagtcaacagtgagtaagagagagcttggaagcccgattacccgttttaagtttgtttttgattttttgttgtaaatcaaattttgcggatgaggtatttaaatcctttccattatacatgtttaattttttatttcattccacattcataatagttcacatataattcatatctataaacctttataaaaaagagaataattgtttgggcttttcatagtgaatttacaaacataacccttcttttaattatttatttacctataactgagataacatctataaacctttataaaaaagagaacagctgtcaactattcaatgacaagtgtgataattaaatatttttgtggattcttttttaatatcaatcatggagataaactctcaaatgttagttcacaaattacattctatcttttaatgaggatttatagttaacaaaggtattttgtagatctatagttatacatttacaattataagtaatatgtttatttataaattgaatattattattgcatattttatgagtgataaagtaactatcaagtggtatcagaaccacctttgattgattctttgagaatttaaaatttatgttcaaaaaatttggaaattttaaaaattagggttttgattttccatttatgattataaattttgttcttcgattataacattaagtggaatcaattttgatcatgattgtttctctttttgtattgatgttatattatatcgtcgcatgggaagtcgtttgatttcatataactatacttaagttatgattgtatataatatctgtttctaagattaaaaccattaaagtatatttgttggaatcaattttgcattctagtactttcttggtgttttcggtagcatatgtatgcatgtgacagaattagttatagttttcttttctttggaattatcactactgcttgtttttcctttatgtgatttgtcacaggggtaaagccaaaataagaactaaagtctatacatcttttaatgcatatgtattatgttaatttggaatttagacattgtgcttcgataaagtttatttctttattgtttttaaatttgattaagaccaaacatgtgaggttaatgttgtttttctgtagatatgattttgtatcattcccatgaaataagaaatatgtatgaagttcatgataaaaattcatgttcaaattatatatatatttggataattttaagtttaaatttgacatactaaaaataaaattttaaatttttctttcatttcaaatgagttggttaaaacaagatgttgccaaagcaacttctcttgcgtaaatttctcatgaggaatgttagaggtttgtgtgtgtttctcatgtaagtat

SEQ ID NO: 43638 - DNA, 3711 bp, Cannabis sativa
atcaaacggttttcgtgaacattacacggtattaattataagataaggtatgataatattattataaaactttgattttgtttaattggtcaactagtgtttgaatatttgcattatattcatcttgcataaggttgtaacattttacaagttaaacaaaatttggattatagatacagaacaaataggcgtaaaatttagagaaatcaagaaaagcgtacgtttgaccacagaactcttcaatcgatatttgattgaatatttctctgtttgaatttcaaacatacatgtataaatatacgtgtattaattcattattagctctatacagacgaaacaatagcaattagtattgggtctacgtactaattggcaaggaaaacaggagggttcttctgagtagaaccgcgggatcgtggactgaatatttttttcttatattatgttagtcacgtaatgaaacataagattattacgtttcatttaaacacttgttaagaacaatacaaataatacaatatatttatataaatgtatatagttatatagagacttaagatcgttgccactacagtattatcgagtaatatatagttatattgcagaacacaacccagatatgctgaaaattaagtgcaaactagaagaaaacgacaccaaggaatagagtgaaacaaaataagatatgaagaaaggttggtctttttcctttggctgaggatctcctgctcctactactcccgcgactactgcctttgacaatgagtccgaccagaccaccgatgagaccttttcttcgtacgtaaactcgaggctttcgagctaattccattgacgtaaaaacatctttgggttttggtgacatttgttttccatggtaaaaattataatggtggtcatcatcatgcattacaacttgatgatgagctgaacttggaagtgataatacagataatagtatcattaaaattacagtaagaacagacgaaaaccacacaaatttcatgtttttgattgacttattactatgtcgaatgagaaagtatatgatgagttcaatttatattaagattggagatggaatatatggtgtcttaatcataggaacgattgttatattgggagtaaaggaactgagttgaaaacaatataaaatagcttgaaaagtggaaacaaacgtgggtttttttagtgtaaaggtaggcacgtaacacttactaatcatttattaaatccatcatcggcatgcattagtcaaaattaattgtatggagaacttgatcctaatatgcatatataaaacaacctaggtatgacttctgattataatatgataataaaagtaagaagattgaatataacaaaaatgcattgacctaacaatcttattctaagaacctactctacattacatatataatgtcatattgtattgtgattgttatagtttggcaagtaaataataaatataacatcaaatttaaatatttcgttgtaattgttcctaaagtaaactcagaaggataacatcaaatttatttaacagaatctatgagggaaataaaagagaaaagtgaagaaaacattttcattaaattttataacaagttttgtttttatatgtatcttattaaatgcccaagctattctctatgtgacaatcttttgaattcaaataaaaaattttagtgaataaattcataatgattgcaacaaagtttatagcaccagacaaattagtcattctctcaaaagttaaaaaaaaaaaaaatagtaccagacaaattagtatttctcattaaacaaaacagagattctctcctaattattccgtgacgaggaccagaaaaaagtcgtggaatcaaaaaagaaaaaggtcagagcacaagaaaactaatacaaattatgataaatgaatataatataattaagtttcaactttcaagccgtccactagctagctggaccttaaaaaattcaagctttctttcttcatgtaaagaaaatatagacatgagtattgagtacacgtacccaatgaaaaaagattaaccatacatttcttagtggttcttcaaaagctttgtgattttgtgctgattgattaaggaagaacaatatatatgtatggtgtaccaataatttcgatcattttaacaattgtaagatatttttcgtccagaaagtatagttttaagaaagtgttaaaaggtgagtatttcaaattcgaggctgttgaatcaaatacatcggttgacaaaggaaaattatttttcgaatgaatgttgtaatagtacagaaattgaaactcttagtaagtaatcttgatttatttcattacatgagatgcccaagctcactagcaggctcggtcagcaacttacacgtaataaatctcgagtgtcaaatcactccaaattttccaatggcattatatgggaaaagattttaagacagttaaaaagactcaaatttcttatatttattttttaaattttattatttccaaaaaggcagaaaaatcatttattacagatctcagcatagcaacttatcaagaatctctggcttaagtttctggagtaatgaaacctggctaacctgtttagacaattcacctgcgactcggtcaatatacaacacgtacagcccattcctgttttccaatagttctaacgctttccgtgcatgtaaaatggacaccacccactcctcaaacagcactgcaaagaaaaattatggttcgttatttctcaggttacatattcatgtatgcgtgacatgtatatttataaatatatgtattacacttcatttcatggcctaaaatgagtaaaagaataaacactgttgttaggacatacttttatcaaagtcttcatttttcgaccacattgaaaggtaatctgatatcaaaaactcaataagctggatcctgtagattccacatcaacagattagacatgctactctgtctctaaacacaatttagaatctctaatttataagctgcagtagacgaaaaatgagtaaacattagctatgactaacatgagccaaacatgtagtaggtgtcattttgcttgaaagaaaaccaacagaaataatgaattaaggcgctatttagaattaaggggacctttattgtaaaatcatatcaaaagttcgtattgaagcaaggtatgtggttggaatttaatcactaagatcgatgttaatctgtttggaactcttgatgctaacttaaaactttaagaaatgccatattatacttgtggtttcacttgagtacttacattatgaacatgcattcgtgcctatggtgaaaagcggcatcaaatggatctgtgaaaagtaaactctctgcaagtacagagattgtctgagaaactgaaagtatcgcacgttgtccaatgaaggactcactaccaagcttacggatcaagtgttgaacacagaactgagaatccatgctgctatggcttgactctgataaaaagattaattagtgaatgtcatcatatggttactaagttaatttaagaggccatctaaaaaaaattctatgaacaagttcatcacaatctctacgataatctcctaggttcaaagattctaactacaagagagaggaggttaccattttctggggcacacatccttttaaccaatcgtgtgactaaactgctgatatatccttctagacattca

SEQ ID NO: 43639 - DNA, 3083 bp, Cannabis sativa
  modified_base (1294)..(1299): a, c, t, g, unknown or other
ccaagatgccacaggccttaaaaaagccacaggctatgcagaacatgaaaacagagtctatacaatacaaatatgatgctgaatactaataaaaattccacctacatgtgtgcaagggcagtaaaagatgaatctggagccgccaagtgagatccacggagtctaggatggccccatcatcactatgttggtaggcctggtgggcaacatcctggccagccacctcctccatcggtgggttggccagcacctcctcacgggtacccgatgattacccttctcaatgagcaatggtctagtcaatctccatccagctttcaaacaatgccctctcacgggccagtgttttctccacaaaagctagactacccatgtatgacaaatcaactttagagatgtgcaagcgaaactcgaagtaagtttaaaggacaggtcgatgtaatcttccttaatggcctgctagccattgagagtctcctataacttcttcttatgttcctcaagattagtctgtaacccagagatgagagcatcttggttggtgttctcagtgttcttagcacttagcttaatctccaatcagagaccattctctgcttctctgctagaaggacctctagctcggaatcgactttgtcatttgtggcaagggatgcctccaagaccttcacatgctcctgaaaaagtgtttgaagacccctagagctgtcacgagtcgaactcagcttcatcatggcctaaaaacaaagaaaaacaacatcagtatcaaacagtcaattttggcccccccagtcccctctttagattgccttggccgaatagacccctatatggatgcctaaggccggccaggcacatgcaagcaacaccatggccggccagcttatacaatgccaaggagatgaacaaagtagaaagcataactcactagagaaagttcccaaagtctgacaaaatacaacctgtcaagcacactgccacctaactcctacaaagcctaatccaagaaaaggatagccctctctatacgctgagtggctgactcagcagccttcctaccagcacctgaccccgctccttataccttggccggtcagttgaaccataggctgtccggcaggtgcagacccgggtaaagggggaggcagtgatggtccactagcatctgcacagtgagaggtcctagccaccttggccctcacccatccggtgggctcatctgaaggcccacctgcgagacctctaaatctggaagacatgtttgcaaaaagaaagtagcaaagtcagaatgcannnnnnaatattcaatacaagaataaaagcatgatgttataaattatcaaataccatcatcatcaaaagaagagctatcaaagctcacaaccatatccttacccttgcccctagatgtagtcacagggcgtgtaggtctatcaaaagtcaggccttttagcccaatatgaagagaagtgtcacctacttaacccccacgggccaggcgcttacagagagctctctctctcctctctagattttgtacaatacaagacaaatgtccttcttcatcatccaagttagggccttacccatctccagggcaagccacacagtagctgacactctcgcaacgccaggagcagggagtacaagccatacatccggaagttgtccatgctggtcaaccgaataatgcctctctcttcagctggcaaagaaaggatgtgattcactttatcccttgtctccaaaagtagggatggaatttctaaagagcgacaccaattgaaattcatggtgcacaattccgcaaaggccttgtgccattaagtattttttggcatccttgccaaactttgacatggctttgcagttggtgtcgcccagccattggtggccaagctggctgaaataaaaatagccacttctgctctgctttggcccaaacttcaactcaaaatagtaaccaatcttgtaaggggtaggtggaggccaaccaagctccctttacaagacaaatatcactaatagatatctaatgctttttggcatgagatgtgtcaggcacatcccaaagtaagttgcgacatccagaaagtattgatggagcggcaacaccgctgcctgttctatgtggtgccttaaccatgccaaccaaccgaactgggagtgtgcgcctgataattcttgcgaggaatctcacaagagacacccctactatgccactagtaatgaccttatcaaaggcctcattagagagagcagaagctggaaaaacccaccttgtcttaggtggtttcgcatccaatatctccagcatgggagactattctaggacatgatctaatcctagtactaaaggcacgccaagcccatttagcaaattgcctcaggcgtcataatggcccaaagggcagtcagggaggatagagcatatcctatatctcctccccctcactatagcgacctcctccagcttagattcagcattggagctcccagccttcgattccacctctggctcagcctcagtaggagggttggagaactcttcctccactctaatttgaccttttgtcgccaccatggccacataaggatcatacgggggtgccttacgcaaagtttgtttcatccttgcaataagtacgaggtgagcagaagacctacacaactgtcacctccccaattcaacactgagcactacctacatggaagaaatgaggggaggtgagcaacctgactaagctataaatatattcaagtcaacgacactcaacgacatcttccaggtaaaaaaagagtgcaaggttgaccaacgaccaagtatcgtcttaggtacaattaccaagacacatagtaagtcctaagttgcacaattaaccataatggactcattatctaaccttatacaaagtatccaagagaaaccacacataaggccacagttgtatatgcctccaaggccatcacaagaccctaactatggtctaaagagggagaaaactggctatgcttggagccttgaccttggccggccagggttccaggtctgagaggccggccatgttggaaattattttacc

SEQ ID NO: 43640 - DNA, 3012 bp, Cannabis sativa
taaaataagaccaaacaaaggaatggatgaaagttgtttcttttccattctattctaattcattacctcaaaccaaacaccacctaagagaaaattgcatatgaatagtttaaagcaacaaaaaggaaaaccatttaaatagatagcagtgttgtctatgatcagcctctataagctctgactctatagaatctgagtatcacccattccatttaggggaggtctacggtacagcacctttttgtgtggtatcagtacaggttgctcgacaatgttggatcttaaatttttttcatgacggtatttattatagtaatagtgggcctcctatcagtttttgaaaaaatttctaatttacagtgccgaaaatagagttcaaataatttattgcacatgtcgcatgtaaaaacaactgctttgaactttgctttcagcactataatataagctattctgaattttatctttgtataatggagtaattcattcagattcctataatatgaatagtcaatacacaaaaactgcagattaaacatcaaaactcactgttggaacaaaaattcttgatatctgatcagctagtttttggacaggtgctcgggcaagctgagcagcttcaacaagttgaacaatctgggaaagagcagtctctgatccaacatgggtggccttaactagtaagcatccattctcattcatggtccctccaataacctatgatcaaaacatcgaaaaatcatttgcattgcccatagaaaactcgaatctttgtatcctttctgatctatcccgacgatgttatttgtattgttgtaaataacaaattctacattgttacaaataagatctccagtaagctatttataccttatcgccgagtttctttgcaatgggaatggcctctcctgtaatcatactctcattgacatggctttgaccatctatgacaatcccatcaacaggaacttttgctcctggaacgatcttaataatatcgtttttctgtatcaattgagtgttaatttccatctctgaagtgacatttccatctccatctagtgttaccaaatgagcagaatctggagcaagatcggttagcttttctaaggcatcagatgtcttccctttcgctacaacttccaaatattttcctaagaggataaaagaaatcaacatggcactagtttcgaaaaattcttggccttcaaatgtttctgatgtcaatgacttaatcactacataaactgagtagaaatatgcagcattagatcctagcgcaaccaaaacatccatgttagcagattttcgcctcaacgcatgatatgacccgacatagaacctgaaatgaaaatgctgaaattgtcaaagataaccgaaaatgataacagaaaactatgtgaaagttgctaacactaaaatcataccttcggccaacaacaaactgcaccggtgtgcaaaggatccaacttaaaatcatcccgattgagagcatgttgtgaatcttatagtcaagccaatcaccataaggaggaagcataggcagtaccattgagaacataaatattggaactgtaaataagcaactcacaaaaaattgattcctaaacacccgaatttcatgcaactgttcttcctttctttgccttggaggaacatataagcttgcgctaaaagggcttggatcatgtcctgcttcttcaatgcactttataagagatcgtggaccggttacatcagggtcatagctaattgttaccttatgttctgtcatgtcaaaagaaacatcaaccacaccgggagttgattcaagagaggtttttattgttgttatgtcttcgggattattcacaccttcaagttttagatgtactttgtttccttcattcccggagctaatgagagtggctccaaaaccagcatcttctattgcttcaatgatgtgatcagtatcaataacactcgaatcgaaatggacctttgcttcttcaagtgttaaaccaaccactgcttttttgactccattgatcatctgtagagcgcgttcaacagattcagagcagcttgtgcacgccattcccttaattctcaaccgacatactgctatgtcttgttcgggaaactcctcagctgtaaaacctgtgtcctccaaagcttccttgattgtttttacctataaaagatcttcatcataagtcctttcgatttctaaaaacaagaatatttactctcttatggaaaagaacaatgcacaaacttcataatagcttacattaatcaactctggcacatatttgatcacagcctgaccttgaagtggcgataccatgacacttcgaaccccattaagctttccaagtgcagattctatggatactgcacaagatgcacattccatacctcctactctgaacataatgctgctcattttctcatttttcttgtgctccaaatcaggaattgtgattgcaacgctatcactatccgaacactccaatagaggttctttaagttcagccactccattagcttccatctttatgctgcagttgttcaaacacatcaatttcaatacattctgaattcttaaggtgaaactctaaggcctattacacaatataatcaaatgacacgacgtttcgagataaagatgaggaaagaaactgttgaaattgaaatacaatatgtttataaattggttaacacaacacaacacaacacaatctgtgtaatgcatttataaataatgggccatgttcgagtagggtcaactcaacttaacttcctgtttacaatagtcaatttgttgtttcgaagagagaattgttcccaaatattttcaatagcacccaataatttcaaatcaaaattatgaaaatcatacttaaagcatgagaaaattaaataactatttaacacatcgactaagtttgggattggttggtggtttataactacttgggcaaccttcattcttaggatagtcttttcggattgagttctacttaagta

SEQ ID NO: 43641 - DNA, 2342 bp, Cannabis sativa
ttttggtgttgtggttggagtgaagatagtttttaacatcaaatttggtgatagtgtgacaccatatttgatgagctccttggagatgctctaaggtggcgctaatgagcacgagcgtagtaatttttgcttatattgagtgggatgctctggttgaacaccatcccatgacgtagtgatcgttgttatatatatatagaggaaattagtatatgcattgtaatagctagaaaaaagtcttcttagatgaactagtctacgccgtagtacagagttgacttaatacgtcactcaatcacaaccaaaccagttcttcttgaaacacgcaaatcaagtactaaagaattatttagtacttcaacaaatcacacctcctcctaattagaaaaaccgtactactgttacgtttttggttcctgtaacaatttgaatgatgattacacttttaattaaagaaaacgaagaaataaatattataatatttccaaatattaaataaaaaaaagtaaagagtcaagcttaattatatatatataaatattacggtaatgaagataaattttcttctatatatataaatattttcagtaacgagaactacatatttttatattaacttatagtttagaagacactaataataatgaatctatggcttgtgtttctgggtatagatatagtcggtatgagcaaccaaagttcttctcattaagcattcctcttccccaatcccttcacagctaatatcatcaccagtttcaacttgctctgcttcaacaacctgatttttgcacaaataaataaagaaaacccattaatcgaatttctaaaattaataataaaaaaaatttaagaaatttggaaaaataaacctaccccatgttgggttttggaagtatttatggctgaaaatcctggttctggccgagcagcataggttatagtggagcagaagaggagaagtgatatcaagaacagggttttgagattattttttgccatttcttgtttttttcttttcttatttttttcctttgcaataatatatgtttgagagagagagagagaggagagatggtttaagagaagagaaagaaggtgtgaatttataggagtgagataaggaatgtgacatatgggtgtgaacttagacatgagctaatgtagactttgaaatgtggacaaaacattattaattcagtatatatttttttttgagaaaagaattcagtattttaattaagagaaaaatatattattaaaataacaaaaagataaaagagtttttcttttatatatatatatataaaaaaagaaccattgttaatatcgccgcttaataaagatttgggctgtaaaaataatcagccgacttatatcgacaagtggaaatagtgtgacagagaggtacctgtgtgatcattaatttataaaatgagtaaaaataaaaagatacctaaactaaaggaacttattcaagtaataaacttgtaaaaagaagccaagaatttccagctaatcatgtcagaaagacttgtgtaatgatccttattccagtgctttgagatccaaatataatcaaagttaagaaaagggattcttataatcctagatgtttgatgtatttttatcgcatcaaataatttgatatttaatttgtagaagacttgaaaagttgaactataattacttttattagttaaagggggaagttaatttatggataatttttgtatttgcaacttaattgcaccaccctaatgtatattttccctagtgggacatatatataataagtgggattatctataaaaaaaactccttcaaaaaccgcgtttggtaatgatatcaatcagtgacctattttcttgggatatatatatatatatatataattatatattatcaatttttctttgtaatttaatatctcaatttgtgtcctgcagttatgggacaaataggtgacattctaagtagaaaaatgactgtattccttgttcgatattagagtgtgtagtgtgtcaaattggtaagacactgttaaaaattgtctccaataattaaatttgttatactaaataaaacacaatttttacatcattattattatcgtaatagtctacacgaacgttctaccaaaaaataatctacacgtacgatccctcttgtgccctttctcaacagactaatgtcttttttttcctcaatttttgcaattatattggcacctccatatattctagaagacgctagaagtgtcactatcaatataaattacaatagcaattggtaatgtattactctctgtcaactaagaatttaaatgtgaaaaaaaataa

SEQ ID NO: 43642 - DNA, 3140 bp, Cannabis sativa
ggtatttttaccgccaaaaataggacttaggtatttatctgctacgcgacataaaacttaagtatttatgccacaaattactcttaaacaaatgaacaaaataatgaaaattagaaaataaattaggctctctaaatatcttttttattgttctcaaaaacaaaataattaaaaaaaaaatattttgttttttgtcatagattgttatcttatcttctgatagccacgcgtcgctcaaggaaaggaatatattaccgtttggaaaacgattctcgcttgaaacgacgtcgttagccctgtaatgttcaattagcatactcatactgggcattggcattacgatacgaccacctgaggcaggcagcaagaagaatccatggcgggttctggcgggaaaggagtgggccagatagtcactggcttgggggaaagtggactgggaaaggctttggccgccattgccgctgctttcctcttccgcatgttctccggccctggcccagcactcttaccggagaactgcgctgatgacgacgacattgacgaccaaagcgattttgatggaggtcacaccagaaaagttgttcccgtcacaatccggtggcgtagcatcacctgctcgctctctgacaagtcttccaaatcagtaattgcttcttattattcttctgtttttttgccgataaaatgtgggaactcgaactagattttgagttttgtttatgtattaattctaaataggtgcgatttctattgaaaaacgttgaaggagaagccaaaccgggaagactgttagcgattatgggtccgtcaggctcaggaaaaacgacgctcctaaacatactggcgggtcagctaacggcgtcgccgcggttgcatttgtcaggtttattagaggtcaatggaaaccctagtatgaagaaaacttacaagtaagctttaggctgttctgtttatggagttttacattcgactgcattgcgtttatggttttaagttaagttgttcattgtctatttgtctcaggtttgcttttgtgagacaggaggacttgtttttctcgcagttgacagtacgggaaactttgtctctggctgctgagcttcagcttccggagataaccactgtggaagctagagatgagtacgtgaacaatcttttgttcaaaataggcttggtaagattcttaactggatagagttaggtgttgggttattggaaaagaactgtttttgcattagttttgattgtcatgtctgaggctttaagcttattttgttgaaattttgttaatcttttaaaggtcagttgtgccgattcaattgttggtgatgccaaaatccgtggaattagtgggggagaaaagaaacgtttgtctctggcatgcgaactaattgcaagcccgtctgttatatttgctgatgagcccacaactggtatgtatactttcttaaaattgtgtttgttactgtgtcatattttaacgttctgaaatccatgttgtttgaatgaaaagcatcctataagttttgtaagtcacttctagtctgaaaatataatcattaaagataagtactatatagacattgcacagtaagggaagtggccatcatttttttattacttaaaatgtttctggtcccttatagacacccagaaaactttccttttttcttgaggatttaaacttgtcaaaagcagaaatctagctgattcttcaaatgagattcatgaaaatgattatctgcggctctgcgcttctttcagggcttgatgccttccaagcagagaaagtagtagaaaatctccgacagcttgctgaagatgggcatactgtaatttgctccattcatcagcccagaagttcggtgtatagtaaatttgatgatattgtcttgctaacagagggggcacttgtttatgctggtcctgcacgtgatgcgccactggagtatttctccaaattagggttctccactaatccttgtttatcttaatactttttgttctatttcttttcaatgcttattatgtgcatatttattaaatctttatgttagggatatgatggtcttatattctgtttcatgtcaccaaatctcatttggatgttttgaatctagaaccattaatccatgtgcatgttgtctaaaatgacttctgaactctttttctacatataattggtcagctttatacaagcattagatattatctttaaaaattaaaataatgttatcaccttaattatcagtttttttttacttgcatttatcattaagcagaaactttgggctttgaaacagtttttgaagttgcacttcttgtactgtaccattatgatttcatggctactgatttctgaatatactgactgaatgatttatgtttatacagatacagttgtccagatcatgtgaatcccgctgagtttttggctgatcttatatcaattgactatagttcatctgcaagtgttgactcatctcagaagagaatagatggtcttgttgagtcattttcacaacaatcttcaacaattctatatgcaactccaattgcaataagagacgtctccaaagatagtgtaaagtttgaaaggagaagaatagttagaaagaagggaagctggtggagacaattcagcctgctccttaaacgtgcgtggatgcaggtcaatctttcttactattgctcatattttcagtatttatccttagtatggcacggaggaaattggagaccaatacttagactactttttaatattttaacttgctatatttattttttgttttagtattcttctagtgttgcataatttatgggagctgacttgcatgtgtagtttttttttttgctctattgtaactatggttggtaggagagtggggaaattggaatgatgaataaattaagggaggagagagggggagttggaatgatgaatgaattacgtcagatcagaattttggcgagttgttttggatgaagaccttatggaaaagtagatgtcttttaaagttaaagtctttgggtggttggtggctctaggaaaaattaatatgcattttatgatgcaaaaaaggcgaccattcctttgtatttccccgggttggtgtgtttgttgtaagaaaagt

SEQ ID NO: 43643 - DNA, 3375 bp, Cannabis sativa
  modified_base (55)..(59): a, c, t, g, unknown or other
taaggctaaataaaaaaaagaatcgttaaaccaagaattgccgttagataggcannnnnaatatataaagatatataaaagaaggttaaaagagaggtgatgtggcaagtttatgagctttttttcctaatcctaattatctcaattttctaatttaattagtttttttattctatttccttatttaattagctctaagactttatttctctcatttaagtttgtcactaattgtaacgcattataatatctcccaacaaattctcctagggtttcatgtcataacataactgaagctttctaacttttagaattcattgtccaaaaccaccatatcgccccttctgttccaccaccatcggtctaccaccatcatcatgaggatggctctgccatagcagtgtgtggctatttccgcatttgaagctgtttctttttcttcttcttcgtcatcatcacctctcgccagccacctccatgtaagctctttctttttgttagttttttttttttttttttctaatttagattgtgttctatgaattatcatttgttttcattattaatatatgtgttcaatctcataattaaaataaaaagaacctgactctatgattcagcattatggattgttttctaggtttcgtggatctccttgagtgagttaggatgatagatgtagcgaaaatggtttgtaagaatgatacctgtgattatagtataaattattattttgatgtaatctcacattagataatctcttcatcaatttaggcaatttgagaattgctacttttcattttacttccttttagcattttaaaatcatcaaatgtccttttttgtaattgttctaataattacaaatatgattatgaagtgtgtgagtccatactttttttttgttaaaatatattaatttgatcgtcatttaaccaattcaagtatgtattacatatgtgtatatatatatttataaaataatgtggaaccaaatcaataactccttaaacagtgttgaaaaaatcacctttagcgattctcatcaacaacaatgacttttcttattattgtaatatgatcatcatctcctcctttggccaatcattatatattgtttaattaattctaattttaaagagaatcttacttccaaatgacacaaaaataatttgttttgtggttttgaaagcaaattcttaaagtttttcatgtaacaaaacaaaaaatatcaaattataagtagtaaggttatttatttttatttttttggatgcatttcgtcctttattaatatcaaaataatatttaaaaagtgtttctcactatgtgtgtctcttgcatcaattcattttgtgttgcacacacaagcccctacgcaccacacacattcgatttgatgatgtgttttatagttgcatatgtaatttactttctatgtcttcaatagattaaagttaacgtcatgatctctaggtgctttcattcaatttaaagctttagctgaaaatcaatttgacactaaaatcaaacaactcaggtctgattggggaggagaatatcaggcttttgctaaccttgttaatgaatgtggtatagactttaatcatccttgtccccatacttctgcacaaaatggtcgtactaaaagaaagcacagacatattgtggaaatgggcttgacactttttgctcaagccaatatgccactgaaatactgggttgatgcttttcaaacttcagcatacgtcataaaccgactgcctactcctgtgttgaatggaaaatctccctgtgaagtgttgtattcaaagaaacctgattataaattcctaaaaaacctttggtacaacatgttatccttgtctaaggccatatcaaaatcacaaattttagttccattcaactaaatgtgtcaatttaggctacagttaacatcacaaaggatataagtgtttgagttcaacaggtcgattatatatttctaggaatgttatttttaatgagaatgaattcccatttaaaaatggcttcctcaatacacataaaaaaaatagtctgttaatgtcacaacaccaagtacctggtccactttaccaagttttcagcctcagtcagaagaaaacatacctgatgtccctcaaaacactgaactacctactggtataagcactccacaagctactgctgcatcatcaccaggaaaggaacatgattcatcacacactagtcaggtagatcttactggacatctttttgttgatttaaacattgaccctgccaacactactatcttggatagtcaagaagaacaatttagttctcagcagttgtatgcagatcagaatcaggagactactattgaacagtcccacaagttggtcatcacatgacaacaagatcgaagtcaggtgtggtcaagccaaaaatttacttgagcaaaacacagtgggaagacagtggaggagaacctatctctgttgctgaagctttgaaacacaagggtcggacaagagccatgtcagatgaaaatgtggcactaattaagaacaagacatggattctggttcctcattcaccagagtataatgtggttggcaacaatgatgatggatctctgcaaagactcaagggtcgtcttgtggctaagggatttcgtcaaagacctggcttggattttggagagactttaaacccagtaatcaaagcttccacaatcagaattgtcctcacaattgcagtcacaaacgactgggaagttagacaacttgacatcaataatgcattcttaaatgggaaacttgaagaggcagtttacatgacacaaccagaaggctttatagaccccaaaagacctaattatgtgtgcaaactccaaaaatccctttatggtttgaagcaggcaccaagggcctggtttgataggctgaaacagactctgattgagtgggatttccatcactcaaaggcagatacatcattcttcatactcagaaccaaaaagttcattattatggctcttgtgtatgttgatgatattatcatcacgggtaacaatgctactaaacttgaaaggtttgttgtgaaacttaatcaaaatttctctctgaaagatcttggagcattgaattatttttttggtattgaagtctacagggatagtacaggaatgtatctcactcaaggaaagtatgttgttgaactgttgaataaattcaacatgatgaatacaaaaccttgtccaaccccaatggttgctggtaagcctctgtttataaccgatggtactgttgggttttgtgccctaaataaaactcattacaatctaatctgattagttatcaatttaaaagatttgaagtgatttatgttaac

SEQ ID NO: 43644 - DNA, 1616 bp, Cannabis sativa
  modified_base (38)..(49): a, c, t, g, unknown or other
tgatcggtttgatcacatcaataataataataataatnnnnnnnnnnnnaataataataataataagagttatttctctacaagtagtcccaaaacaagaaaaaaacaaaatcacacaaaagcttaaatatgacccttttgtttgtaattccaatatatatgaaatatacccgtccctcaataattaaccccagtaaattattaaccatatctatttgagaagagggttatccttatttgtgatgctgcaagtccgacgtatctctccttgatttccagtcaaaacatttatatttcccattcgattcattgaaagggcgattgatagcttgaaatcttgaagactagcggcaaactgatcagtaaggtctttggtgtcctccctatagagcaactgctgatcaactccaaggatggcttggttattgttaactcttctatagaaggattctgtgaaactgtaatggctgccagattccgggttcaagtacactagtgggtcgctttgccctttccttagtctctctggacactgttttctcaatgactgtaccaattcaggtttcatggttgggtctggtcttttggttcctttgaaattgtatagcctgtcttcgatgttacgacaatgtgttcttcccaatgtgtgtgcacctgaagaagatacaaccaaataaccaatatataaaatattgttgtgtttctttaatttaattaatagaccataaaacacaatagtaaaaaatatgtatcttaaaaattaccaagaagtgtaaccatgtctcgcacatctaaacctttagagttgaagtatgcaagtgtttcattgactgacatggatggagatggaatgttcactgatgaagcacttgatgtcattccatctcttcttccggtaaggatgatgtaagatggtccaccagactaaaaagaagaagaagaagaaggatttataataaaatatatattttgagaaaatttaggtaaattaaagaaatgagtgattattaagtatataatagttaattatagtctagtgtaccaaatgaacggcatctctagtggcaagttgaagaatatcagcacaagagaccactcctgggcacctttcttcaaggactttcttgatatcgtctattaaagcaaaccctccaagtcccctattttcaagggcagttttctcagattttggaccatttagaagaattgatgcatcacatccctacattattcaaccatcacatataaacaaattagaccctaaactacttttaggtaatagattacgctgtcatccatgtaaacttctcaaatccatgagtatttatatatttattgaataaaaatgattaaatataatatatattcccatagtatagctagggactttattatatatattgctatattattgatattggactttattatacaacttacggcatatattgcaatcccatagtttaataactgttattgaacatgcccaccatatcaaatacattttcatattatttattcaatcaaaatatgtgtcttaacattttcttttaaaataaaagataaaggactgtatattaaatcacatcaccacaaagtggtattatttccaatag

SEQ ID NO: 43645 - DNA, 1559 bp, Cannabis sativa
aatttggattagaaataaaatataaaatttacaatatcaaattctatatttatcaaaatagtgttgattagattagatgaaaaccatagtgtacacacaaaattcaattcacagcccaaataaatatggtttttacctttttttcttcatacaaatacaataaataaacaatttatatcctctaattaacttcatgatcataggccgagcgtgaatggcacgccggtggacggtaaccaagacctgccagagataagacttccggcagtaaactgtgaggccacttttgtactagtaatgacatgaaaaccaggccaccggactctgtgtcttgttgatgaagctggtccaaaattcttaaactctccataatacaacgttttaagagcaaagggggatctattccactccaaccagcccgctgggctaattacattgtccaaaaaacacttgaggaaaatggttctagagtactgcttccagggtcggcccaagaaagtcttgaaggccctaaccacgggcaagagatcaggggcagcccgtacttgagaattatggattgaaattgctgtgctttgatatgggtcgttacgtccttgggccgtgattacgttgacttggccctttaagggtcttctaacgtagattatgcagttctggaagaccactgctgcgttaccaaagatgaaatctatggtcccataaatgtaacattctttatagaactgtctttgagagtggaccataagagtgtcttggtaccccatgaaggaacatcgatagaagactgatggatctgaggctgatctgagggccacagcttggcccttttgtgggcctgctgtgttttggaatgtgatcccacgagcaatgaatcgaagcccatcaatgccttaagtacaaaaaagaaaagtatttttgaaaaattagtcaaacaacaacacaataaaaacagaataattttggtacacttccatatacatagatttcatgaattcaactcgtgaaatacttgactttgtttggtaagttaactgttgtaccaaacttgacttaatagactttccaaataaaatgggggaatttgcactattagactgtgaataatgttacaagtatttttcaggggaaaaaaaagttaaaagtgtctttctggctaaaatgttttgacatttgacaaattattcaaacattaactaatataatattttcttttatacactttgggctctctatttttacttcgttcattctaatactactttgactctgtttcaaacaagtacaaaatagaacatacatgttttgtaaattggtaaattgaccaaattctttacccgatcgactttggctagttgtaattggttaaatatttcagtaagcttctgaaaaaaaaaatgttgtctatccaataatttcattaattaattcaatcgggatctttagatttgaaaaataataggtgtgtataaccaaatagcaaatgctcattaaatatagttgacttaagattgtattttgtaattgtataaaacagattgtacaaaactaatagtaga

SEQ ID NO: 43646 - DNA, 4218 bp, Cannabis sativa
atatatttttacaatttgaaactttttgtttataaaatacaaatttcagtatactatttgatattttatttattattttataattaacttctcgttttttactatcttcttaatttttgctgaaaatatcgtatttttgtaattttaaaaatgaaaactttaagtaatacataaaaaaatacttttgtttgaatttcaagttttcttttataaggtacttatagtttcttgtttggctaaaaaatatgtgaaattcaatattaaattgtcttcataataatgagcaaatcaaataataagccagaatttaggagaacaacaaaatagttatgaaacatcactcatttgaattggaagactagttttgtagaagagtttttaaagttttaacaataatttgatattaaaaagagttaaatgttatcaacaatttcattttaaatgagatattccaatggaaaccataaatagaaaatgctataaaaaatgctatgaaaaaatgaggtagaataatttagcccccaaaaagaaatccagctgcttgatcctcatttccattacatagcttgagagcttctatgactgcttctcttccgaatccgagctcaaccagcttcgaaatcttgctttcgaaatcggatccctgagcagtacctcctatagaaacaaagaaaagataaagttttgatctttatgtcccaacttgtaaaataagtcaagcaagaaaggttattgtatcatccgaatcgaaaaactcacccgaagattgggctccttgtgatgcttttttgctcccatccattgtacttcctgatgccacctgaagagtaagaaaaacttgagataagacttacaaaatcacctaatgaataacaccgaaagacgttttagattcttaccccggttcccgagctggatgcttctttggatagcctttgttcatccaaaaaatgttgtggtatgtctttctctgtaaagggtttggttcatttcggttaatatcaatttcagtcaattactttcgaaaagcttaacggatatgacattacgaaccttgaagaaacggtacagaaacctctcctccaccgactctcaaaacattatccttcaaatctatgctgcactgaatttgtgtaggggtgtttcagaaataatacaaactataaattgccgagattagacgatatgtactacctgatgcttacgaagcatatccagtccgaaaaggaattccatgttcggttgatcgagaaccatgaaagaacaaggatagaatatgtttccaatctacagagatcattcagcaaaagtgatatgttataatagaatgtttttaaagaacacaaattaagacaaccacattggaaagaaagatacctttattggagctacatgaattttgcctaatatctctgattgaccaacaccatgagcaatgcccttataacgtcgatctaaaagccgcaacagcctggatagataccatacgaacgacaaaaccacaagaagccttacaaattaaacactcgattcgctaatcatgaatattttgaacaacaaaattaactcctcaatctaatcaaagaataaatatgatttttgttcctgaactatgacttttatagagttttgtcctctaaacttttctctattgcaaaaatttcccccgaactgtgaaaatggttgcaaatcttgaactatgctagattaacgtcatgttagtgctatatcagcaaattttttaaataaatgaccataatgcaactgtagggagacatttgcaacaatttttatagttcaaagagaatttttacaacagagaaaaattcaagggacaaaactttacaatggtcaaagttccggggaggggggatagataagtcctatttattcttaatcaaatcattcatactctgttggtccttgcatttatgttagtgctttgtagtaaattatgataatttccaagtttttgtatgacaagaactgtgatcggaatataaaacatataaagcacatacccacaacgctcggcgcagcttttggatataattgttgactgtgctccgctatcaacaaatgcctggagagaacaaatcataatcagcaactattgtataaaacaattggaactgaactcaacaaggaaccgaaacatgtcaaagaatgctgctcagtcatctcaagttcaaaaacttaagctgttgaaaagaacatcgagatattcttaaagagtttcaattacctttaatggtactccattgacctccatgtcaacatacagcataacctgaagagtttcaagaaatagattcaattaagtactcaaaatgaccggggaaggaaggaacggtaaatagagttgaatattttacataccaccctagcgaaaccttctgggttatgttctagggcagctgcccaattttcatcaattcctttctgcaaaatgtttagaaattaaattaaaaagaagtacagagtcacatcgattgagtgttaactaaacatatataaattacctgttgaatggcagcttcaattttcttttgggcttcaacatcaaagggatcagcataaagaagggcctaatcacacaataacagaaaaaatataggtaaatttggacttcgatcaaatacaaaattataattaattatagtgacaaaacaaatggacttacaagctcttcgtcttgttgacgcttcatgtcagatctttggcgatgacgttctcgtagaagctcctgcaatcgattgacattgtccccggaaatagcttgtgctaaatcaggatcggtctgtagaagagagaacaaacaagttcaacaaagagttcatacaagatagagcttaattctagttgaaaaaacttggctagtttacatgcttcaaaatcgagtaaaaataaagaaagcctaataagaaacacaaaaccccctctacctgaaacaattgtgccatcatattggaatcacttcgaaggtgtctctggaaagcttcggggtttgcagcagagccatctggattcatgcccaactcattggaggcggcactgccactggaaggataaaagaaacattaattggcacacaattgaagtgaaaaaacacaaagtatactccattgatgtgtgagtcagtaatatgttgtaaacatataatattgatagtaaataagtaatagatgagtatattagggaagtggatgagctagacatgccaaatcgcttcaaattcttagttgctgagatgaaatgtttctaattgagctgtcctaattgtcctaaggtgtgtgagcttaacacattagggaagagtttgtataaagtgagtgaaaaattactcagggagataccgaactgtctagaaaagtttggaactttgtaattctttccttaataccaataaatacatatattctaattctttcaagtactggattagatcaatagtgtatcaaccttgtggattagatcaatagtgtattggattagatcgagtattgaacaactaaccgtttgagttactttttatatgtttttatctgtttgttgttcgaaccaaacacccccactaaggtttccgtatattcaatttccatcaatcttcaattctatctcaatttatccctatagtttctatgattgatttgtgaatggatccctactgggagactaaccataagcatctttcaaaagacagacagtaagtaaaagaacaacctttggtccacaaactatgagcttaaaagaaattcaaatttcacaaccaaacatcttaaaattccataacaaatcacagaacaataaatgaaagaaaacctataatagggaaatggatgagctaagagtagtatatatttttcaaagagccagaattcctatggaaattgctatgtagctagctacctaagaaaaactcaatcctcagaccttgtgggagcaattcacatgcctaatcattcgagctacttctcgaatacatggttctaatatgtagacacccccactcagatttgcctaaatattctatctcaaacaatcttcaatgccatctcaatttgtccccatagtttttgctactgattggtggatccctacttggagactaatcaatgtgcatctttcaaaaacagtttggtccacaaactatgagcttaaagagattcaaaatcacccccaaacatcttaaacttccataaaattaccatcaatctt

SEQ ID NO: 43647 - DNA, 1887 bp, Cannabis sativa
acatttaggtgaatctgcagaagcctaactcgaggtttgcaaggtacataatggaaataatatcattaagttaacaccagaaaatataagtttcaaaagaattataagaaagagttgaagtactagtgaggctcaatatatataaaattaattaatgtacatgaagtaataaatatataaacatttacattagtgcatcatcatagatagtttcttgccatagagagttgtatccactatgttcttgatctaaggaataagaagaatattgattattaatattatgagtactagtgctgatcatcatctcttctccaaagtggtacatataataattcaattcatggccaggtgatgaggtaggtagtacttgatctgcttccatgctgacccactgatcatcattattcatgatatcaatatcatcaaatgaaattattgatgaacaataatcatgatcatgatggttattattattatcatgattctccattaaactgcacgattcatgactatcttctccatcgctaattgaatattcgtggtctttgctattatcatgatcagagtccatagacgacgaatgatcttgttcatcatcatctgagtaatttgtactgctgcaattgatctccgcttcaagagactgaatcacactattcaatctatcctcatcgctctcttccagtacaactagatcatcatcatgatcttgtaattccttaacgacatcaaaaagtctccattgatgagtccagctgacacttcaaataattcttcattattgaactcatattgattaatgatcatgtccacagaaccagccatatttaatatcttgaatatataagagatatatagtagagtatagagagaaagatttatgtatataagattaaatatcaaagctcaaagatataagtgatgaaattgaatgagatgatgtgttataactctaaggcatggcctttaaataggtatatgtagccacatatatatgaagcggccaatgagggtgcacatgtatgtaccaaatattttagtaataaaaaataatgggtggatataaataattcattattcatgcatatcaataagatagatagggagtagtgtacgtagggtgaattagtggaccactttcaatgttcgaccattaaagaaatgtctcattgtcgagggctttgctattccaagcaaagaaaaataatgttacgtacgtggagatccggagataaagaaagaaataaacactatgtctgatcaccaaatggacattatattattttcaatattaataaagtatataataaatagttaatattgattattgaaaaaagaagatctttgacttggattttccgggagatggatatcttgatgatggggtctccatcgttccacaaccataattaatatatatatatatatatatataaaaataattaaatatgcaaaaatgttagctagagcgcacatcatgatgagaaaactaatatttgatattatatatgattctgttatgattataattagttagcactgtacgtatttaattagttatatatatagttgattgtctatataagggccattaaatcatgatttacaaactatagtcattattttcttgattaattgttatggttaatttgcatgctatatctatatagttaaaatctatgacttttatatattaatagattcatttttgttttttgaacaaaatagattcattttttaaaataataatatatattctttttgctttccttttgcaccattttatactgacattaagaaaggccgtgaacaaatttaaacatagatatacaaattaatatgggatgtcaattaattaatacactagaataatgtaaagctata

SEQ ID NO: 43648 - DNA, 2032 bp, Cannabis sativa
aggctaggtctggttttgagatgggggtccgggttgaggtccgactatttagggcttgggttcgagttttaggttcggagtttaggttcatgtttggggctaaggtttgagttcgagtccggattggggtcggggtctgggatggggctaaggttcagtctaggttcggggtttggggtctagtgtttggggtctgggtccgaggtccggggttcaagtcggggtttgtgtctagggtttgagatccaaggtctaggtttgggtgtggcgccaaatctaggtctagggtcgaaggtcttaggccaagtttaggattcgggtcctagtctgggttggggttcgggtctgacgttgagttcgagtccaagatccaaggccaggcctggtttcgagaatgaagttcgggtcaaggtccgatcgtttggggcctgggtctgggtcaaggttctaggtcggttctaggtccggagtctgaattcagggtttgggttcgtgattggggccagggttagggtttggggtcggggtcaaggccggagctgtggtttagtctagattcggggtctgggtctccgattcaggtcggggtccgtgtctgaggtcgggtttgggtccgaggtcgtggtctaggttccaagatcaaggtaggagtcagaatccaaaatattgattaggaaaaaaattatttaaaaaaaaaaaattaaaagtgaccttttttttgtttcaaaagtttaaaattttgattatcaattaaaaaattgaaaagtgaaaaataacttgatagaatatgatttcggaaaatatttttacttttctaattttaaaaacaaacaaatgattaaaaaaatattaccaaacataacttaaaatattggtatattttagggttagaacttttaaaaaaattacctctcaaatagtatgttaaatctgatgttaaatttgggatatgttaatatatagtattgtgctaaatttatgacaatatttagaattagtaatttatgatgagctttaatccatattttttaattacagtctttccattaacaatttcttttaatattttactattgatgatcattaattatattttacttttttgtcataatttgtatcttaaaatacttttgtcgcaaatataattgtttttttttttaaaaaaaaaaaaatctagcacaatatttaaggtttccattggagatggtgtttatggttatggattagggctgaacatctgtcggtttggtcgatttttttttatataaaaatccagaattcgattttcggtctggattggtgcaatccgaaaatcgaccgaccaatccagaacttatcttaaaaccgaccgttttgaactacgatttggtcggtttaaactgaatcgaactttatttttttaaaaaatatgatccaatttattctataaatacattattctacattttacaactacaaacatacaaattaattgttcaaaagctaattatcttattcttttaactttaatataaataaaataataatatattattattatatattattagtaactacaatacataaaaaaacttaacaaattaatatatatgtataacggtcggttttggttttttcgatcgatttattacagaaaaagccgagtgttcaatggcagttttaaccgttaactgtttttttttagttttcaattctgtcggtttcgatttcaacgatgttcggcaggtctgttagaacgattttttcaattttctggattttattcttatccaataataataaaaaaaaataatttttagtctaatttatagtattgtgattgaaattgaaaaaaaaaaaaataatgttaaaatagtattattttagtgttaatttaatactaaatttaagtttcgctattaaaattatccttacaacaaaaattaaaaaaaaaattaattaaaaaaatataagggaaattggtggctaaaccacctgaactttacagtttgtaacacttaaccacaaaaactaaatttttggcggctaaact

SEQ ID NO: 43649 - DNA, 2672 bp, Cannabis sativa
  modified_base (2599)..(2612): a, c, t, g, unknown or other
ttcccaccctttctttgcatgtgaatttgcctgatgatttcttactgcaaaggaaatttagtacaaccttttacattggaaaagaaaaactcagacacatactcattttaactttcctatgattgacgtagattatatctttacaagcactacaacccctgttgatacatctttattatagttgttctaaagaatattggaattttcatctcattgaaaaatggtgaagctttatctcctttgttatttatgaaagaaaaaaaaaggtcaaaagacaatactaaacatggataagagagacaacattgatagatataatttgaacagtaaagttagttgctgaacaccttgatatacagcaattataataatgtcctactcttaccagtgagaacagcattgagcaaaagcacaccctacaatggaaattatgagtaattaaatcagagagaaacatttatcaagaataacatgaagcttctattttgtttattctacagaaacctgaacagcccatttttcaagatttccgtgagaaggaacagaacaacccagatcctgcttaagctccttaaaaatgttgagtagacttgagggtatcttaaccccttcggggactgaaaaagaaagacccatggcttgaccagggccatgataaggatcctgaaacacaaaacctccaatattcataatttgattattacattcaaaatgaagatgaatgtgagcaagtacgtacctggccgaggataacagccttgagattatcaaaaggagtggaattgagagcattgaagatcaattggggaggtgggtaaatgtgtacggcggcggaggcgcgtgactcagcttgaagaaagttggaaagggtggtggcgtagggtttgtggagctcaccagggagagcttccaaccacgagtcttcaaccaagaggtcctccaaattgggtgggagcttaccagaagcttgttcgactctgtcggaacacagtttgaggttgcgtttggcattggccaccagtttttggaactcaatgcgggacttttcttggtcggagagaccatcggaatcggaagaggaagcccttaagcgtttcggtggtggatgtgattcagggtgtggtcgtggactgaagaaatcccttagggttttgggtctcaaagccatttcctttactttgtttctgtttctcctctttggcgggaaatatgttagaacaaagttagaagctttgagttgaaaacattctgtagtctcttgttttatgagaaatccttaccagctttaatattattattgcactcttaattatttaagattattgagaatcattaaacaattataaaacaatctatcatggaggtgctaggcacattgatgccccacaataatactttttctttttagtttggtttggattgacactggtactttgtattcgcgaatcgtatacatgtcttgtcgaaacttatgtataaaatatatatatgatcaatccgaacacgatctatttattatcgtgtgagaaaacgaaacctgaacacaatcaatttataaacgggttgatacgacatgacccgtgtaacccgtttataaacatattttatttaaatacgtgaaccaataacactattcaacatgtttatgacttatttatgacatgttaaagtactacaataattttaaatatatcattaacggatcagtttcgtgttagccgtatcaacacgaatacgacccgtttattaaacagattagacgagttaacttaaacacaacctgaacccattcaaggcaaactaaaatccactaactctcgtacaaatttcaagttgtattatcgtgtatgaccctttttgtcggccctagaatgtttggatgcaattgtcttaattatttaagttaatttattatcaacactttggtgctttgtttttgaatccatatgatttcttagtatatatgtgggtttggatcacaagacttttcaatttgtttgttacatttttatctaatttgacctcttccaacttgattatcatctgtgtcttttctagtaacaccaattatggattgaccaatgagtttagatgttattgatgttggtttggtatgctattgtattatgaatgctttcattccaatcaataataataatcaaaaacaaataagaaacaagaaggattatctataatattttatagagagaaaagaaaggcattcttaatcctcacacaaaacataattcatacacttttccaattctcgcacaagagtattagtaatagtaatagtaagatagtaacaagtgatgtatgtggttgtgaaattgaactttttcacaagctgaacccgttcaaaaaacacctggatcagccccagttcttctactacaccacattaatatcccaataactatacacaacaacctaatcaaaaactacaacccttgttgtatgtaataatagtaatagtatattatactaatgttccccattgcaaagactaaatagcaggatctagttctagtactactggtttcccatttccatttccattttggtatttcatgggatcaccattattattattattatnnnnnnnnnnnnnnttattattattattattatgaattctcttattaaataaatgttgttgttggtctgatcaa

SEQ ID NO: 43650 - DNA, 8355 bp, Cannabis sativa
  modified_base (4404)..(4415): a, c, t, g, unknown or other
tataaatatacatatatgaattatacatcaataatcatcatgtcatctaaaatactaaaatgagactagaactttggagtagtgagcagaacatcaaagtcacttaagctccattctgccacttcatctttgtcacttatataaatctcagtccccacatcaatcgaactccatatccttctagctggagtagtccctggatcctgctcaaaccaaacacaaaacatttcatgatgttgttaacgcaaaacaaatctgctaaatactacttgttgattgaacaaacttgttctgttatgaaagtagtaacctgatagtagtagagtctactcgaaaggccacccacatcaagctcccatgtcctgggatcacccacccaaccttgtcctttcttggtgggatagccatagtcaccccatatgggatgtggcagcaactgaattatctcttgcgcctgaggattgctgtaagggtcacaaaggctcacaggctgctccaagtgctgggcattgcctggcgcacagtagtagtggtaagccgagtatgggaagcgggctgtgtcgttacgataaatctttatgttttggggtgttatatggtaaggtgggcaattctgtaagcctgtggggctgcaccaagctggtgtgtcagggttgattatcatctctgtgtatctggtaacatcagttactacttcaccatcacaggctaagccattgttcttccaacagctgcctatgtcgattaggtagaactggctctttggtcctcctcctttcttgatatccaaactcagtctcaccttaaaatttggtgattctggtagctgaatacagtataaatttatacactagagaaattagtgaaaaatatagcattcccaacaaagagtcacatcaagttgaagcatatataatatagattagtagcttcaggtcagagtaatgaccatctgtctactgaatcatgttgaaaacaacttcatgttttgacccaagttagattcccatgacaatattgtattgacatttttaactcttagctattcatgaaaagaggactactgaaaaattgacagtgcaacgaatggacctgtctttctcagcaacgtggcataaactatatagtcgagcaattagtgtaattcaattattatgacctcttcaattagagtaatttgaaaactaaacatagaaagttaagtttcactgaccgttttaagcattcctcttgtgtcataatgatatccaccagaatatccttgagttgcatcagctctgaggtacagcatcagccatggatacttctttgaggtcttgagtttatgattgaagacccaacttccaactccaactttcttttcccaaacaacttcgtagaaggaaatcccatcaagaccatttgcaggttcagaatccaaatcataagtgccattaaaacctcctctcatgctttcaccatacaactcagtctcatcatgtttaaaggtgggttggttcatacaccctttgccaaagcaaggaaaccttgttgatttaaagggtctaacccttttcccatcagccggacacaaacctgagttagtgtcaaagttaccatttttaagcataaccatccaaaactgccatggttttggggtgtctctaacttcacatagagaacccagataaatttctttctgtgctgcgtaaagatctacattgttggcattttctggatttaacccagagaatggagtcccaactccaagtttgttatcttcttttgttaccttgtgtttaagagaagaacctgcccccattacaataaataagtaccagaaaaaatgtacatgaaaagaagagttgagtctagtctagtcttgttttttttttttacctttgagatcaaaacaatcagcagctctggggctgcccgtgtgaggagcttcttggccaacttcattgcaaaagttccaagcttcaaaggccactctgagcccatctcttctcattcctggatctccaaccactgagatgtagttgtcatctggagtagaaccagaagcacttaccaccattaccacattaataatcaaaagaaacagaacattcatttcactccccatggtgttttttcctctctaatgttttgtccaactgggatgggagcagctacctcctatttataagaaaccaagcacagattctgaccaatcgaaatggggccattctcatgtgctcaaggctgcagttgttggttttggtgttacccttttcagttgtaatatttttaatttgattttgattattttttggaagacacttgtactgctacttttgctttctgctcagtgagaatgcacctgtttttttttagtttttcttaaaaaaaataatagatattattaacaaattacagctcttggtggtccaaatggaaacaagcacatcatcagaaaaagggaaaaaaaatcttacatttgttatctttgcttttctttgtttgtgatgagtacttttttgtttgatagtttgacttgtagtaaaagttacgagcaatttggttacaacatacaagtggggtcttaagttggaaagaaaaaaagaaagaatctgtccaaagtccatgttatgataattattaataaaattaaagcaaaaaccaatcgaaatgctctttattctagttttggggtgttttttcttttttcttttttcttttttcttttttcatagctggctaaagagtcacaaatttcaacttaatacccaaatgcactacaactttaatcaagaaagcattggcaagccacagaacagaacagtagacagggtaacaaatatcaagtcccaaaactgtatctattgtcttatatgggaattggagcttgaaaatattcagattttattttatctttgcatcataggctgaaatgggagccaaattcagcaccaatttttcagcactttttataattggtttgtgatattttttaaaagatatttttagaaattatatgaaactggatattcaattacactaatgataatagttgtgagaaaatggcaaagaatatccatacacaattacgtgttatatgagatttcatcaaaaagattagaataatgattaaatcttagagcctaattcagttagtggtcaggctcaacaaatcttcaatgcgaatatcatcttgtgtttctttccaatattcttttcatttgcttgcatgtgaaaagctttagtagtactggtgacatttttattgtttctttctttctttctttccaagatggtatttgtttgtttgtttgtttttatgtatttattttcatagcaaagaaaaaagatgcttttgtatacaccctcttcatttttgttcttatttcccatttcttttaagtaagccccataaatttttaaaaggttcttttgacacacactctaaacaattagtagaagattgataaatcaaaattaaattacacctctttaatatgtattgtttaagaaagaaatatttttacatcctcaattaaaaataaataattttcaagacttaaaaagcctaattaaaattttagttatatccaacagaaataacataaatataaactaaatatatctaattaaccattagtaaaattgaaatattaaatttttatacttaaaaaaaatataataagtaaaaaagtaataaaaaatttacatcataaacccaaaaattttaaaaaaaaattataaaaatacgtcgaaaaaatattcattcttattctttaaactttttatttataaaaatacttattcaataaaaataataaattttcttttttgttttatagtttatttatagttgtcatgaacttatttttctagttattttataatttattttgatttatagttgttgtgaggttaatttctcattgttgtttttttaatttttgttgagtaaaatatatttttataattttaaaattttataaacgtagtttataattaaaaattttaggtcgtaaaattataaataaaacataaaagaatgatatattttaaaaaaaaaaatccaagagtaattagtatataagtgatattttaattttggactaaataattaatttttatttccaaatattttaagaggaaatttatgttaatttggtaataattaagaaaggtcaaaagataaaaataaaagaatgtgtcctttgataataaatattttctcaatatttttgtcactcaactttttacgctattaattgtgtcatttatattacactattttttaataatacctttgaaaatataatttttattgtaatgtaatcctttcatctcattttatttaattttatcgtaaaatgagtaaagtagtggatggtagttgaactttgccaatttttttttatttttttttannnnnnnnnnnntttatttattttttttttcattttgccataatttgaaaggatttcgaaggactttaaattatgatagtcttgtcttttgacatggtatgagtgtttgtcatggtacgtgtattttgtcatggtatgagagttttgtcagtattctgtcttggtgaaaattgaatcaagttttatcatttcgattggtggtttttggttacaaggatgaacaacttagaagaacaatatgcagccattaatatggaagatgatgaagaagagggattgctatttgaagggggaaatgaagaactggttgagatagatgatagatggtgtttggttgggcgtttccttacgtaccgatcaatagactttcaagcaatgcagaacaaaatggcacaattgtggcagccaggaaggggaatgtatgttaaagaactggacaacaatctatatctcttccaattttatcatgaggtggacattgaaagagtgatggaaggcagcccatggacttttgatcgtatcccgctgatttttgagagactaaaacaaggagaaaatcctagaatggtagttctgaacaaactcgaaatctgggtgcaattacatcagttatctacgggtttcatgactgatcgtgtgattaagggacttggtaactaccttggtacatttgtaaaggctgatccgaataactttataggagtctggagagactatcttcgtatcagagtaaaaatcaacatcgattgtccattaaaacgaaagaagaaagtggaaaagcagggtggtcagtcctgttatgcccatttcaaatatgaagatctccctaccttttgtttcatttgtgggattctcggacatacagagagattttgtgagaaactctttgataccccaattgatcaaattgagaagccttttagcttggagatgaaggcagcaccacggagaaggaattatactgcaggagcaaaatggctgcgatccggagttatgaacagaggcggaggcagtacctcctccggcaacccatcaacggtaattcccaacaatcatggtacagcgacagctcaagattgcacacaatcagcaaccggtcatcatggtgaattaaacaccaagaatcaaggaggtgaattgagtcaatcaagaactgtgaatacggaaataacgattagaggggatctccaattaatgcagaatttgagtaataaagagagagctggtcccagaggagtagttgatatacaaggaaatcgtgacaaggcaaagcaagtcaacactgaggaggcacttattgtattagaaaataaaaaaaggagaatgggccttgacaacatacatgggccgctggaaacaaatagcaataatagttttaatgtggatttcaataataccactggaataacagaggcggtagatatggaaataggtgctgaggtttttgggctcacaaaaaactgttttggggcgggttctggttcacaggcccgccgagaattatgaatgtcctaagttggaattgccgtgggcttgggaaccaacgggctattcagttccttaaagagattgtcactcaaaagaaacccaattttatcttcttatgtgaaacaaaaggtgataaaattaaaatggaaaggattggccgaatgctagattttgaaggaaagttttttgttgaggcccaagggaattcagggggccttgctttactgtggaaacatcaagaggaagggagcatcctgggttattctaataaccatatcgacctaatggtgcactcagcagagaaaggcgactggaggttgactgggatttatggggaaccagttcgaaaccgaagacacctcacttgggacctgcttcgatttttggctagagactcaaatctaccatggtgtgtcatcggcgatttaaacaatgtaattcgacaagaagacaagaagggaggcagaaggtatcctcaacaattaatttctggcttccaacaaaccttgaatgattgtcatcttcatgatttagacctcacgggacacccttttacctgggaaaaaggcaggggcacgactacttgggtggaggttcgacttgacagagctctagtgaacaatcgttttctccaggtttttcctcttgttgtactctttaatttggagatctcctcatctgaccattgtcccattctgttagagcctgaaattaaacatgaattcactcctaatcgcaagttcatgttcgaaaatgcctggctcaaggaaccggtttgttttgagattattaaagattgttggaatcaaaatactaatagcaatctttcaggaaaactctctctatgtgctgaaaaattgagtatttggggtaaggagatcactggaaactttaaactaagaattcgcagatgtaaagcggagttagcaagtttgaagtcaaagagagatgctatttcagtccagaagtacagtgaagctaaaaaagcactctttaaagtgcttgatcaaagagaaactttctggaaacaaaggtcgaagcagctctggttaaaagaaggggatcaaaatagtagctatttccataaaactgcgaccactcggaagaagcagaaccagattatcaggctcaaaaacaaccagggtaattgggttgaatgggacaaccaactaccgactgtaatagctaattatttcaacaatctgttccaagcttcaggggactcttgtcaagaagttattgactgtgtggatgcgattattcctgagatggcccactttgaatttcgacaacctgttactgaagaagaagtcaagaaagcagtctttcaaatgcatccagataaaagcccgggtcccgacggtatgacgccagccttttatcaaaagtgttggtcttttctaggcaaagatgtagtgaagactgttcaaaagttctttactacaggtgaattcgaagcaggttgtggggatgctaacattgtattaattcccaagactagaaagcctgaggttatgactcaactgcgaccaattgctttatgtaatgttttatacaaaatcataacaaaagtagtggtcaaccgtatgaagccttttatgaacaaaattgttgctgaaaaccaaagtgcatttatccctggaaggcttatatctgataatgttttgatttcttttgaggtgttacactatctaaaaagaaagagaaaaggcaaagaaggtttcatggcactcaagcttgacatgagcaaggcttacgacagaatagaatggacttttcttgagtctatacttcgaaaattgggttttgaggattggtggactcgactactgctgaaatgtgtttcctctgcttgttatacgatagtccacgggagtcatgaggtgggaccaattgtgccttcccggggcataagacagggagacccgctgtccccttatttgttcatactgtgtgctgaggggctatccgctttacttcggaagtatgaaaacagaggtcttttacatgggtgcaaagtggctaacggagcgccgaggatttctcacatgctatttgctgatgatagctatctatactgtaaagctacacggactgaggcaacaagaattcaggaattgctgagcaagtttgaactggcttcaggacagaaggtgaattactccaaatcctcaatctttttcagcacaaatacaacttcgatgattcgggaggatataagtaacttgcttggtatgactatagcgggagccaatagtttgtacctgggtttgcctagcaccatgtctcgtaataagtccgctgttctgggctgtctgaaagaaagagttcgaaaacggattcaagggtgggaaactaaattcttatcaagggcaggaaaagagatactaatcaaaacagttgctcaatcacttccaagttatgcaatgagcgtttttttactaccacttgacatcacaagaga

SEQ ID NO: 43651 - DNA, 1070 bp, Cannabis sativa
ttcaaacaagacctacgattccaacatttgtatattttgtttcaaggcatgcaaaagttactgggagtgattttattagttttgccgagtaaataattaagaaggttgactttttattcacaagaattactcgagaaagctgcacaaaataacaaggtgtgtttattaacccaagtaaataagaacacttggccgtattaatggctggtcacacatgaatgccatgcacagttttagagccaactaatgctaatcaaagttaccaaagttcttgagattcccaatagtagtattagcaaaactaataaaaccacaacattttcatcttaaaattcaaaaaaaacccatcatcagaatatttccaaggcataatcaaagttcttgggattttaacaataattatgattagatttttatatgataattagtacatgtagagacaattgttttcactctaaattttaacaaaaaaacagtctgggaaatcacaaatcagagtttgaatacaacaaacaagataaattattttggtttatttctttgagttgaaagagaatcagcagagttcatcaccactcgccgtttacattgagaagagaagctgaacaactccttcacatgcatgagtcatgcctcactgatggaaatgcagcataaaaaatcatgcaataatatatcagcatgaaatgaatgtagcagaaacaaacacttgaaatatatatatatatatatatatatatacatagaaaaaaacaaagcatacatgaaccatgttttgcaacctttctatttgcaacagctatgtaagtagatgccaacctgttcggcagcttaaactcagaataaggtatatacaataaataaataattcctacatcaaatgattatgcctcactaactgattcaagtactttactttgtatgtgagagatacttcaacttagtcaagccctagaaaaaacaagggaagagaacagccgaaagtagtttcagtaacgcaattataaacatcaaccgtacatctcttccataagtaaaagtaaacttaaaagagaaaatatatatatata

SEQ ID NO: 43652 - DNA, 4294 bp, Cannabis sativa
  modified_base (1983)..(1983): a, c, t, g, unknown or other
gccctcatttttcaatctattttttaatttggaccaaatacttgttaatcttctttccactttgataccatgttagaatgtggcaatatggtttaaaaagtaaaatgcggtaaggtatatactaaaaagtctgaagttttatctcaaaattaattggtaatgagaagaatagcttatacatcttataaataacattaagttcacacattatcaatttggaactcgatatcaaaaataaacatttcaatgtccttaaataggcctaccccttcaaatgctacaataatcacttttaattggttttagctttcatacatcaattttgttatattgctcatatagccttcttctttgttgctatgaattcaaattacatgtttcagatgattatatcctaacattatgttattcttcagcttaggaaacacaatcgaacgctacaagacgaaaggaaaagaagaaaagagctctaatgaactggaggtcaaccgcacttcttcaatagaaaagcttttatctaatataatgtttcctctttaattgaatggccattcttataccaattattttgatactcttatttggctataaatataaccaaggaagtgtaattatgtttagaccttagttttacaacgtgtgaaagtgaatgatacatgtattatgattagatagttgaagcaaacagtaatttgttctgatcataataataacattaataaaaacagtgtttgactctgcctgtaataatcaaattgtagactttggctatgtttaggaaggaagataggaagtagagtactcattcccttgtttggttggttttattccattttcaaatttaaagagaagcaaacctttcattgtgaaatattgtggatgcccttgctaataatatgaacaaagtttagcctatattagggagaagaaatacacacactaaggaaaggaatttgacttttgtatgagagaatcaaactatccaattctcccttttactaaacagagtcttaatgtaaatgttcaaaggtatgttatggatgtagaaagtatgttgttcttgtgtaaatcctcacttgttttggctgattatgcagaattgtgactatgatggactttgggaagatgttgatttgttgaaaggggttaggtatgttatttaagactatgtctacatgattatatggagattgaaattaatattggtgtttatgtttacacattgaacacagtaatctcgatgtagaacatctaacagtggatgaacttgctcataaggagagacaactggaggctttattaagactaacaaggcaaagaaaggttagataatttccaataatacattttttaacttttcacatgccattaactagatgtttccctcaattatatacacccacaaactcttaataaaccatttcctaaccaatttagacttgttttgttagaagcaagaatttgagttcacctattgttatttgttatgtataaaagctgaggacaaaatcaaacagaacaaatggtaaacataactgtattgctactacactagccattaccttgacggtaagagagagtgattcactttctaatgtttagatgaagtataatccatccttatggtagggaggggctgcaaaatgggttaaacaagataacacgacttgtcagacatgcaaaataattgggtttgggtttgttgagaatcatgagtatccatctcaaaaccaattggctatgagtggagtagcccatgttcttatatatagctcaattctctactatttattcgtttttgctcatcaatcttgaacagtatcagaatggacatggtcactatctgtataggtgcggatcccgcaagggatatgactcttgataccatgttaagaatcatgaggttccatctcaaaaccaattggctatgagtggagtagcccatgttattatatatttctcaattctctaccatttattctntgtgggacaatgtccacaataggatttaccatatatgggtttggatcattttcgggtaacacaactaacttgtttattaaacagattatattcaaattggcatgcctaaccaaaaaatgacactagggcctatttaaaagtatactttcttcttcttactattattttatttcatgttaagtgtattaagttagttaaatagtatataaacatgttaaattacttataaatatgccataaaattgttgtaaatatgtttaacttgttataactaatgaattgataagtaatcaaattaagcatgatcctttatataaacaggttaggttaaataatcctgtttataaacgtattaggtttgtgttttagttttttttacgattaataaatgagttggatttaaatttagtaattgcttgtaaaacctaagcctcgagacaacacgaaaacgatccaattgtcgcccttacttataggtcatttctactctttcatgacactgacaagtgtaattgtcactaaaggaatatgatggtatgttgctaacgaatcctctacttttcaggcacaactaatgatggagactgtgtcaacactttctgaccaggtacaatccacctattatctttttataaagttaacttgtttcgtttggcaaatcatgcatgtttgttcgttttgtactttgtatgagtaacaaaaaaaaggtcactacctttaacaaagtgtagtaacatcaaacttgtacagaatcaatgttgttggataatacaaactatcactgaaatagaaattaaaggattcatcttgtttgttagaaaatgtaaaggtatatttatccattctttgcccaataattacaacattgtgagttgagatttttcacagctataaaattatgctacaaaaacaaaaggacaaaagttgcaaaagtactctgttggattaacacctttcatttgataaccattatggtttgaccatattcagaactatttatatatatatatataaatatacacaatatgatcaaatcaaagaaaatatggctgtggtggccaaaggaacttacttactctatttgccatgttatatgaaaattgatgcaggaaaagcaactgagagaagagaagcagctcctagaaaacaaggtaaaactccaaacctggtgataataacagagaactctctctcaactcatgtcattctatatctaaacacaatatatatgtatatataatgtatgtacctctgagttttcagattgaagaaatggttggagaacgaggaaagaaattggaggcgaatgaggttaagggtaacgctcccaattccatgcgccgagtactccaactttactaatacaaacactctctaacttcataatattacaatatttattttagatatatatattgaccaaatattccaactttactgttgttgttgttgtttgaatagaaatattgtaatagaaagactctctaacttcataatattacaatatttatatatatatagaaacataattaataagtgtgttattaatggcttgacatttgtcaatttgcatgtcttgcccaccaatcatggtttgctattttagctacaatactatatatgacagctcttgctttgttcatataatttgatttccaataatgatggtgacaataaagtcttttgcatactgattttcccaaattaattatattgatttcactttatttttgtttgtacttgagttgagtctatatattctttcaaagataaatattactctgttttatttttactaaagataaattataatattaattcaaaaataaacgcggaaatactacaatttttgttttttgacaaatggaaatactacaattagtagtagcattctttttaagttgtatgatataatattgttacatcattctaatattattttagtatatattttatatgcaaaaaaaaattacaaaaatttgggacttgatgttgttaatacattgtctcttggtaatgtgaaacatgtggctctttaattttctgaatttcatttcagtactcagatctcgaagccaccaatgaaacgtcaacaaaaaaaaaaaccattggtttggaatcacaaacgtctttatcctcggcagactttttctccaacataaaagtcccatgaaataatgacattttcccaagctctcttctaactatgttattagttcgaaaacatttgaagctttgaaaagaaagagaatgctaaaaggccctagcacctctacatattaaggtggtgttagtgatttttttttttttt

SEQ ID NO: 43653 - DNA, 2000 bp, Cannabis sativa
actgtttcttaagcattcttttataattttaatacttactaggataatttagtaaattcaacacattccaattctttcttctagtttaaccaaacacactattgaagttttaataacttttatttgcaatcgataaaaattatgtagtgaagccaatgaagtaataatttaatttgtcattaattcttattcagtttattccgattacaattgcggttagtaaacataccttaatggagtcctaaggcaggttttgggaattgggtgagattatgtggcttttctagcaatgttgatggcgtcatggccagcattgctagtttatggaatcctagtaagtggagactacttgcttgtgaatcttgtcgttggtatatttgtatttacactaaaagaatcaataaagagttttgtttggaacctgcaacccatcaattatattaatgaaaagtgtattgtgttctctatcttcagctataaccttaaaaatgttctttatattttagtccagcatgtattgaaattgaatagctgcctattttcgtagcctttgacttgtagaatgttcttttgtgagagtgctaactgactttgggtggcatttacagtgaggatagctctcttctgtcgttttgtttttgttttgttttgtttgtgcttgtcgtgaatatttctatccagaacatccttgaccacagaattatttcttacattctcaggttaaggggcctgatgacgagcaaattcatgacatacgtgacaaagcaagtgaaaagtttgagtttgtggttcaaaagaaaggcctttatcgcttttgcttcactaacaagtccccttatcaagaaacaattgactttgatgtacatgttggtcactttgcatattatgaccagcatgctaaagatggtaagatgtcatttttgttctgtcaattcctgttttatatccacattcattatagtcggcgcaccaacatatgttttaatgaatgtgtgcagagcatttttcccccttgctggaacaaatagcaaaattggaggaatccctttacaatatccagtttgaacaacactggttagaggcacaaactgaccgtcaggcaataggtactatttgttactttatctctttcttgaaccaggctttagctctaaatggacagctctgcattagatatagtgactttccatatcaatcctgtgcagtttctgagtattgatcactgtttccatctatttgttgaaagcgattacataaaaagattgctgatctcagaaatgtctcatagttccctacaacccatttgtttaagatattataactcgacagatttggagctgcataattcctcttagataaaagtgacaaagtgtagccttgatttggaccgtagactagacatgattccaaagaaacatttcttgtgacagtagcgagtgtccatagcactccacaaaattcaaatggctagtgtgttaaacttgctttgaggtttagtcaattcaaactagcatgaatgagtttagtttatgtatttttatcagttctatatgaccatgcttagagttagagatttgtagcattagttgtttagtgcattatcatttttggatcgtaactaacatcaaaaatacacagtgaatgatgcaatgagtcggagaacagtgcacaaggcaatgtttgaatcagcagcacttgtcggagcttgcaccctccaagtctaccttttgcagcgcttgtttgagaagaaacttggaacatccagagtttaggatttgttagagatgccctttgatcacttttgcttactgtaacatcatcacacaacagcatatctatttatggtaacattacaaaatggaaatcttagcatttgattctcttattaattattccttcttacaatattgtgtcagcctgtggaagctctttgccatctactataacatagattttgtttttgaatcagtccatacatatacaaagaaaaaattgttaca

SEQ ID NO: 43654 - DNA, 3325 bp, Cannabis sativa
cgtatatcacaaagccagccccaacagtgctctgttccaagagacatgtcacaaagtctaaagtttcctaatgttccttcaatggaaagagaactaggatagaccttcggaaacagagaacgtgtgtgagtataaacaaaaagccttagtcgtgtagcaaactagaaatagcatattttttaaagagaccaatcataagaaagaatatgtgataagattaaattccgggttgctatcttcaaatcatattttttctctttgagagtaatataaagctccgtttcttttcttaaaaaagaagtcgcataagttagacagcaggtctaagtataatccaaattattagaaagaatgaaaacataattcctattaagataatctttttttagtgtgtgggtgggtgcgggtttgggaattaaaggtcagtatcaaaagtattcaaaaaagattaccttcagatccaacaggaaactttcctgcaccagcattgcaagtgaagaaccatcctccttgttaagatacacggacacactgtcgacattcatgtttaaataaaatacgacacgactttttccatatcccagcaatcctttaacaatgtcactttcttcattcttttccttgcttgtcgccgatttatcttctggtattgcttccacctcagaacttgttgcataattcacagagcttagatccaacccgaaaccaattaaagcaacaagagtaggtctgttgcaaaagaattccagcttggacatacgaacactcatctggaaataatgaaaaggaattgtaatttggaacttacactagacacaaaccagcaatatggaatcttgaactcggaccaataatgagcaatttaaatacctgtgtatctataccatcatagtcatgcgaactaggactccttgttgagaagacaacggaaacaaaatctgtataatcaccaccctccgcctcataaaatatttcaccagaaatgcctcttcccataaccatatcctgttcttctatcaaggcttcagcagaatcaaacccagcagaggcagtatccaaattctgagagtgacaggctgcatcagatagagatgcaaattcaggcaaagcatccgtaaaagtatcatcgtcttcattaactgctaccagcatctccttctcgtgaagatcagtcattgcaggggaagaaaatgtgctgtcatttttcagcactgagcaagctaaataccgtggacttgcagaaagacaaccttgaagctcatccctaattttcaaagaatggagcttcatcctgatagtcagatccccttcacaatgaatcatgtgcacctgtaaacaatatgacgaatatcataatggcaaaacattgcatgagttcacaagcaccatgtgtcacagatcaaaacttcacccaaaaaaagttacaagtacttagaataaaacaactctttaattacaataaaaaaataaatatattaacatatataaaaaaaaaattgtaactttacgtaaggctaaatatgtttctagaaacatgtgcttgctgctttttaatgtatgaaaaagtgtgatacagaccttcccaccaccagcaagtacgtcaagaataagagtctcatcaagtttgtcatcatcgtcatctcctgtctgcacaatattttacaaaaaaaaaatacttcaatgagtaggccttggattaaaaagtagagttcttaccatttcagtatgatagcttaagtgaaggattgttttaatgattgccctgcagattctttcgcaaggtaaccaccacacagttgacaaataacattccaataggaaaagggtctcacctttccatatataaaaagctttgtttccactaaagctccattaacaacaagttcagctgtttttagactagtggtctgaggttcagtaaagtcagatacctcatcacttgtctctcccggtacactaactgatggaggtgcctatattaagaagaaaaaaaaaagaaaaattcattaaaaacccaaaaaatgaagcatggggaaatataagaaagatcttaagccatacagaagcttgatacgtggctagtatcaatcccttcaaccaagtagccttttcatcctcatcacgaaacgcaattatccacgtactagaagactccagagcctgatgcaaagataaaagaaaataacttcagagaaaaagaatgaaagtaaagtagaaaagatatccccagcaccctgcacaagggcatgccttaacaaaatgaaaatgtaactacctgaatattgttaattcagtttctaccaacttttcattaagctttaaatcattatgaaccacttcattaaaagttcaacacataaacttcacatctttttaattttatggaggattgggatggtggctactttgtgggcattatggctaaaagaaacaatagaattttgaaggggtggaagagaatgatgagaagttgtgggctaaaatcaggcaatgggtggttattttgttttttattgttaagtatttccaagatgttgcatctctgattatgtagaatctgttgttgtggattcttacacttttgcttgtattttatctaaatacttgttttaaaaaaaagggacaaaggtcaaatgtctttgactgaccgtaccaaaaattattattagaaacctcatataaggcggaggaacaccatattacagtagcttgtggattttctctaatccatatacaagctgggagaattatcaaagaaagcgaggattttcaaagtctcattagtattattgttcttttctttggcattttctacagtccaataaaatcagactacttgtgttttcccatttattactttttccttgggcatacatatatgtaaacacacttgctacatgtatacaaagatgtactaaaaatttctgcagccactatgtcacacttcaaatatactgactaaccttaggaaaaaaaaaaaaaaaaatttctactcataagggaataattaaagaagttcgagaaaaataaaatcagactaagacattgacattcacataataaaactggaatctctaactaaatcagcgagcaaaaacatttaaaaatcaaaactactgacttgccttttgaagctccaatcccctatgactaatagcaatacaaaacggcaagccaccaatgtttgttggaggaacatcaaaaacttgcctaccagccatgctgcaccagcccaaaaaattcagtcaggaacgtttttgctaaatggttacacagaatatatcaactaaaaagaaaaagagagaaacaaaacaaaagtgagcta

SEQ ID NO: 43655 - DNA, 1998 bp, Cannabis sativa
  modified_base (1198)..(1208): a, c, t, g, unknown or other
attaggtctttatgataaacgacatgttaataaagtcaactttattcatattagttcttttcatatataatctctattatatacagctctttcacttcgatgtctcattacattcgtaatctgaaccaagattacttgcaccgaagaacgggcatcagtaaactgtaatagcaaccattaattaaagattccataactttaatatgttgctgactgttttattcatagctaaattcttaatttgacagctacaagccacaacctcatacatgaataatgaattttctagtagttaatataaattatttaatattaaatattaataattttaccattcacatatattcaaatgtttgactctttatttaataatctctttatttaataatcaaaaatgtctttacagacttttcaggacataaactctaacactttcagctgccataaatcttaagaaagttgatggttctcttaggggttttaaatttgtagggttgctcttaatatttctcatattttatttacagatgataatttaatattctccatggtggatcttgagttagctaggtctagctattaaagatgttttagatagttataataaagttttaggtcaattggttaactttaataagtcttcagctcttttctcccccagtacccatgatcgggtgtcccaatctttttttaggcattttaggtcttgataacaagccttttactagtatttacttaagtcttcctcgttgttttggtagatcttagaagttctcttttaattttcttttagacaaagtcaatacctatttaaattcttaaaattgtaaatgtttttctaaagttggtaagaaagttctattgaaagttgttattcaagatatcccgtcgtttgttatgtcttattttagaattcttgttactatttgtcaaaagattgaatctcttatggctaatttttggtgaggctctatgggttacaagaataagattcagtgaaaaaattggtattttttttgtaaatctaaatttgttggcggtctaggttttaaatctttatcccactttaatcaaacaatgctagctaagcaagttcggaggatttttagtaaccaaacattttgcttactgggttcttgaaaggtacatattttagggattatttcataaatacacaaaaattacaaaaatacggttnnnnnnnnnnntaaatatttttacgattttttttgatttaatatatttacagattatacgatctttttatattgtactcttgttaatttgttgttgatcttttgttatctatatgttattttttgatgttgttttgatgttatttttatattacttttatgtagtttttttgttgttttcgtattgtttctatagaaaactgtaaaatataaaaaaaatatataaacataaaaatataatttttttacaaaaaaaatagtgtcttatgtaattatccaaatattttaaccgaagtgggtttcttcgtgttaagaaaggtcactccccttcttttacttgtcaaagtattctgtggggaagggatttattgaataaggggctgttgtggaaggttggcaatgggacttctattgacactaccaatggtcattgggtcatcacaattagatgcctatcttacaaaaatggccttgtccgtccttctggatttgttttttattttatccatcctctaggctattgggacttgagaatactttttcttgtggaagaagaaattaaggttattttggctattcctttaactttcaaccttaataatactgtccattttactgttaaatcagcttatcacttagcattttctttgttcccttcagattccaaaatggtggtcttttctttggtgtgctaagattccccataaaatcagacatttttttatttagatagcctatcactatgctcttcttgttgccaataaactatattccaggaaaagttattgacagtcccatttgt

SEQ ID NO: 43656 - DNA, 2402 bp, Cannabis sativa
  modified_base (2029)..(2036): a, c, t, g, unknown or other
tcgctagtcaatcgcaacgcaacatgtcgagaaggtgctaggtaccactggtgcctaatagcaatgctcttttttattatatatgattgatgtatttattagattttaggaaagagagaaagagatacaaagataaatgaatgaactgaattctcatttgcttaaaataaaggaatacatagtgtatttatacacagttcagtagctaaaaacaagtaacaacttaactaatttacagaaacatcgaactaacaattaactaacactacaccttactactaatcttgatactctcttttaaggtggagtagaaatgttactataatttccattttgtctttaaaactctaaaactgattaggcagtaaaactttagtgcagctatttgttccttgcttgaagtgtgagttatttttatgatcttttcttgaaccttctctcttactaattaacaattaatccatttctatatgctttgttctttcatgaaaaattggattatcaactatttattaggttgtcttgttgtcacaatgtaagatagcagacccttcatgatcaatattcaattcctataccaatgacaataatcatattagctcacaagtagtgtttgttatagtcctatattcaacttcaatcgaggatcttgacacattatgttgtttcttacttttccaagacactaaagattacctaagaaaaatgcaaaattttgttgttgatcttcttgtgtctacacatagcccagtgagcatttgtataagcttcaagctttatctcagaatttgcatggtagaaaagaccctatccaggagtgcctttgacatattgaagagttctttgtgcaacattcatatgagtaactctggtagtaaccaaaaactagcttagtttgctaactgtataggccaaatctggtctggttatggttagatatgattttcctatcaatttaggatcaactagtccatcttctccttcttgactcaattttagattgacttccactagagtgctagcaggtttacaccccaagtttcccagatcttccaaaagctgatgtgcatagtgtctctgaaatctcttagttagttcgagcaacttcaatctcaaggaagaatttaagtgcagcaagatcctttagcttgaatctgttattcaagttaacttttaaattctccaaagttgtcatgttattgctagcaataatagaatcatcaacataaacaaggagaattaagatgtgagatccattatgtttgatgaataaggaatgatctgaagctgagtgttaaaatccttcttcaattaatgttgtataaaatttctcaaaccattgtctagatgcttacttaagatcacatagagatttttttaatttacacacaacattaggtggcaactcgctgttaggactataccctagtggtagagttgtaaacacatcttcattaaaatctccatggagaaatgtattgttaacatctagttggtgtaaaaactaaccttgaatggctgcatgagcaagtataaggttgacagaaacaagcttactaacaggggcaaacgtttgattataatcaacaccttcttgttgaattgattgtatcctttagcaacaagacttgctttgaacctttcaacagaaccatcagcattgtacttggttttgtaaatctatttgcaaccaacaacatgttggtcatcaggtaaagtaacaataatccatgtatcattatcttcaagagcatggatccaaatatccatagcattgtcccaaacaagtatgcttttagcttgatagaaaaattcttgcttaaagtgactagaaatagctagcataattgcgcaaaacctgggagacaacctgttgtaatcaatgatctcataaagaggatcagaagtagagaaattaggttcctaagatgtaattgttagggtttatgttctgaaaagtctataaagacatttctaattattaataaagagttgaacatgttaatatatgcttgaatattaaattatnnnnnnnnattattgaataatttatattaaatatcagaaaattccttattcacatatggggttgtggcttgtagttgtatagagaactaagaccacttagctatgaataaaacagtcaacaacatactaaagttttgtaatctttaatcaagggttgttagtacagttcactgatgcccgttctttggtgcaagtaatcttggtttggattactgatatagtgagacatcaaagtgaaaatattgtgtataatagataatatatatgacaaggacagatatgaataaagctatctttattaacatgttatttatcataaagacctaatttatatcataacgatgatcaatagtaaatcagcctaaatcctgagt

SEQ ID NO: 43657 - DNA, 2598 bp, Cannabis sativa
tcccttcgccgccgaaaaatgacccattgagcttgaaataatgttagtaccgtttccaattttcttcagattgatccttcaccagcgatttcacaagaaaaaaatatcaggggaaaccctaatttagaggtgaaatccagggttactgtaattatccaggactataagaagaatctcaagtttcaaatcagagtatatttatagggtttttttttcccgccctttctcgataaccaatgtgctttttttttttcgctttaagtaggatgtacttactagagtcggtttagaaataagttataaaaaaggaaaaaaaataagttgaaaaaaaataagttaaaaaaaaaattagtgttatgaataaccatatatcatagaattaggtagtttactctaaataatgtactatatgttgagaaatagagttttcctctattaactcaactccacagagtattatttaggaagtaatgattaaccttttttcaattctattagaatatttttttattgtaattatctttggaaattggtcatgccacttgtaatagagtcattgctcttatcatcattttataacaacttcatttcactataaaagaaaagttttggctcatcatgaaaatgaactgagaaaattatttactcgatttctctgaaatcgaactttggtatcagagcccaccttgacctctgtcaatggctacaccacaagaacaacagcccaccgaaggaaggtctcagaccccctcgttgttagcaccaacagaattggtgcatccccatctcagctcccaaataccttttcccagcaacctaccacactaaaccaacaattttctctaaaactggacataatcaattttaccatgtggaagactatggtgtccaccattgttcgtggacacaggttacatggttatctcaatggcacaaaattgtgtccaccagagtttatttcatttcagtagctggtgaagttaaatatgaaggcgagcttgaaaccaactctgagtatgaacaatggatcattaatgatcaacttctcaagggctggatttacagttcaatgattgaaggaatagctacagaagttatgggatccacttctgtagcaggcctctagagagctttagaaagcttgtatggagcttattccaaatcaaaaatggatgatattaggaccttaacccagagtgttcgcaaaggttcaacaccaatgggtgagtatctatggcaaaagaaaaactggtccaacattcttgttcttgcaggtgacccttattcaaaggcacaccttgttgcaaatatgttatctggcctgaatgctgagtatctctcgatcgtggtccagatcgaagcaagaccaagtacaacttggcaagaactgcaagatatacttatgagttttgatagcaaaatctaaagattacagacacttaccatcagcaacacatccatcaactccaataatcctcaagccaacattgctgctaaaaacaattctggatctaattcaacaggatgtggtcgtggttccaacaatcacagcagtcacaattagtattctggcaatggaggtcgattttttggcaatcgtggtagtcctaggagatttcgtggaagaggatgcaccaatacaactcgaccatcttttcaggtctgtggcaagtatgcctactctgctgcagtctattacaacagatttgatgaaaattttatggggcagatccaaaccagacaagtggaggaaacaaaccatcatagaccagtcacaatgctttcgttgccagtccagaagttttagagagtgatgtgtggtttgttgatagtggagccagcaaccacatcacctctgatggtgcctcaataaaccagaaacaaccctatggtggtaaggaaactgttacagtgggtgatggaaccaaacttagcatatctcacattggtagtagtgttttggacaccaatgatgggaagcatttgttgttaaaagaaatgctacttgttcctaaaattgctaaaaaaattaattagtttttccaaactcactaatgataacaacgtgctaattgaatttcattccaatgtttgtttggtgaaggacaaggctgttagaatatcttttactaggatctaaattttctaacaagtatgttcttaacatcctaaatataaatttctaaaacaatgaatcttaaacacatataaagtatgagaaactttatattggttgcagtggaatataatgactccttccactcagatctctaaccattgtatcttttcatttgtagagtgttattaagatttgagcccaattctccttcagttgtttggattcttcacaatcttatacaatatgattgaggactaacttgctatgggtgggcatgcactcaattactaaggctcttgatgaagaacactcaaggattcgaaaattataagagcaaaaaagaagaagaagtctcaaactctctagttgtctcataagatgtaaactatgtttagagtcattagttggataatgagactattcttttctttttatactatttcacttagggttaggattgaattatatggaataaaaaa

SEQ ID NO: 43658 - DNA, 2450 bp, Cannabis sativa
aaatatgtacaatctaatatactgtataattgtagtaattagttataaatgataattaaatttaacaatattttatcatatcaataggaatcacctagctccttttgaaagaaccaaaaaaagaagaagaataatataactataaagccacttttgacaagatctagggctgccttatttaattatttagatgcatagccatcctatactagttgtctaattctaagaaccatggcatattagggttagatcattaaatattaagttatatagctttgtgtataatttaatattaagttttatatatttaattaataattattataaaaaattgctaattattcataaaacgtttctccataatgatgatttgtgcttagaaaaaaaatatcatactcacatgtcatctaataattagttaatagtttttaatattatttattaaattgaaatatgtgagaattaatattaaattcactaataatatattgtttgatacttttaaggtgaattataaataaatttaatgatttggacacactttctacccacaataatgtgtggaacataaattatattacactacccagccataactctatgatagagctttagtaatttagtaaatactaatttgatgtgattaaatatattaaaaaaaatatcttaactatacgattaaaagtaatatgatacctatgaattatagcaaagaaaattaaggttcttgttcctaaatttatagttattggaactggaagttgtcttttttttctttggccaggaccgatggccttcccttacgacttggtaggggttgtgtttagttattgtgattcgaattttgctactccaatcagttttacatttatgacatgattttaaatattttagttttgtttttgtggcatggttatgagtgttttagtcttgtctgtgtgacattgttttgtttcactattggttcttttttattcttcaatgactcgtcatcaaatcgttattagtggttggaaataaagttatttgcaatttaagggattgttagtagtgcagttacatatcttgcacgatagttgagtgctcaagctacgatgttgaatgaacctgctgtagcagtttttactgttgtgtcttttgaacagtggatgaaattgaatatatgtgttcttatagttaactgtgatgttgcaatctttttcatgtgattttactttaattttttggtcaaaaaatttaggaattagactgttgattataggactcaatttttaattataataccggtcgtgtctctaacaagagagatatcccaattatattacaacctattattttaattggttgctaaaaaataaaattacacaatgaaaaaacaagtaatatggtcccctacttaaaaatataagtaactaaaagtctacaatacaccccgtgaaataaatgcaccaatgcactctaatatgtttcggtatctaaaaaatatttagtccaatttttttatggtcgtatacgttatagttatctaaaacatatgtcaaaaatagggttcaaaaagtcagtttaaacattaatttatatattgtaaattatttggaatttcttaaaattttacaaaatatatcttaaaaaaaacgtctataaaaaatttagattaatttttttttttatggatttaaaagaattaggaattgcattagtactctaattttaataatgtatattgtaaaaacaccctatttaatatggtgtaattaatgtatccattaagtagggctgagcatcggtcggtttggtcgttttttcctatataaaaatccaaaatttggttttcgatttggattggtgcaatccgaaaatcgaccgaccaatccagaacctatcttaaaaccgaccgttttgaacctcggtttggtcagtttaaactgcccaaactgattttttttttttaaaaaataataattcaatttattctataattacattattttacattttacaactacaaacatataaattagttgttcaaaaactaattatcttattcttttaactttaatattaataaaaaaataatatattatttttatatattattaataattataacacatgtaaaaaaaacttaataaattaatatatatgtataacgatcggcttcggttttttcggttggtttattatcaaaacaaaaactgactgttcaatgacggttttaaccgttagcgatttttttagttttcggtttcatcaatttcggttccaacaatgttcgataggtcaatttaaacaattttttttaattttctgaatttttatgctcaccccaaccattaagtaatgtatatctaacattattcaaaagattattatatttataggattacaaaaaaatcacatggatgatgaattttatatactattttttattccttctcatcagtactgac

SEQ ID NO: 43659 - DNA, 7077 bp, Cannabis sativa
gggcacaaaacccaacagatacccattcaatctgtagcacttatccatcgtatgacctaaaatgccacaatgagcacaacacatttttaggtttgtgaggttgaacattacgagcaaatcctcgttcattggatcctggtttctcacattcagagtgtgttatagacaagcctctttgtctctcttcctaaatcacactggaatagactttgttgatgctaggaagaggatcttgcatcaagatctgagattgagcactgctgaaagactcatttaagccaatgagaaattccagaactcaatcttcttcttgataatcctggatgattttcatagcaccacagctacaaattggttgaggccgatactcttggatcaaatcccacagagatttgagtcgagtaaaataagcagtaacattgttcgatccttgaacaagtccctgtttggtacgaatcgcttcaaaaactctaggagcattcttttgattgattaatcgttcttcgatatgtgatcacatagtagcagcattatcaatgtacataatgctttcaccaatgtcattagagacagcatgaaggatccacgaaatgaccgtactgttgcatcgattccaaagatcaaaatctttgtcatcctcattaggagcagataactttcctatgatgaatttaagcttgtttctggcgattaaggctactttcatagctcgtctccatgagctaaagttctcgcaaccttccaagatctttggaaccaagctaacaccaggatgatcactgttagacaagaaaaacagattacgagcatcatcagagtaggattgaggattagtttgaagaacaaagaatcgattggagtttttcagaagtgcttctggactgagcaccctgaccccgtgccattgaagacacaatcaaggctctgataccatattagtgcggaagaagaagaagagaaaagaaaaacagagtctctgttattattgatgatcaattaccaaatacagagatgaagctacatttatatagctctataatcagtaggaagagctaactgatttgtaaatgaataacagaaaatgtcagctaactaatcctaactaactctaactaacctagacactaactcagaacatagcctaattctaataaatttacacaaattatttagaagtatctatatatatatttatatatatatataaaaggagagatatgagacggtaatgtgacacattaattttttttaattagccttaattgttcttttcttaattctctcatttttttaattttttattaacttcataaatattaatgaatataaaatatatatttttatttattttctccataattattttttttaaaaaaaaaaataataactctttttttttcttcatcacgttttttttaaattaagaaactaaaaaattatatttcaaaaaaaattacaatttatctcattttttatttatatataatcgtaaatttatatatatatatatataataattaaaaaaaattacaattcacataaaattctgttaactataaagtttttaatttatataatcgtaaatttatttatgtatatatatatatatctctaattctggatgtgcaaatgttctctaaactaacaaaaaaaaaagataatatatttttatgtatattgatccatatatataggctttaaactctgtgtgagactctcttgaattaattatagaggaattttcataaatatgagaattttcagtgccatttagttttttatggcagaaaaaaataactcaaaaaatatggaaaaaaaataaataatggcaaaaatatgagaaaccaaatagtatataaataggtttaatttaaaaaaaaaaatcatatttttcaaacaaataaattaaattttctgatcctctttactattttctctttgattttctctatcggaatcgcgccatcatctccgacaattaatgtctacaattcgatctcaaacgcaagcatttcacactgcaaatcaatctcacaaactagaatatgcatcgattccttaacatatatcaatgattgacgacacagctgcagcaacaatcatcatcgccgattgtcttctccagctccagtgagtttgtcaattggttctaatcctcttctttactgcatgaacctgaaaatcaatgcatatataattgcacagcataaaacgaataatcaaacagaattatacacagaaacacaacttcgacaacgattgtgggcataatcaaaacatgtatatacactaaataatcaaaattatatatgatgataattatatatgaacatattatataagaatatatatcactagaaaataaatgaaactctgcaatttaaaatacaaatataataatgaaaaatttcaatataaaataacaaaaagaaacctaataaatcaaaagaaaaaaagtaaggacaaccttatataaaatctaaaataaatatgacttcatattaaacagtattagaaaatcgattataaataatattaatgaaataggatataaggaataataaatatactaaacaataagaaaaaataattaaattcataacagacaaaaaaaaacatataatagaaaaaataaccagttaaaaacttaaataaagcaattaaacataaaatttaaatgaaacaggttccaaatacaaaattataatcagattctaaagtacatttcttttaaaaataaacaaagtcataacagacaaaaaaatatatcagaaaaaaaaacagttaaaaatttacataaaatttaaacagaaccggttccacataaaaattataataagattctaatattacttttcctttcaaagtacaaaaagtaatgaaagtcataactgacaaaacataactggaaaaaaaaaacagttaaaaacttaaataaaacaatcatgcataaaattaaaaagaaaccagttccaaataaaaaattatatttagattctaattatactctttctttaaaaatgtaaaaaaagaaaaatatcaaagacataaatgacaagaaaaacataaaagaaaaaaaaacagttaaaaaaccagttcaaaactaaaaataaaacaatcgtacatataatttaaataaaaccggttctaaataaaaaaattaaaataagattctaatattaaattttctttaaaattgcagttatgaaacaaatcatgtgtgtgatcaaatatgggggtcaatggacaaaaaatacaaattatgatgactacacaatgactgaaattctaattctaaccaattcttcgctagcaaacttgatggagttgataaaaatataaataaattacaacagaaacagcatagacatatcgtaccagatatcatcgggaacaacactaataaagctactgagtgacaattccctcaagttctacattgagctaagaaaagagcaaagcaagacagtggaggaactggttctacaaatacacaatgaaccattcaaccagcaatttgataatgaaggacaagattcaaatcataataatagtcaaataacaatctctccaaacatgtttgcaatggatgaagaagttgcagattttataatagagtaatcaaatgaagcaacaaaaaagagaagggataatggagatcatcacagattacatggtaattgagatcgaagaaggacaaatatacagtgacaagaacatactgaaaacaacaatcgaattctatgcaatgataaagaactttcaaatcaaaacgaagaaatccgaactaagggaataatacatggttacctgtgttgataaaaattgcaattggtttttgcgcgcttgaaaattgaaacaaacacaaacattcaaggttagaaaatatgtcaacaaccacacctgctcattggatgtcataatggaagataatagacaagcaagttacaatactattgcttaaatagtaaagaagaaatacgactcaataaacagaaagcatgcaccgaatgacataatggaggacttgctacatgagtttggggtttcagtgggatatcaaaaggcttgtaaaacaagagaaaaggctctagaattgtcaagagaattgctactgaaataatgctataggattattgaaggaatctcccgggtgggtagaaagaataagtacaattttgactattttgctaatatacaaagtaacaaacattatatataatttgattagtcgattctttttcaatcattcattgaatgataaatcactataagtgacggagatacgtgatttaaataacaaaagatccaatatttaaaaattgtatctaaaataactggaaaagtagaaacaagaccggatataatttgttcattatgagcaaatccaaaattgaatgaaattaatttagcagatttagtagattgtttgtgtttcgtgtatatgcctttaattttctaattaagaaaaaaaaaaaagaacatgttgattatatccaaatttggggacaaccaaaatcttcatttattatgagtaaatcactaatcaaattccattgtggaagacaggattttttctgaagaattcgaccctcaaaattcggtaacttcaactacattaacaacaacttttgaatcttttttcggattacacccattatctcaagttttggatcgaactaatccattgacacaaatagttcatgggagaaaatcgagttatctggggcctggagggttgacataccaacaactaccaatataccttcatatgctaaaaataacgaattcaaggacagttattgaattgattacggacaagaagaactggttcaagtacatgttccttgcattgtcaaattcaatcagaggatggatacattgcagacatgtaattttggtaaatggcacattcttgaaaacagcatatggagagacattgtttacagcctcaacagtggatgctaataatcacatattcatattggcatttggaataggagactcagagaatgattcatcatgagaatggtttttcaacaaactaagagaaacattcggagaaagagaaggtaagaaactggttcaaacaaaaatttacagctaataaatctactttagtgtaagagttttcctattattgttagacttacttaacataaataatcggtttaaaaaataaaaacaaaaaacccggttaaaacagacataaactgatatttgacaaatatagacttacaggcatgacaatcatctcaaaccggcacaaaagcatagaaaaagcagtagcaaaagtctacccaaacatattccatggagcatgcatattctacttgctcaacaacattaaggtcaattttggagtacatgggaaagatctttacaataaactttgttaaaaccgtaaaaacatacaacatgaaatcatttgaagtttacatgttagaacttgacaatatagacaaaagaataaaatcttatcttgaaagaataggatacaaatattggagtagatgccactgcccgaccgaaaggtacataatgatgacatccaacatagctgagtcgataaatccagcgattcttgctacaagaagactgctcatcactacaatgatagagagtcttcgaagtttggtacacgaatgggtttagacaaacgacaatgaagcacatgaacattcacaaaagtgtcaacactgacagaaaaaatactcaaagataactttattcaagcaagaaaatatgaggtaacacactaaatataaatatatttatatacacaaaatatatattagagagatacaagaacagtaaaatgatcggttataaaatcattttttctgtttaaaaaataggttgcaccattgacaacaatactccaccaagtgaatgtgctaaagaaagagaaatttcttgtcaatttactggacaaaacatatgaatgtaaccggttccagcaagatgaaatcccatgtgctgatgcaatagttgtattctcaaactgcgagtttatgactatgttgtggactactacaaaatagacgaaatgaaagcaacatatgacacaacatcaaattcattaccaaatgaaagtgaatggacactgcctgagtgcttaaaaatgatagttctaccaccatacacgaaaaagcaagtagagagacctaggagaagaagaatgagatcaaaaggagagccaaaagcataaataaagtgtggacgttgcaaaaagacaagccacaacagaaagacatgcactaatccaactctaccaccaaaacaaaaacaagcaaaatagccaaggagcaagaaaacaaagaaacaacaacaataagagcattattgaagataaagatacaatttcaatataaaaatacaatattagattttgtatgttccaataatgatttcaatattttttaatatgaactctatcttaaaacaatattgattttgaataaataaaaattttcaaaacaaacatttcccttacaaaaaaaaattaaaaaataatgaaaccggttatattaaacatgtaccaataaaaataattaataaaaataaaaccggttatattaaacatgtatcaataaaaataatcaataaaaatgaatctggttctatataatacatacaaagaaaaacaagttaataaactcaaacaatatacataaaaataaaactttcacactaaaaaaagcattgataatgattttttgttttttgttttaaaaaataaccggttcatagaaactaacacatataaaagaccactaaaatattaatcggttcagaataaaaaacaacattacaaaaaaaaaaatattaactaaaatgaaaccggttatataaaattaaaataaaaagttaaacttgggcaaaattctaaaccaatacaatgaaatacatgaaaaaatatttatctcttacgaaatataaacaattaaatcatactagcttctacaagtatgcaaatgaataaaagattcaaacaagccactaagtaaatataaaacgacactcggtcaaatattcaagaaaccttggccagtcaagaaaacaaaaaaaaaaaaa

SEQ ID NO: 43660 - DNA, 4588 bp, Cannabis sativa
ttcttcttcgggagttaagatatagtaaattacctccgggtcgagaagaacccattcgaacagtcacctcgcatttaatgcagcatggggatgaaaacgtctgtgaatacccataagaggacttatcagacatcgtaagcctgatttagggcgattacacgataatcaaagggactagagacagctccattatgatggatcacatcaatcaaggaaggatgaaggttaatctcacctaacctctatgatacctactatataggtaatgcatgccctagtttgtatattttggaaacttgtgcttatccatggttggcactcaaagacaagttacccctttttagctattcccaccaatctctataaatactcctgagaaaaatgagaaaggggatcggaaaaagaagagagaaaaacataccaagaacattctctgtaaaagaaatactcttattaataacagagactcatggactaagactcattaatgcccgaaccacgtaaaaatcatctaccctaattatcccaaagctcttatcattatctcatttaattggttgtcgaaaacctcagtcaacaataatgattaataatattattaaaaatgattaatgatatatatgtttttaataatttgtacactctattataaccacactcttctaactacaaattataagagaattatatatcactttattttttaaaaatatatatttgaacataatatataaaatgtattttaaaagtaattaattctctaatcaagcttaaattttatcaaaataatttctaatataatcattatatatagagatcaatataaaatatgtatagcaatatatgaaatttatttttttattgtgcatctaaaatacgtatatataatcacttctaaagagcatactaatgtagccgctatatctaaaaaaaattctcaaaaattgaaatctcaaaccctattttaaaaattaaaaaataaaaatacattacctaaataaaaaaaaaattgaacatatatatattacacttaacattatttaattaaaactaattaaaaaaaaactaataatgcatgtaacattaacctagtaaaatatatatttatattatattgatttgattaaaaattaaaagtgatttactcagggttagttcaaggtggtacaaccgggacctagacccccaaaaaccataattttgggggtctaaaattaaaaaaataacacatattatacatataataataagagtaataatttatttacattactaatcactattaaaaggaggcagaaatagttagaggtcttttgtatttgtgggaggttgcatgtttgaaacttattgagtgcatttcttttttcaatttatagtatttatgctctactttacttatattcggtgtttagtaaatacttatgactagtttaatctttaagagctctttcatttttttttaatttaaaaaataaagaaaaagaagaatatacgttcacgtatatattataattactgaattcttcttttctttagcagatacatttatataaatgctaaattctttgcccaaaaaaaattatttcttgatgtaaatttatataaaattataatagtaaatttattaaaaatctataaagttatcttataaatttaaatttataattaattttactgtcatatttaatttatacaaaactgtatgatttaaataccacaaccacaacacaacacaacacttgggaaacattccaacctcataaaaaaggtcaatctgaaacccaataccaacggtcattcatacaaaagtagtcctatttgagaaatagatgggtgccaatggccaaatatagattcatgatcaatttatagttaaataactaaacttgaagagaatacagattgtaaaaaacttaaactaaaataaacaaacctttcatttcacacatttattccaaaccaagattatcataatggcacaagcacaaccggagaggagcaaagacggaaactttaaagaaaccagtagtccccgctttagattcaatgctcaggcccctgaattcgttcccaggtcacaaacccagatgtcagtttcaggatatttctacccatgcttccattttctgattgggtttatgttggtgaccctgagcctccttcttattggatatctaatccagataccacgccccattcgaagaatgtcctcccagacgagcttcagcaaaaaatcatcaaacaggcgtgttgaataatttttgttttctaataagctccatttggtgatttgctaattgggttctgtttattttagttttatactccatattagtttttccttcctaatgtgaatgttatttcgttataggactgaggtttgtgatggaattatgggtgttttgttaatagatagccattgtttgaaacaggtggaataccagtttagtgatataagtttgctagccaatgaaacgttggctaaaaacattagcaaagatcctgaaggttatggtaagaattattagaaagtaattggtgatttttattttgattaaacactgattttgaacatgtgtttttgatttataacagttccaatatctgtgattgcttccacaaagaagattaaatctcttactagtaacaatcatgtgctagctgaagcacttcgatcctctttgaagcttgtaagatatttattgtacaaaatttgaaagatataatggtctagttgtgggaaaatcaatctttacatcattgattttgtttattataagtttattcttaattgttgatcatgttttgataggttgtaagtgatgatgggaaaaagattaggcgaaagcatcctttcacagaaaaagagagagaggagttgcaggtagaacaatgattattcaaaatgtttttttggaattaatacaggaataaattatgctaaatttaactctggtcttgcagtctcgtactgtagtagcagagaatttgcctgatgatcactctcatcaaaacctcgagaaaatatttaggcttgctggaaggttgtttctttaggaactaccttcatcattttcttattttagtgtgatccattacttattgtatactgatctgaagatatcacttgcagtgtgaaaacagttcgagtatgccaccctcaagaacctaattcttctcgttctaaaggtgatttctttgtcagtaacaaggtaaagattgaaacatttacattatttctccgatataattagattaatttgaatagtcttcactcaaaactaacatttttattcttgttgtttgctctcacagcttcatgcacttgtggagtatgaaacaacacagacagctgagagagcggtagagaagctaaatgatgagcgaaactggaggaaaggtctccgagtaaggttgttgctcagatgctcggtatgcctatcccttgtcattatgttatgttttatccttgtttttagataaacaaaagttgttgatgttcaatttaatttattgactattctataagaaatctaactattattagaaaatttattgctcagccgaaatctgtcttaaagaacagaagatcagaattcgatggaattctagaagatgatgatattcttccatgtgaatcagctgaagaggcttctcagtcaagccatgcgaattccatcattgtaagtaatgtaagattttatttttactgaatcaacttgttacatctcaagatgatggatttatatgtctttaattatacaattaaacaagcaaataggctaccccagttgtttccatctcacaaaaaaaggcatgattgtaagaaaactttatccaatatctcattatgggactcctatgctaggctgaagagaactctggtggatcaagaaaggggtggggacgagggagggggaagcctcgaggacgggcccagaaccacagtgggcaaggactgattgttcattctttgcaatcaagcagtggcccctatagtgaaggacttacaaggcagaattctaagggtccaagaatgccagatggaacgaggggattcaccatgggaagaggcaagccattatccaccccaactcttgctaatgtttccaattgagcttagtaagagcaatgcttggcagcctagttttgatttttttttttctggcaatgactccttactactaaatgtgtccacctctttcagaaagttgagaagggagagatttttcaagtagtattaatacgtttacgtttacactaataatttaagatgtatagtatagtaatagtatatcattcatttatatagcatggcacaaagggctatgatgaccgaaattgtttttttctctcaaacttatgtattcgaattaatcaataatgaaaatgagtagaaatctcttcgtattaatctttcttttactatttaatttgattagaaattagaagtgctttacaatcgagacttaggccccaggcgccagaattttgagggtacaatatcaaaaaaataacacatattatacatataataacagtagtattaatatatttatagggatatgattttgtcccgttattgtac

SEQ ID NO: 43661 - DNA, 1853 bp, Cannabis sativa
  modified_base (1733)..(1736): a, c, t, g, unknown or other
tatataaatatatataataaaaatgtgtggtgaaagacagaaatcatgggcacattcaccaaccatgaaaatgacataaaactcaggcatcagagaaaacacctattgagaacacaattcaagggtttttgattgaaaatgacaagaaaatcaatggtaatcatgaaacagaaaacgatgatttcaacaccaatttaactatctagtgatttaatatacatttatacgtttttatttaaatgattactgtagcaattctgtaaggaaaattcattttcttcacaaaatatataataatttttgaaatacaagaattatccatgtatacaaatatgcatcatacatacatttattggccaaagaatgaaaatcccatatttcaaaaacaaagaactccccaatatattcttaccactaaaccgtttcgctgataatctcttctatccataaaagaaaatacagttttataatgtcacaaaaatgaaatacttctgaaatgaaatgatcccagttctcccaaaagggttaaaaaaatagcgaaattgaaaaaaagaaaaaacaaccaagcaagaagaaataggagaaccgtatgggataaggaaagaattggaaaggaaaacgaaggagtcaaatagggaaaaacacaggattgacagatgggctatgctaaaattagagcgtttggatacaagaaaattcaaaaataaaaatagaagtttggatcgtcaaagccgaaattagagtaacagaaaataataacaacagagaaaacaaaggagaagaagaagaagaggaagaagatcaacaaagaatgaagaaattacctttattgaaattctagggtttgtgattgtgtgagaagaggaagaagacaggtgagattggctgttggttgcttttgttgggtctgagagagatggacagagaagcaacgcggggtttgggttgggaacgtcaaaccaataaaaatcacttctttcctatttttttaaaaaataaaaataaaaaatcataataatttactttttttaataaatcaataaatctccctttccttccttacattataatggctttttttttaacaaaattattaaggctaatttaatgctttataaaatttatatatgactaatttaatgtaatgatatcaagtcaaaaaaaattaatgtaatggatatgacatgattttataaatgttcaaaaaaaaaaaaaaaatggctttaggaaatgtttatctagcgaataagcaaagcaaaggtccaaagcctaaggtcggtgggctataagcaaagtggtggggaattgccaacggtgttcttttgtcgactattcacaactttttttttatccctattagttatattatataattttccttttcttttgtttttttttttcaaaagaatattatataatttttctacctggtttgttattttattttattttttttaaagttcttttcagtttgtatgagaactttccacatttatggttggacggttttggaataatctttaatgggaattcttataaatatggaaattgagggtggataagttgaagaatacctcttttttctatgtattaatcaaaaatacccttatattatatttcattaaaatctacccacttttatgagtgacttgtctaatatatcattgtccttcacttaagtgtagcacataatttacattaatataaggggtataataggaatatcatctatnnnngtgggtatatcttaaagaatatgataatgaatgtaaaaatcaaaacgaaaaaagtaaaaagggtatacaatgtaatttctactagtttatatatgtatgacataaataaataatact

SEQ ID NO: 43662 - DNA, 899 bp, Cannabis sativa
ctcacggttatagagtgctttgaacagggtcatcccgacaaagacatgataagtagtattataccaatattcggcccaagccaaccacttaacccatttgttgggctggcctcccacgaaacaccagagataggtctcgagacagcgattgaccacctcagtttgtccatcaaattaggggtggtaagcggtgctctgtttcaattgcgtcccttgtaagcggaacaactccttccaaaagagacttaggaagatcttatctcgatcagacacaattgaacgaggaaaaccatggagttttaccacatcacgcacaaatatttcagcaaccgtcgctgcggtgtatggatgacgaagagggatgaaatggccacatttcgtcaaacaatccaccaccaccaagattgaatcaaacccatgagacatgggcagtccctccataaaatccattgagatatcatcccaaacttattccggtatgggaagagggttcaataaactagccggagactgtgccatatacttattttgttgacatatggcacattcagcgacaaatttttgaacatctttccgcattcctggccaatatagatcagtcgccactctttgaaaggtcttaaatatgcctgaatgctccccagctgggctgccatggtactcttataaaattaaaggaatgaaaggtgaggtggagggcaatactaaccgtcccctgaaccgtaagaccccttggaccaagctatatccgcccccatcttgtcccttggacaattcagctagaactttggacaacatcgggtccgtttgcacttgggattgtaatccagaatcgaaataacttggggaacagaaatggcagctagagaagtgggcagtagaacccgtgaaagtgcatc

SEQ ID NO: 43663 - DNA, 7058 bp, Cannabis sativa
  modified_base (571)..(586): a, c, t, g, unknown or other
ggtaaaataatttccaacataatcgtaccttccaggtaaatcacaatgtacaaggtcggtcatcgactaacatcttaagtacacttactaagacacgtagtaagtcctaagttatactattgactataatagactcactactgagccttatacagagttcctaagaggaaccacgcataaggctatagttgtatatgcctccaaggccgtcatgagaccctagtcgggtcaacagaaggaagaaaattggttgccccttagagccttggcctttgtcggccagcgttccaaccttagtggctggccagaccccctaacccagcctagtggctggccagaccccctgacccaacctagtggctggctaggaacccttggccggccacctaacagccttccttggccagccaggctttaaacaagacctccatggttggtcaggacctgcacagatcaaaacatatgttatttcaagaactcaaacatgttttttgtcttcttcgtgactcaaagagctaagaatcacaacgaagattagattcagatctttttcgtctagaaatcacacatnnnnnnnnnnnnnnnnatcatgcagatcaaaatactgaaaggacaacaatctaacataagaatcaaaggatgttcaaagcaagaaatattgttcatgcattcatggcaagatcaaccaaataaagtgaaatagcaggaataaaaagcttactcactatgaaaaacccttaaggaagaatgtgggaagcttaaatcgtcaaaacgacacgaaaatcttgggagaatgttgcttgatgggttcggccctctagagagaaggaggagcttcttcaaatgcaaatttctagtgagagaaagtaaaatgtaagaagtgaaaagtgaaaaaggttttttcctccaaaagcacttatatagtacatgtgggaccctttcttcacttacttcacctacacatcaaagagataactaaagcaatcatttctctacagcaaatgagattagacagttaaggaaaagtatttcaaaaagctaaaaatgcaacaacttttattcagtaaaggctacagcagtcccgaccgcaccaacatagctggtaagtccctatccgtacaaatgttcgcacatgcacttgggcagaaaatattatcttgatttttgtcctcctgatgtggcagtgtttatgtggaaaaaatcagtgccacatggcagtacatctcaccaatgagaaggccaagtcagtacctcaacaaacagagaccccaacactcaaacagatatcaagtgacggaccaacttcctcatagaagttggccggcccgaccagcctttggactgcaccatggctggccagcctactcactacaagggtctagccggtcaagagaagctatacaaggttttttgtgcacttttacacatggacaacatcatttgggttgtgaattgggtcctaaaagcccaataaaatagttgaataatatctatgctcaagggtattttggtcttttataattaattaattgaatatacaaataactagggtttaaagtgtaaatgagggttttaggcttcctatataaaggtcttaaatctaacctaggaacctaagttcagtttaagcctgatactagtctctaagctctaagtctaattctaataactttcctcttcttcactctctctctcacacgcccatacaggctatctctacacttgagatttgccaatcttgattccttctttgtatcctttagggtgctatatcacatcccacctatagtgatctgaatagtgttaactctcgatattaatataactaaaaggggagtagatcattacccgctatcaaagggggccaaacgtctataacaaatctatgtgttctttttttcattctattcgttcaccatgtggcaaacatcaggtccatatgaccccactgccggttgatcattttttgaggtcaacacattacaacatggaaaatactcaaaatgacgagctagtcatggaagaacaaacaacacatcaactagaaaaagagtcacaggtgcacaaactcggaccaaccaaggaaggggtcctactgagaggaacttcgagagaagtgaccctaaggaataatttcttaagagaatggagtcagatgcatatgaccccacaagatatgtcccaattgtcaagttagaaaatcaacaactctgtcgaaggctcgcgaaatccaattgaagaaatgaggaattggaacgggccatggatgtggccagagtaactcaaaaagatgcaccgcttgtgtaggaagagcagactgtacgatgactgcaatagatgccccatggttcgcaaaccaaaagggcacaaggacccaacattgaagaacagaaaccaaacaatcacactcacccctaggaacaacaaccaggggagaaaagggacattcatgtttatgggcaaggcccttagattagggagcgaaaacttcgtggcaaacacgagcaagggggcaatagacgtctcaaagaaataataaaaatgcaagtgatcaaccacctaattggtcttgtcatcccccacatccaccacaaggatgtaagaaagaagaaagagacaatatgtacacatacttgaatagaggaagagtctctaacttatttgaaaggtggagacctgctcgagaatcaccataagaattagaggctaatatagcccagagtaaatcaaggagtaattgcaaaatcgatcctcgaggtctcgcacatggtaagacccctcacatggtaagagaacaccccaatatgaatatcgaggcgagaaagaaagtatgagtaactttcaaagttaccaatcagaaagtatctatccaagtcaatcaatgagcaattatgatggcaagcaaaatcgatgccaaaacatgtctgatcaacctaatttgtgagaccatataaattgaaggcaccttgatttgggtgagcatataaatagaaattcaccagatctcagagtgagattgaacataaagctcaatgagtgaatgaaagaactaatcaaccctttgatagctccatccaacaaaggataatatagttggaagattagtttaggaaatatcaagatggagagtatggaaaacttccaggctattattcacacgatgatccaaaaccttttcaccctgatattttgaactcacgattctcgaaaggattcaagaaccctcatgtcgcacaatacgatggaaccacaggccctgtcgcatatttgaataactttaatactataatgggaacaagtaatgtttctaataacttgtgttgcatattgtttcctacgtcgctaacaggggcaatgagtagttggtttgataagtttacaaatcactccatcacctagtgagaacaattatctaaagaattaaaaaagtaatttcaggttgcgagggacagaagaccagaagcatcatccttgacaaatattaaacaatagtcgggggaatctttgaaagcattcctgagttactttagcatgacagtagcaaaggttaaaaacttgaataatagtattcaattgacaccactccaggctgggataactactgacttgcctaccatgggaggcgagttgtgggatgatttgcaaaggtgcccagttaaattaataaatgaatttaatgatagggcacccatctatgttaggaaggaagaagctcagactgaattaaaagtattaaaggatggcttggggaataaaccccagctcaagcaatgtcgaaacaaacgttgtaaagatgagtgaaaaccatgaaccacatgggaagaggaaagatgattccaaggactcatccgacaaaaagaaacagaaaaagtatgtcctaatttataccgtgtataccaagctaaatgaaacacgagaaaatatattccttgcgaatgagaataggtcgcattttgcaagccagaacctatgaggaatgcaaggaataaacgggatcagaataaatattgtcactttcacatgtacattggtcacaccactgaggagtttcgataacttaaagatgagattgaaagtctaatttctagaggttactttcaacaagacgtgaagaatagggggaatgagtagattcaacccacaaccagaatcaaaaccaaaatgtccagcaaccatctatagagggtgaggacatcttggtgaattttttaggggacctcatcttgtgggaacaagtaacactgcacaaaagagatacataaaccaagttaaaaatcaatcttcaatttttgtgcctgagatgacaaaacgagctaagaatgaagaacttccaataacttttactgatgaagatgtgatgcacgcaatgtttcctcatttagatccactcatgatatccattcagctctaaaataagagaataaagtgagtcttggttgataatgggagttcaatgaacatactgtataaagagaccttaaaaaaatgggattagatggaatgactctaaaaccatgcatggttaataatctgtcatcacttggaggaaagaacattaataatttacattcacaattgggtaactgaaataacaagattcatgttcctaagaattcatccatatttaactacattgtttttgtattttaattttactgcttttaaatttaattcttgttaaacattattctcaactttaccaagtaaaaatataaatctagtttgtggtacttgatattaattccttatagatcgacctcacttatgtgagtaaaactgcaataaattacgtacacttgcgtatccgtttataatttgcgtaacaagttatccttgggagtttgtgtccatcgtggccaatcatattgtggaaaccaactcattatgattaatattctttgggagtcacatattcatagaaagttatgcgtagctcaaatcaagacatgtcttatatttattaagagtttgatgaagcacttaaattatgacattaccatatgatgataggtagtagtagatcactaccagtatgaataccaatctcgatagagacaagatcctactaattggaaagacaaaatggtcgttgtgggagatatcacctttgatgcctaaccgtgtaatggggtaccgagggcttgaaaaataatcaccactagtatatatattgttaatgaattttattatgattgtgaaatgttgattttgagaaaaatcgtgttgtgataaatggtttatatattatggtattagcataagggtgaaatgttgaaagtattaatggtgtcatgtactggttagtaatcttaatgtttatggtatgaccttttaaatttatgaatgttgaatgactattatgtgtgtgcgtgatgtgtaatttgtacgttttagcatttccaagtatttgttagggttggagagatatccaaaccctagtttgataatttgaatgattgttggtgttgtggttgaaatctgtcattttttgtgtttcctactagtaagattgacttactaatcattctcgtttacttaattgtttcgtgttgtaggttagtgtaaactcaaagtagagtagtgagtgtcgaggtttggtttcagaagatgtaaatgtggccgaccttaggttgttttgaaattggtgttttggaaaaggaaactttatgggtttcaatacttttggaataattatattattgtattacttctaaatgatgtaaaactaaagtgcacacactattttaaggtctttattatatgggatttcaaaatcatgagcttaagtaaaatgttttaattttttttttttatatttttgagtttgtatttatttgggtcgttacaacaataatcctttaagtttatttttatttgtgaatttaagatattatttaaattttattattaaatatcaattaagattgtcactgcatacacttatgtacacgtgacactaaaactttgaagttaataaaaacatactacaatacacaagtatctacagtgacaatccagttggtatttaacattgtgattttaattagaatctcaaatttacaaacatatgtgaagttaaaagggtattgccatgaaaaaatcaaaagattaagtgtataaaaattaaaacacttaaaagaaaaaattagtgaaaatgatatttgttttcaatgacattattagttttcaatgatatttgtcattgttttaaaagaaaaaaaatcaatgaaattacataattttgaattgtcatcacaagtttttaaaatttaaaatgataataattaaataacaataacttaaattaattttaagagaatcaatataatattaacattatatatttttttttaaaattattagaaaatttatattaaaattttagaaaattaatatttgtatgaaagtagtgattaagcatacatatttttatattattcaagtattttatattactattttaattatttattaaattaaaaatatgataaattattttataaaatattttttttggacccttattataaagataaatgatatttttaaaaattattaagaaagtatgtctattttttaaaaagtatatttttatttgggcccctaaaatgaatgagccctaggcgcaagcctagcctgcctatacctaagaccgaccctgatcatatgataatattacttataaaaatattttttttttattttttatgggaactatctatttttattttgggaaaaaaaacagaaaaatacaaaaaagaaaaaaaaaattacaaatatactatggaccgaccctttaaatatttatacagcctacatacaaatatttataaagataccacatgctctaaacctttagctgcaaggaaggaacgatcaagaagaacagacctcgatcgttcaaatcagcaacacaaccaaaatgaaaccaaaacgagggaaataccaccattaattccggtgaaatcaattggaaaagaaaacatgcaatgatctaaacagaaaatgacgaaataaatcagaaaaaactgtgaagaaactgaaattacacatttgtt

SEQ ID NO: 43664 - DNA, 3391 bp, Cannabis sativa
aaaaaaaaacaaaagaaaagaaaacagagaaaaataaagtctatagcttttatcaataccactttttactattttcccaactttccccttatataatatctgtttgatccaatgctgcatccacttttttagtggtaattattggatatgaacccacaattgaatatgcaacaaatgaaaaaacagtctatattgtctactactgttgaagacattattgcaaaaatctcacaagaaaaaacaaacatgaatattttttttcttctttttgtacgataaaaataaacttaaaagttgtacttacatcgtccaacatggacatgagtttgctcttcttgctctgcaagtcttgttgttccgtttgagatagctcacaagaggagttagcggttgattcactgggatctgcggattgagtgttggatttcaaatcgctttctttaagaccatgatcggatccaatcccctgaaacttatggttattctggtttttgttcaaagcctttcgaacatttaccacttcatcaagcaattcctgtacagccttgaggtacttgaagttcaacccattattgttattattattattgaaaccatatgatggttgatcatattgatcatgatatctttcactctgatgcattatctgattcccaaaacactccgttttgattgaattattgttgttgattcccaaaaacccagatgccataatattgaagctctcaacgttttgttggttggttcccaatcccattcccatattattacttgttagacaagtacccatatgatcagaagaaagactgggatttgatgaataatggtactggttatcatgaagaaaagaagtcaaagaaactggagactcatgaatctgtttccctaagctgagagataagccctgaccttggtaatgaagattattattctgatgatcagccaaagaatcaccattcagtactgagtcggtggctatagttggaataaacatcatttcgtttctcccttgagatgagtcaacgcagtaatttgaagagccatgaaaactcatcgagaatggttcagtaggtgaagtactttggttcaaagatgtaacaaatgcttcgtgatcattctcatgataagctgctgtggtagtactactcgccaagtcacattttttattcaagctttgattggggacataagtagccataattggattctaatattgatatctgtatgtatcaattaatgaagaaactcctccgaaatttagtttgatgtagtcgtagtgctcttcacgattattaattggcatccatatctacatcatatatatataccaatattaagtaaaataatgataataacaactataaaaatataatattatcccagaacggcaacaaccttgaccttagaaggcaatcaaataaagtttttcaaaaataataagtaatatacttataacccagattgtcaacttaattagaattattattattattgttattcctataagaaaatagtagaaagcgtatacagttaataattgatccaaatcaattcgaaaaccataaacccagatattgcttattctcgatcaaatatcagaatcagtacaaagttaattacgaaaagcagaaattaaaataacacaaactcaatttaaagtttatacctgcaaactccaagaacaataatcaaatgatcatggtgtgcgtctttaattatagtgggaagaagaaaagatcaaaccttgtgccccaaagaaaaagtattatgattccaaaagtcggccaatacaaactcccttatcccttacctaaaagggagacagagaaaaaagaaaagaaaactaataatcgcaaagaccaaaagatgtatacagatacagtcccaaacaaaaatcaacctccttatcattggaacaacggcaccaactcaaacaataataataataatatataattatcaataattttgacaattttaatagctacagcagtaccaaccacaatataatatttaaaatactccagtttgtttaattacataaaaaaaataaataaaaattaaaagaaataaattgtttagcaagaatatttcttcttctgcaatgcttgtaagttttacacgtgtgagaaactcaaagacacgccttaaacgcgctagaatgttcttcttcttctactactattactatacattatttttcaattaataataataacacaaataaaaataaaagaaagggttcaacgaatattgtctggtggtggtggtggttgtttgcttaagagggttcaaaccctaaccaccagttggtggacctataactctcccccttaaaccttcttttaacgcataatatttgagacactctgaagcatctacaaactttctctattcattatttttctattcaatttaatccaaaaactaaagaaaataattattatcataataataatgttattgttaggcctaattaaatatagagtatacagtataattaatgtatcatattcatacatacatacatatggtgagtagatgtgagtgacgaacgagttgatattgtagatacattaattattatgtaaattaattttattattatttttttgctaaaatttatgtaaattaatttaactcatcatgattcatgatgatgaagtcatatatgacggctgtgcctgtgcccaaaaatctagctaattttatatttgtcgtgtggaaatatttgaacctaataaatcgaagaaagaaaattatagatatatataaaatataataaatatgtatagttaatttttttttagctcacaagccacaccgacgactttgaagtaataacgaagttaaattaataataataacattaaatatattttaaaatcaagaaggaaatttatttgctttaaataatattattttgagtataaaggttgctaattcactcggtttggggctactagctacacattattattggtccaaactaattaatgatatggtgatttatttatttatatatatatagaatgaacttgtgtttcatttttcgttatacgtcacattagcgtaattccctcttgtttaactacctactgctactactactacttgtaaattaattaaaaatgcatgattatgtgttttatttttcggttgaattttacatcgaattaatgaaaaaaaaaaaaatagacgctttcagtaccaaattaatatatcatgccaaattttaaattagatttttttttaataaaaatcataagatttattaattaataaattcgttcaaaataatagaacgcacttcaaaagaatagtcctccagttgaagcatacgaactgtcgagaaacaagagtctcttgccaagcaatgagccaacttatt

SEQ ID NO: 43665 - DNA, 2060 bp, Cannabis sativa
aaggggtggctacgcccctcagtgatacaaaaagagagtacgcaacctaaactaaacatatcgacggctgtgcttatcttgtttgtttgatcatgaatgttgattctttcaggtggttgccaacctttggtgccatatgatgtgttagtgattgaagatctattataaggaagtggcttacttatgcccatatcacaaatctttgcacatatagaaataccactttcatcttcttcttcttctttaaatatcaaaatgttactaggcttcaaatcacgatgcattattttcaagctatgtaaatattcaacacctttcacaatatccctgcatatatataacaaatctattaatacatgataaatttaaggctattttggatttttactccctgaattttgacatatactaaattttgttcttgaactttttacgtcgttaaaaattctcctcgaactattgagattgttagatttaattttactaaaaaaagtctgacgtggatgaaaatttaaagggtataatttggtataagttaaaatttaagggacataattctgtaaaaaacaaagttcgagggcacaagttagtatatggacaatcggtgccacatgagcataattgaatgaaattagatcaaaagtccttcaattcaacaatctgaatagttcatggagaatttttaacgatttaaaaagttcaaagaatatcatttgatacatatcaaaattcacagagtaaaaatgtctaaatgtaaataaaagtatatatccacatttgtataaattaatacacatagtttgtaattaatgattggtatatattaaagtactttgaattttttgaaattatattaaagagctcgaataattaattgcaatgtacaagaaattgttaaaggtgcctaaccaattacccttatctcttaggataatcagttatcttgtactaattttctcatatttttttttttaaaattttctcataaaatactttgttcgaaaaaaaatatatttttcacgccatgccctaaaaatttatttacaccggaaaataaatttatacccttcttaataattagttctaaaaattaagtgagaataattattaattacctcatcaattttactaagaaatgagttggacgacataaaaatttgatagatggtacccttcgatgatctccaaataaggaattgcgtagtagtaattccgaaggagaaacattattaggatcatgtctagaggtacacaatctcatgaacacatccaaatcacaaacaccacgctcgagagcaatgtagaagaaattagagtctttttccacaccataatacctcacaatatttggatgttggtttttcgatttttcgagagccttaatctctttatcaactattttgtagtattccaattgaagccttttcacggcaacacttgaaccgtcgaataaaccctcaaatacaatgcttccatagctcccttgaccaattattttatctggaaaatatgttaatttctcactaattactcttggcttattcaaattagtattagtatctgaataatcactttccatatcctgagttttaagaagaagaagaaaaaaaaaattataactattagattaaagaaagacaaataattaagtcataattaaactacttaatattagatatatgtttatatataaataagattataattacctctgaattatgtaattgatcatcatccatgataaaactcatcgtatatatatatcaaataattattatgcagccaatttaggaactagaaatatttatatgtgtttatacatagaagaaagatgtttgatcgacaatgcttaaaaacgtgttaagatcattcatatgtatgacttttttttttgaccatatatatatataaataatcctaattaataattgctaaaatttattgatgattcaaagaatagtattattattaaaaaatatattttgtaattttttttttaaatgtaaaagcattgcaaattgcaattattaatcatatgtatttgtttatggagaaagcta

SEQ ID NO: 43666 - DNA, 1558 bp, Cannabis sativa
gcaagccatactttcacttagtttcaatgatttgccttaccacttgaaacattgcttcatgtacataagtttatttccagaggattacttgattaaacgcaatgttttgattcgattgtggattgctgaaggtttcatagaagaaatggaaggaagaacattagaagaagtggcaaatggttgtttcaatgagcttcttaacagaagtttatgccaagtgaatgaaagatacagagatggaagaatcaaaagttgtcgagttcacgatatcttaagggaaactatgcttcttaaatccaaagaacaaagttttggagtagtaactaataaagagagtaacagaagattacctgaaagagttcgacgcctatctcttcatgaaggaacaaaaatagatccattcggggacaatgaactatcacaactgcgctccttgctcgttttcaccaaagaaattcatgtttggaataatttcaagtcttcattttttgaagaggggtcaagacttctcaaggtgttggattgtacatatgcacctatgaccacatttccacaacatatcacaaagctataccatttgaggtacctaagtttaagagataccaatgtaagttcaattccaccctctatttcaaatcttcaacatctagaaacattagatcttaaaagtactcttgtaagacagctacctagtgagattttacgattacattgtctgcgaaatctaaccatttatgatcataaaggttcaggttttaaggctttaaaaggaatgaactcactttcatccttgagaaaactatgttttgttgaggcaaaacttggtgataccgagcttttggtatccatacaaaagcttacacaattaaccaatttaggcatccttaaacttggagttgagcatagggatgcattattctcttcacttcatgaattaaagtatcttcgctcattacattagtattcaagaacagaagatgaagaagttcttaatttgcagcttaaatcattgtcatctcttcgattacttcaaagactatacattcgtggacgcgtggagaaatcagtagaaggactacaagaccttacaaacttgtctaaaatacgtttggttggttgtaagttgcaggtagatccactaaagtcattacaagatttgcccaatttagtatcacttgagcttttcaaaggagcttatgatggggagtcactatgttttaaagcttggagtttcttaaaactcgaaaagctttatattgacgaaatggataagttaagaagggtgattgtggaagacaaagcattgtctcatctgaaaattatgtggctgaaagattgcaaattggtgaacaaattaccattaggaattgaacacttaagaagccttgaagttcttaatttgatcaatttgggtgtagaatttatagaaactatatacaatggaagtcaacatgagaacttcttgaaagtaaaacacatttcaaatgtgttcattggcaagtggaatattgaaacaggatttcaaggtcaaaggctttaagagatgtaagtttcattc

SEQ ID NO: 43667 - DNA, 3793 bp, Cannabis sativa
aaaaaaaaagaaagaaagaaaggaagaaaaaaactatttctgtcctattaagttttctttcttttatttttcgtctgatcaaaccttagacttacaatatattttagctccatagccctcccaaaattttgaaaaaaaaaattataaagggatttttatgttaaaaatttaatttttccgaaaaattatgtatttaccctttggccccttagtttttcttttatcttttggcctctgtccctttataagtaacataatatccatgctaattaatattaatttcaatactataccttaaaaatgtattgcatcctctcaacatcttacaaaaattatatataacttattttaaaggggctgggcgaatatggaattttttaaaaaacaataaataattataaaaaggaatatgtaggctagttatacatgtccaaattactaagcaactaagtgcaacacaacaaaatataaatttgtgcaatcatcaaaaattttacgactacaaatagaaaaaattatagatatataaaaatatacaatatcttaattggtatgatgctttttgaaaatgtgcccaaaactaaaatcataaaagctaggcacaatatattaatatatatcacactaatgtggagataaatgatatactccaactccaataagtggtagctaggagaaactagttctataaagttagtcatattaattgtgaatgaatcatcagaaggagatgagtctcgataatctcacgataggatctgtagatgtactcagctaaataagtgtactttagataaagaaggcctgaggaagagcaagaaatttaaaggtagtgatggtgctctatgtaaggtgtagaacctattggaggaaagtatatatactagttggttgagaatcgtctgtaaagccctgaagatcaagtcttgaagaagcttggaatgtgagaccaatgtgagttgtaccggctagatatctcaagactcttttgcaagctccccaatgttcagaggtgggattttgcatgaattggctgagtctatttacagcaaatgagatgtcaggtcgtgtcattgtgaggtattgtagagctccaatgatgcttttatattgagttggatttgtcataggagtgccattgtgagctgttattttagtggatgagcacataggagtggattgaggcttggagtccaacagttgagtttttgccaaaagatctttgatatatttgtgttgagagagcaatatgatgtcatcggttctgtggacttcaaaacccagaaaatagtttactggtccgagggctttaagggcaaatgtgttgtttagagcagaaatgacttgttgaacttgtgtggagttggctccattaattaagatatcatccacgtaaactaaaatgagaagtaactgaccatttgaggttgtgaagaaaagacttgtgtctgatttgctgttggtgtaaccccagctgattaaggtggatttcaaggtgtcaaaccaagcccttggggcttgtttgagtccataaattgctttgttgagcttgcatacatgattggggtattgagggtcaataaaccattgtggttgagccatgtagacatcttcttgaaggtctccattcaagaatgcattattgatgtcgatttgctgaatttcccaaccatgtgtgatagccaaagtaaacataatccgtatagtgcatggtttgataactgggctatatgtttcaaaataatcaattcctgcagtttgttgaaaaccctttgcaactagccgagctttgaggcgttctacagaaccatcaacattgaattttatgcgataaacccatttattctgcactatgatcatatcagaggttcggggaacaagtttccaggtcttcttgtttttaagagctgtaatttcatgttgcatagctgcattccatttggcacttgcaagtgcagctttgagtgttgtaggttctgtttcatcacttagattagcaacatagagtttgggtttaaaaataccatgcttagattgggtaatcataggatgtatgtttggagctgaaggggaagtaaggactgtggaatcagctgaatgtggtgtggatatggttgctacaggtgctacaggagaaaatgatggtgatggtgagtctgaaacagaagcagtggcaactggttcttgttgtggactggacagagaaatggtatgtggtaaaccagatggtgctgtttgtgttgcagcagacacaataggccgattttgaggaacaagaaaagcatcagagtaaataatttgtgttggggtgactggggaggaaggtgatgagggaaagagagagttatagggaaattcttgttcattaaaagtgacatttcgagagacataaattcgacccgaggggtgtaagcaccgaaaacctttagatgaaatactatagcctatgaaaacacattgggaggatctaaatgatactttgtgttgttcatatggtttgagtaaggggaaacacaagcacccaaaaactttaagcatgttataatcgggtgattgattaaacaatttttcaaatggtgagagattatttagaataggtgttgggagcctatttatcaaataggctgctgaagcaaatgcttcccaccagaagtgtaatggcatattggcttgtgcaagcaaggttaagccagtgtcaaccacatgacgatgttttctctccactctaccttgttgttggtgagtgtgagggcaagaatttctttggacaattcctaaagatttataaagagagtaaagtggttcatattctttgccaagatctgattgaacagctctaatctttgtatgaaattgtctctcaacaaatgtgttaaactgggcaaagatagtagtaacttcagatttatttttcataggaaatatccaaagaaatttagtatagtcatccatgaagctaacataatatttgaaggcatcattagatggatagaaagaaggaccccatacatcagttaaaagaagttgaaatggctgacttgttttattagaagtagttttgaaactaaattgatgtaatttgcctatttgacaggcattacaaaaatcaagtttcttacatttaatattgagaacaagctggggtaacattttatctagaatggcttgagatggatgaccaagtcgacaatgccaaatgttggtgagttgggacttgtcatggaccgggttgcttgtagttgtgtgattataggcagtaggtggatttgtgaaagatgcagtggcttgctgtacagaatcttgagacttggggttatgaacttggagtttgtaaagaccctcactgagatggccctgcagaagggttttgctggttttcttgtccttaataaggcaacaaatatcatcaaattcaagagtgacattgttatctttagtaaacttagaaatgctaagaagattttttgtaacatttggtacatgtagaatatcttgtaaaacaagagagtgattggggtgagaggtgggaacagaattgttgcctaagtgatgaattgaaagagtagaaccattacctacaacaaccttagctttccctttgtagtcagctgctgtggttagattgtcagcatcattggtcatgtggtgagtcgcaccactgtccaagtaccatgctgttgagaaatctggtgtggaattaatctcagataaattggcttgaggattgtcattgggggttgaagaagatgtagaagcagctgtatttccctgaaatgtaatgtcaaatcggtga

SEQ ID NO: 43668 - DNA, 1520 bp, Cannabis sativa
  modified_base (376)..(378): a, c, t, g, unknown or other
aaaaaaaaaaatctaatccgttatatttacaaacgggtgaaaaatatagcatttcactaataatctaatataaaattgttcttaccaaaataaattaaacataaaagtctatcaaaataaataaataactaagcataaaatttgataattaattaaagagaactgatcatatataaataatctttattccacacgcacagttcgatgcatatttatatatattaaaatactaactcaaatttttaatttgaattttgatgttagcacagcaataaaaaccaacttattatatatattataatagagatacgtcggtcaaataacagaaaatgaagtagttattcaaattattcatagtttattattattattattnnnattattattattattattagcctctccggcggccaccgcctgatccgcccctaccgggagaagaagtgcccggaggatcatggccccgattagcacttggttggtcatagtcgttggtgctcaccttcagagacctcatccctggctgcaccctcatcatcggcaaatccatttctactttttctgcaatttaacaataattattattattatacataacctatatattatgcatgcacacacagatatcacaaatcggtataattggaaaaaaaaaataattgaaattatattacgttattcttgtttttatgattatatatagcacaataaaaacaagtaataattaattatatagccaagagcagtagctgcagtaccaacattaataaattttgtcacaaaaatgtgtatatgtaaataaatgttccccactacttacatataaatacatatatttaataacaaaaataaagaaattcattaactataggagctagctgtattcataataataaataataatgtatagtaactatatagttaatggaaaagggaaaacacatatatggatgccactggctctagctcatatccagctgttgatgatgcatgcatatccccactcaatactattaccaccattaactcaactcaattattctaaatctatctaactattctgaaaacttccagaaattaaacacataacaaaacactaaagaatactgggtttcatcagaatctgatccaacatcccatttgaatatataataataccacaattaatatattcactcaacaccaaaactacattattctttgatctttttcatcagttcccacgaattaaccaaatacactactcaatttttcactaatttttctaagtcacagcactgaaaaccatccaattaaaaattcaggcacgcacgtagataaaactgaaaattaaaagccactttgaatctctactatgcaaattcaagtataatgatctactaacgataacaataaaaggcgttacctgaaagtataaaggcgtttcgggcagaagatagttgaagagtataggcaaacaagagaaacaaacacattagtcgacctacgaataatgccatatctgcgtgttttttccacct

SEQ ID NO: 43669 - DNA, 1317 bp, Cannabis sativa
  modified_base (27)..(37): a, c, t, g, unknown or other
aaaaattacaatttgttatgactaaannnnnnnnnnntcacaacaaaatattacttgtgactaaaactaaattagtaataagttataactaagtactatatattttagtcacaagtaatattttgttgtgactaaagtcacatttagtcacgaaaaaagtatgttgtgactaaaaagttatcactaaaaataacagttttttgtagtgacaataagattggtttaatgcagtatgaaacacagctgattcaaaaataagttttgagtgttttatttaaaaaaaaaaaaaaaaatctatttacgtagttagatatgattagtcgtagagtttaactagccgcgaatatcccatttaatttttatatataacagtacacatattatacgtacattgtagttattattatatttatatatagttcgtgttctaatttcgatagcataatttatttttggaaaagaaaaaggtagtcaatatttaaacaccgtgttataatgttattccaaaaaagaaaaaaaaaaaaaaaaaccttataaattattcaaacaaaacaagatcttcccaggcaaaagtaaaatactacataaaaaaaagtctttatccataatttaaatattctacctagctccttgcttttattactgcagctgtttatgttatgtgtgtttcttctccttaatctttatgaccttcttcttccatatgggccagaactcgcgccagagtttttgcattctttttcatttaattttactttttactttggcttttcttcacctcctttctgactgaatgaagcatggaaatggaatctttcaaattactttaaaattttaatttataaatatttaatttagagcatatatattactcatagatatatatatatatatatatatataaattatcatcatcatgacaagcttacattacaatatgatctgataaaatacattatatagtgttttccaaatgcatatgtatgacagtatgaggtcctttactgtggcactgtgataagcgaataataaacactcttttcaaccaaaaaataaataaaactgaaactttttggtttaattctactatatttttctaatatatagagatctgagttgtattatatataaatatatatataactattcaatggttacatttttttattgtaacactatggttacatgaaagtaattcaataatttatttccttataaaactttaattaaaattaattatattttaaaattaaattaattataattattaattaattgtttgcaatttattactatataagaatcttttagcaattt

SEQ ID NO: 43670 - DNA, 3460 bp, Cannabis sativa
aaatgcgaagttgtgaatttgacttctctgacttcatggatcttagtcattgtgaaaactagacggacggttgaaacagaatcagaatcggataagccaatttcagtgcaccagatcatttgtcaacctgggcgttgggtaccccattttcgagctcttgggttgtcgttttgatacttccaaggttcttgaacttgaggacgaggtctcctaccctgtttttgaccattccggattcaatggtcgaatatgatttgacatttgagtaatcgaaatcagcgcaccagtttgattgtcaactagggtggcttagcactaagtcaacttggacgctgggccccgcgccggtgtcaacttgggcgctgggtcctagttaaggtcttctggaagttttgtttggtcctcagattagttgaatcttaatcttttctgaaaacgaagaagatgctcggaagagttctcgaaaagtttcatcggaattggccgagattgataaaatgtcatcctaggcgttgggccagtcccaggtgtcaacttaggctctgggcctttcctttggcacccaaaaagtgttgtttcttccccaaaagtacttatttttttcttgtttttgatgaagacgaagaagatgcaaaagtcggatagtcgatttgatacttagaaggcgcttagattgacaaattgtcaacctgggtgctgggccgctcgggcaccaggtgctcaaaaatgaacttgcttcgaatttgattctgatgcctcaaatacgtcggtggtatgtctaggtgatgtactaatgcaaaatttgacccatttgcactaagacgttcccaaaaactgaaatcctagttgggaatgtcaacttgggcgtcggatgaaaccataagtgcccaggttgacttttgaggtgcaggttcgtgtaatttcagttcccgaggcctggatttagttgctctatgtcttcatgatacagaatagtgaaagatagcgagttgaaaatgagttatcgaagtccaaacttctattttggagtttccgtagtcaatctgggcgcagggctagggacccctcccagatcgacttgctatgattcgggactactcaactccgagatgtcatctttcttgctgccatgtgtcaaacattgatgtccatgccatcaaaggctacttttggtgtaaacagaaaccatattaattttaataataacatgttatgttgtttttaatttcttggaaatatatatttaaaaaataacatattaagattttcacattatcttttttcaggatctgatcggcacgatggtttataactacttgtatacctttctctcttattaggctagtcttttgggagtgatttctactaagtggttgtaacttgtaacatctataatcttttttttattagtcatagttgtatgatctgttagaagcaaatgtattgtttgattacaataagcaaaattatgtattgatgttttttttgaagtttgtatgaaatagaaattccagcataaaagattttgaaagcgccaacgttaacaatttacaatttttccgtgtgaaagtatttaacataatcacacttcacgcgtacctaatttgtgaactttaactggtaaggtggaagccaaatatctcgtgtattttgcaaatgcttaaaggattactgatatctgatatctttttgtcttgatatctgtagaagcacacatatactgtctctagtgtaaatactggctgaacatatttttttcttttaattcattcatatatttggtcgcttatgtgtaatcctttcaaattttgttcaaataggcctgatggaagagtcataggactcattaaacatatgggagcaaaatcacatccaacacaaaagcgggttttatgtatgaataaggttgacttagtggagaaaaagaaagacttgttgaaagttgctgagcaattcaaggatctaccgggttttgagaggtaggattttctttcttgtggaaaattatatttaagacttccctctgttttgctctaatatacccacagtgctttatatggcttgctattatttaaatgctcattttatcttgccaggcatttcatgatatcaggtctcaaaggttcaggagttaaagatcttagtcaatatttgatggaacaggcatgttactttcgattatttcatgattttgttgcaatattcaaaacaaacttactcacacatgcacgtataggttgaattgagatcttctgttaaaatttggtgttccataatatattaaaacaatctaagtgtgacaacttaactaattaaattttcttagacttcattaactatctatacagtttcttttttctttaaaatactcaaattatcaattacagggacttatggatggaattaattctgtgttaaatagaaagaaggaggacgaagatttaactaccgacctaacaagactcgatatcatcaaatgcatacagtcagaaaaagttagattccgaggggttaatctttctggccttgatatatttcatagttgaacattaactctaacttgagaatcgtgcccatgcatacgagggggttccatggcccttctggtcatggtttgcaccaaaaccccactggttttggaaagaaatttggtcattaccccactggttttggctttaaaaaatatcctggatcccttggtgaccaggggtctcaaaaatattggagctttcgtactgctcataaggtgtttatgctcactttaacgttggatggtggttcggttagaatctgtgaaagaactcgcatatcaggctacgagatagcagttactttggatgcaacttcatggatggtggacattgtagaagacctgataactagggaggaggagcagaatttaaacttcaagagatcatttaggaacaactctaacagctgcttcttggaaagctttcacaacaggaggggggtgttcatgaaggtatctgtccttaggaacaacaagatatcaatggtgatcatcccggaggagaaacacgctagaggatggaaggattttgcacggtgcctcaagggtgtattaaaaagagataatcagttgaaaaatgacaacgttaatacgaccttgaagctacccgaggagaagaagcgtggaggacttaagcattcttgggccaatattgtgaaacagacgacgggaacaacgagaaaccaaactgatgacaaacacgtcgaatcaacgactggtagaagaccgaaaccgcctgataggagaaacattatccctcaacaaagatcccaaaatcgaaaagacaacaagttgggattttgggactttttaccaaaaggaaatgggagcttcagaccacggaatccgtttccaaggaggcgaatggaacagaaaaattttcatgaatttttacaagcggatgactgtgataaggattggagtcgagct

SEQ ID NO: 43671 - DNA, 3522 bp, Cannabis sativa
aatccaagaaaaaagaacaagaacacaatactcattttcaattacctatataatatccaatcatttaagtcttcgagatatagaaaatgtctcaagcattgtcaaacataagcctcttccttcctctgtcatcatcaagaagggtgagttactcaccaaagcttcaatcttttccggtcgtcaaggccagggcagcaggggactacagagacaatcttgaccacttacagagagctccaactacgaagcaacacactcaaactccacctaagaaaagagttgccccagcagctccagtaggtataaatctcaaaacccatctcagataatcaacaaattcagcttctttttcgaatttcaatgctcaaaatctgaactttatttttttgggtataggattatgggacaggtttccgacggcgagaactgtacagcagatgatggagacaatggatagaattatggaggacccattggagtactcaaatgggtggtcatctactgtgcccagcgaggctactccgtacaagcgagggagaacaccatgggagatcaaagaaggtgaaacagagtacaaattgaggttcgacatgcctggaatgacgaaggaggatgtgaaggtttgggtggaagagaaaatgttggtgttgaaggcacagaaggagccgaagaagaaggaaaatgggatcaataatgggaatggggaaggagatgaagaggagtggtctgctaaaagctatggcaagtatagttgtagaatcgctttacctgagaatatccagttcgagaagattaaagctgaggttaaagatggggttttgtatattaatatccccaaagctactgttagctcaaaaattttggatatcaatgtacaatgatcaaaattttctttttggttctaatctagctagttgtaaatgataaacaaaatagttttttgagataatttgattgagtttaccgtggatatttcagttggtgttggatttttttcatatgagattattgtttttctgctattatttctagctagctcttctttattgtcgtctttggtttgaatgttgcttgagatttcagctcttcttattctttttcatagttaatgtcgttgtcgtttttcactactgctgtcgttgtgttttgttctttagtatccttatgattaaacccctaaactccaagagagagagagagagagctcataaccccattaatctcctcaaaatcgatcctcaactaatgttttgcttgaggaattcagctctctccaatattcgaattcaacttcttcaatctttatcaagggtaagttcagccaaaattattgttagaattttttttggttgtttatttcatttttcgagcaaccaaacaggtgagattgatgtggtgtattaaattcactccaatgagattacagatcaatggagcaggaggaggagctcgactcatcagtgtgaaagcgggaatggagattccagacggaaagcgactcgagtttgcacttccgtacatccatgggatcggtagagccagagctcgtcaaattctatctgaactgaacatggataacaacaaactcgccaaggatttaaccaaaagggaaatctttcttcttggtgaagaactctccaattacgttattggaaaagaattggtaaacccctaaatttagtacgaaatacaaatcattctctttttgttacgatactacatttcttcttgtttatgaatccttttatttggggatgtttcagaggaattgtgttgagagagatatgaagagaatggtggagattcagtgctataaagggattaggcatagggatggattgccaagcagaggacaacgaacaagaactaatgctcgaaccaagaagagttcttcgcctatttctcttgcattgagaaagaactagtttgtttgctctcacttttctctaccagattggttttaatttttcattttgatcttagtttaattatcttctttggtatatttgttgagatcatattcttgaaatccaattggcattgccgcgttcgtaactcttgacatgattttgttttggtatatctttttaatttgatattgaatgtatcaataacaataacattattgattggtgttgagtactataagagagtatgagtatccttaacaatactctttttgcagcatagttgtaagttgcaatctccaactacagaaccagcaaatatctagtaataaaaacactgtcggaattgcatattttgttttggaaaatggaataagtagacttatctttgtatatatgtgggacaatgttctttaatattctttttaagatggtaatttattttgctcaccaatcttgaatcactttatcataagccgtgttgtttgctcgttttatttttgtttggatctcaagtgcctttatgtagatcgaagcccagctaaagatatgactcgaatactatgttgagaaatatgagattccatctcaaaactcattgctaataagtggagtagctcatatttttataaatagctctatatatttacatttaatctgtgtcagataatattctttaataagtaccgaggcgttttcctttaatctcgctaagcataagcctccaggtgaataggcgtgcacctcaacaataagaacaaaaacttcataaaataggcttacacctcaaaataaaaagaaatccttcataaaatatcagaaaattcataacaaacaacacataattcataacaaagttataaaattcatgaacagtactagttaagccttaacatgataaactaaattcatataaggttcaaactcaaatgttaaagtcgattaatcatctttaccttcttttgaaaagtaaaattgcataacttgactattgtctatataatcaccctcatctcctccttcagattcattttcctcatccatttatatatatatatatatatattgtttttcataatatgttataatagtaaccttttttggtgtttaattgtttttcctctttcttttccaataaaactctcccgaacaccctcaatctcaattgccctttcaccatcaacttcaattaacttatgatcatcaccttcttatttagacttagctacccactcatcatcagaaggcacactttccttaatcaaaggatcattttctctttttttttttttttgtgatttgttcatcaagaatttgtgtttcaacttttctttgtgtgcacctgattaaacatactccatgccgatgtcgaacaagtaagacctaaaattctcatggaaaataattttagttctggaatttcatctccaaaattctcccaccatcgaactataatgattataaaaaatcaaaacaaaataattaataaaatattttatataaactactatactagaaaaaaaaatataagaattaaaagtaataaattaaagtattcattactcatcgttcatcgctcaccaggtgaaatgggttgagtatgaaatcaaagatg

SEQ ID NO: 43672 - DNA, 8103 bp, Cannabis sativa
gaattttactgctaaaaaaataaaatgaaaagttttggaggttttacggatttactcataataataataataataataatagttctaaagtcccaactctcaaaacagaaaaggcgagcaagaatttttctgtattaattaattcaagccaactaaacaacatgcagttactcctttgaaaatcggcatgtcgctcaagttatataaacaaaatgacttgaattacattataaatacggcatatacaaaagcttgaaactttgttaccttacctccacagcataaatagcaacactaacacttgacaaagatcgccaaaaacaaattacgctagcttaagcttcaaacttgtcatgtcaacttgaggtcttcttttaggcacttgagaacctctttgcaagcaactttctttgcaatcctcttgtctgaaacaaatgaagaatgtttgtatgcaactccattagctacaacctcgattgtgactgaagttataccattttcccgcactttgagtggttttttcatctcaaaatgcatttgctggcaaagttcgctcaattctttcgctggatggatctttacagtctcaggtgttatcagaggctccaatagaggccttatgctctgaaaaacagcttccttgttgaattcggaatcgacatatactgccccagctagagattctataacatctccaagtacctgacacaaaatcaaaagcagaagcagtaggtgctttgtgggagctgaaacaaatgagaaaactagttagcaatatatgactgggactgaccttggggaaagatgtctctgaatcccacccaaatgttgattctgaagacagcttgtgaaaattttctatagtagcagatatgtccttgtgcagtttatgagaggaatgaagaatgtgcttgtgtaattcggccttaatggcagaccgtgcatagcaatcgttgttcacagaagccgatctcatgtcagtcaagaatcctggtgaaatcccaggatatttgttgtacaaatacactgtgatgagataatctaaaacagcatccccgagaaattccagcctctacatgaaagaaaaacaattctcaacttgttaaaatacaataaatcatgaaaaaagttctaacagaatgtcataatgatgctgaacattagttttacctgataacatcttggaattgcaggaagcatgtaagaaccatgggttagcgcttcaaccaataaagaaggatcacgaaaagtgtagttcagtaatgactctaaatatctgatattaacaagtttctccgaatgcacaaatacatctctcacaaatggtttaaagactatgtcaacctttataccaagccaattcataaattgcaatgcggaaatttccccgcctgtactaaggaatgcaccaattagtgcctcaacaacatctgcaactcttttacttttcatctttcttcttccgccaatataaatttttttgccattaaatagtgtatcctcttgtaatgtttcagtactagttccaggtataatccagttattaacaacaaaacactcatcacgaataaagccctgcataaagaagacaattgtagcaagtcaaaaatacaatccatttgcactttcaaatcagtgaaaccttttagcacacaaaatttagaagcagaagaaaatggcattcagaaaaataaataaataaaatgctcaaaacattagaaaagaaaaatctacatcttcagcataaataagatctatgcagatgcagacataactgattacatttcagatgtgtctaaataattttgtgtcaacttctctaaggacttctaaactttcactgaacatattgatataatatgctaacagcagtctaaatattcagctatggtagaacaggatgaaattgttcttgtcaatgattaccttgcatgtacaattcaatattttaaaaaataaaataaaataaagaactttggctataataagatgcatagtattgatatatatgccttataaaaatctaggagatacgtaccggtagtttgcgctcacaaccaagcctgcaaagggcggcattagaaactatgttgtccttcttaatacttagaaggccctcatggttatttcgataggaactaaaaagctgttgaccaacagcatatttgagaaatgaatctccaagaatttctagagattctaaatgaaatttctctaggcatttctttgatgtaatagcttccaacacctgcacgaaaaaaagaaaaaagtcatcaggagtttaggtaaaagattagtgaagaattcaccagctggcaagtatggaaaagtaaaaggtcaaaagaataattagccatggtataagcaaacatcagcattcagtatgcaactaaaaaaaaaaaaagacttgatgatgtactcaatgcttaacctatataaaccaaatgcattacccagtatgatcttcctatttagttgatacttgatagcaaacacatcgcaacaaattgataaatgaaaaagtcctttctttgatgtgaagcatataaactacttcaaccaaaaataaagttaaaaaaacaagcgaaacaaaactcaaaaaattacacaaaaatgtaaaaaaaaaaaaaaaaaagtacctctgaacattaaatatataatcagctcttttaacacatcaatttgaagataattagacaacattcaaagtgttcaaaaaacatgatgtgtgactcttaccttagttgtcggaatggataaattttgcgagcaatgatccaaatgcatccttttcaagttggcagcaataagtaaagactcaagacgatgcataattgaaggtataaatgaaaaggtatacaatacagaaagagaaatgggtgacatgataagaacacaaagctctggtggcagctcaacagtcttactagttgtattacttgtctctgcacaaaaaaaaaaccagcccttaattgaaaatctatatagaaatgcacagtggaagcacacataacttagttctctcaagcttcattctactgcaaattcaaatgaagtgcagccataacttcaccttgtgtttaacatttaaatttgagaatgttatctcattaataattccattaaattataatacacagtaacatcacgaaggaatgctaacaaggctaaacaactgaaatcacagtcaaatgaataaaaaaatatataaaaaagaatcttctgctaatcataattgagcatataaagaagaaaaatctaatataacagatatcaaaccttttttctttacttctcgggacaggagaaagtttttcgcgtgaaaaagtttccttccattaagcaatggttggttgacaaactgcaaattaatttcatgcctgcattttaaacaatgggattaaaatatattataataaaaatctcaactaatgtatacataaatcaaccaagaaaattagataaaataatactgttaaccaaaatagaaaatcattattttatgctattcccacatacacaagaagtataaaggagtacatacctaacttcaaagtaattcttgtatgtagtacttttattatccctgagcttcaaaactgaatgtccgttcatctcattcaaaatgtcagtgatgtagtacacatgaccattatgaggggtatagacaagtgaattcttgatcatacaagtgcaaaccaaaccacttttggtatacatgccacaagaagaaatctttcgtgaattacactttctgtgattcttacgaaacttatcactcgaaaataatactgatgtgacagagtcccaatcaatgactgaagatctttgatttggactagtggccggaagaagaagataattaatgacaggagtgtctgacaaatgaactagatcaagaatttcactcaagttattgagcttatgatccagaagaattttaagaagaacaacttggaaccttttgcataacacaacctacaataacaaggtttccgaaaatgagagccctctaattaatgcagcaaataagataaaggacggattagcaaaaaatgaaatgcattacttgttctgagttaagctcaatttgtccaacatatttcaagtcaactgtcagaataccattattccccacttgcaagtcaaaatgcatgtttccaatatcattttcaagcttgcttctcatacatagcacgacatcaccagcagacacttcatattcaaagtgttggtgaagctcaataatataacaatgataactggcaattgaacaaattgatgcagtcatttcgggaggcacataactaggttgtatttcttcatatggttgatttgctgcaaattaaatagatgagacaaatgcaacaataaaaagtctaaacagcattaattaatagatatgcaaatgcaacaaaataaatgagaagtctaaacagaaaaagatatatatatatacaaatttatatatatattgaagatgtaagattgtgattccatcataagattaccaagcacttgtgcgtcatcttcttccacaacaatatccggtacaagtgtattagttaatgcaccaatatgatgaagttgtttgcatgcttcaagacatgcaatctgtttaagcagtttggaattcccttctacagtgacaaatcctaatggacagctcttaggaagaaagagagttcgagtttctgtatcccaccttgggttaggtttaaaatacctattaaaaaaaatccacgaagaaggtaaataaaactgtaatacaagctcctaatacaaatagcacaaactgaaactaacccatcagaagggagtcttgagcaataaaagtatatcaaaccgatgctcgaactaagagtcacaatggcaccggtgctttcaacacgataaaattccccttcttgaaaattcattttaagaggtacacaaggatcatgagcatgttgcaaggactcctttctcattatttctccactggcaagatatttttcaaaacgacattttgtatcatgatctccgctgaaaataaacaccaaaataattagtcaaataacatgtttatattaatgtctaacccacccatgttccaaacaataataacaaagccaagcatgtatttgtacagataaaaatatatttttctattgaaagaaaatgtgattacctctgcagcattaacacgtaatcagagttctgcttcctagcacgacctctggactgtataaaactacaaacagtggaacaagggtcaaaccgaacaactaaattgcagctttgaacgtctaaaccttcttctagaattgatgttgcaacaattatgttcacctgcaacatgtagatatcttcaccattagaaataagaagacctttgtattaagtacattttttaaaactttaaagataaacatactttgccttgacgaaattcttcaaccatactgttttgttttgtcctggtctgagactctagattattgctgctaccagcaatatattttgtcttccagttagtctcttttggaagcaattcattcaacaaacgttgaatgacaacagctgtgatgaccctttctacaaaaactatgcatctaatgtcccccaagtccctgtgtacacacaactgattgttatgcaagttaaaatttttacaaattcagtctaaaattgtagtccgtacttcacaagcacaatacgaccttttattctacattgtatcaattacttaatataccatcttttctattaaaacaaataaaaataataatgataacgtggtgacattataacctgtactccagaagcaattcaacaagaccaacaactttcgaggtcaaaattccgtgatccatatttctcttgatatcatctgctagtgaccgatttggtcctataacacagaaaaaagaaaagagaatcaaataatcaatgccaaaaaaaaaaaacaaatcaatcctcacacaagaatcaatagacatactagctggtaggaaacttgaaatttcctcgaaggcatccacacaaaaattcttcacaactttctcgccgaacagatccaatctcgctgatgagaataattcaatttcattgcaagaaaaggacaatgctgcctgttatacacacacatacctcggtcatgctttacattatgacaaaaaagaacaaacccacaacattatttgatgaataccttcacagcaagccaaataccgagctcattcagacaaaatcgcaaagcagaatgaacctttgatagctttctgcgtatggagtctgttgaagcttcatcaaggtctaaatttttcagagtcaattcatgctgcagagtaattaaccaataagtagaccccgtaaaggaataatacagttagcttttcaatttaacttagattttaaaagaagaatgcccgatagtttcaataagtaaaataatattttaaaaaaaaaataagtgagaaaaggaatttgtcagcttaagcttctttagctccacaggttcgaaacaccatatccatttcttatgttaattcctgaatgaatatttaaaacccgtttccattttatgtcttaccaaatttaatgttccacatatattcagaatttgaaccaaacaacaacataaacccattccatagcaaacagtgattttgagatgtgagaacctacatctgcattaaattaaaacatacctcttcaattaaaatctttaaaatatcttcaatattcggaaagtgattttccttgtgctggtagaatttgaattttggagtcgagaaaggtataaacttcgaaagaacagagtcactggcacaagtatacatctgaaatgaacctcccaataggaggaaaccgtcagaaatcaatataacgtataagaaattaaaaaaaaaacacacacacacacaatctacaaagtaaacagagaaccaagtgagtgtaacaacaagttctaagcaaagaggacattacaatcttcaaaagcataacataaattgcaaatccaagaaggatacaaagcaacagaaaccgcatttaatgaattcagaaacaaaggccaaagccaaccttggaattcataactgtttccagctcattgatacgattccaatgatcgattgctgagtctcccactgaatttggattggagaaccaagacgaaaatgatcataatttttggagccaaaaagtaaagtacaaagatttaccaatcacagaaatgatacagaaaacatagcgaaagattctaccttttgagtttataggagaagcagtcattccaaatattcttggcagattggtttcaccagaatttaacagaggatgataaaattcctacaaatcgttaaggtaataagtgatttcattaccatatatagcatttaaaaagcccttcagatgagcaagcagtacaatcgaaatagaaatatttctattaacataagccacataaaataatgaatcaacaattcacctgcattatgcacgcatatggatgagagcccctggcatgatggcattcatcaaatacgatgactggtatcatgctcagcttgaaaaagctgtgcctcaaattattgagcaatatctgatgtgtcatgacaagcacctaatttacggcaatgtaagttatttcaagtttatttataaacacaataacttcagtgttaccacaatgaaagataagcaaacaactgaaatgctaaattcacaaaatcatatcaaatgagcaggaactccatgtttggaaataaaatgactgtaaaaaataccgcacctcatacttttcaacttcttctttccacttgtcagcgttccaaaaatctactcccatatctccccaatatgttccgactttcaagtcagtgtgcttcttcaaagcatcagcttgctgataaagaatatatagaacacaaaaggcttactcaagtgatgttacttcttaattccaacacttcattttgcaatcaatcatctctgtatacttcagcaaataaaggtaataaatataataaagagagtgtgtggagcttacttgactgactagtacaactttgggcaccaaaaaaacagcaatgtactgtgagggtttgcgaagtaaat

SEQ ID NO: 43673 - DNA, 2362 bp, Cannabis sativa
attataatgagaatgtatgagatagagatacatctgcactgcaggctatgctatgccatgctatactatgcgctgaatctgaactgacagttataatcctaagacaaatctccttattaaagtcagaaataggtaagtgaagtgagacaaccatatttgacaaagtaacggggaaatttaggcaaataaagtcaagaattaagcatggataattatgtctgcattagtatctatatgctttaacatcatacgtgaaattcacagcattgttatcagcatcttgcatagcaataaacataagtcttaaacgagataggcagttcttggcaaatgtaaatgcgatcatagttcaaaagtcgtaccatttattagtgtgttcactagcatcttcatgagtgacagtcccattagtgtgagttgacccagaggaagagccactttcttggacaccttgatgaagaatgtgagaaaaaccctgcccaattgacttccatagtcgagtaggcagagatgacggcatagtaccactaattgtatcagaggatggttcaagtgacctagctgaagcaggattcaactcagagaatcttacagcacccaacagtcgctctggaagctcggattcaatttggctctcaatgaggaatgcaatgtcaacagttaatgttgttatgtaaccaaatgccagatgaactattgcacttgcaaccatggaagatccaatatccacgtctacttctataaaattatctgtcacacaatacttacaggtgagggcacgcccaattatgcaaatagcttgctccccaactgctttcctaacaatccaagggcccttgacaatgttggcaattaattttagcctagaattcctaaatccatcatcacctttcaagaactggtccatcaaagaaccttcaggaataggatctgtgcttgcaaagtaagctaccgcactataattatccttgcttgggacttgtaaattgaaagcccaaatgaaaggcttgacacctgttgaaaactcatcttctatgatccttctgacacggctgtttggattgtttaagacatctccaatctttgaaggacttttgatccaatcaaatccaagaggctttagaagatattcgccagcaggaattttaaccttggttttaaagtactctggacctctaaccatgaacttgtccccaggtggagtggcccaaccattagtacatttttctggatcaagaaatggaacagctccacctgacttcacactttctatccatctaatctcctctttggaaccagtaccagccatataatatctgcttttaattgaaatgtgtcaaaagatacagtaaataagcaatgaaaacgacaaggattataattgtgtgaaataaccgaaccagacccatttgaaactaattagtgaaaagtgaatcgcaaattaaaactagatttccttggctgtcaaaaagttggatttaggaagaaatggattgtaattggatctttgacaatatcttccgtccaccaattcattctacatatataaagtattttaaaccttaaaaaagaaaaattttaaaaaaaactaagcactttttttttgtgtaattggttctcaaacttttttaatcatgcactttcttaacacatctatttgaaattaaaaaaaaaaaacccacagttcctactactaacagtaacacattctattattttacttctttcttgaattttagaagaataacaaaatgaattccaaaatatctttttactcaagtttggattgagacaaaatgaatctgcagtgaacattttaaaagattgacaattggttataaaatacaaatgcagtttttaaggtcagaaacatatttggtggaatgcttcacagtccaattaggaaagcgtctattgcaatccagaaaaggaaagaaaatatgttgatcagttacgataaattaatcatgtcagcaagtgaacacaagaaccttgttctggttggattagtccccttcaaatatctaacctagcgtaaatcatgttcacaaagaaaaatcaccaatttatgcttttcaattcctttttctaaccctgacttgatgaagtctaatcccgaataccaaaagaaatatatatacatacatatatatatatatatggacgcaccttgaggtgccgccggagctcggctggtcgggtgtgccggcagtgaggaatccgcaagcgaaggccgaaaccgaagggtgttggggctgggtccttgggaccctaatggaaggccggagaacgcaagggcaagcgaggagcgatggcaatggtttcagaattgggctttggagagtagggaagggtgtgagct

SEQ ID NO: 43674 - DNA, 3134 bp, Cannabis sativa
  modified_base (49)..(69): a, c, t, g, unknown or other
attggatccaaaatatgaaatccgcacttagtgcagattggatgttgtnnnnnnnnnnnnnnnnnnnnnggatcggatgaacacccctagcagattgtatgttgatatttttcatcatttatctgatggggactatcttaattgtaatttgtaatagcttctatttattaataatatcagtatttattttagcaaggtaaaagaaaataatagataacagcaatacttggaagaaaaaaaaacaaatgtacgtaaaatattataacaagttccagtacacctgaatatcagatccacaaacttgtaaaacacaagtattattcataaattcatggtcaatagagtaatgacattattaatatgtgaaaggtttatgcagggcagattcaatactactgcttctccaaagactgaaaaaaaacttgaatcagatagatcatattccgaggattataaactcaacctcactcattcttccccagaatctgaacggatagctgaaatgaaaagatacaattacaacgttaggaaggtggttcgttacaaatacgaacctgtattttgtagcaaatcaccaagtattgcattgattagtatgaaatgtcagaaactatattacatagtagaaacatgttagaacaatggtgtaagagggaattaaggggaatttgatatgacacaggaggagactgtgagttagtaagcagaaattgggtgggaaaggaggaggccagtctctcgaatacgtggggtacaaatggtttcactgctgaaactaactttaacttcagtaattcttccttaatttctctgttatttttctattactgctttaagctcatctcatttcagcaatgaaacgcatcaagtggttacgacatatataactgatttgcatttcaacatcattcagtaacacaaaccacaattaatttcatattgttcacaacataaccggtttgctcccatgatgtttcagattcaatcctctcataaagacctactcaaaagcaatttgcttaagtactaactcccatagattatacatatatattgtcatatttctgctaatacattgtgctatgttgtaacaatgctacccacgaattaactatgttcgcacttaagacagataagctaaattcgcatttaagactgacaataagttagcatggtaaaacaattttctgccctattttttgactggtgtacttaaactattcttatcaacgagcttggtcttttgtcaaaaaaaaaataaactaataaccacaaataaatagtatctcaaataaactttgtactagttacttaaaaaaacttaagtagtaggctgacaaaaaatgttttccaataacccaatctaaccacctacatttttctttttcttcatggaagcaataacagagcaagttagaacttttgcagtaaaacaaaagatcctaaaatgtaatgaaatttagagcaacaagatatatctatacatattcatgcagagtataaatttctcaagaaaaatggaaaaaatctaattccccattaatagagcagtgttataatatgttgcctcattttactattgattgattggggatagggatactatatctgaaaagagtaaaaatcaaatgattacaaaacaatgtgtacttaaagcaccagactgttatattaagttaaacacacaagaaccctaattatttatgatttcatttcaattagctgcatccatttagacccatcggaatgaatcacatttagttcatctaaactctatacaaattcgaaacattcaatgtaaaccaacataaattggtaatctcactatgtgtacctaaagcacaagactgttattactaagttaaacacacaagaaccctaatttatttataatttcatttctattagttgcatcgatttagacccatcagagtgaatcacatctggttcatctaaacttcatacaaaatcaaaacatacccacataaattggtaatctcaaaaatcaaaacataatcgcaataagaaaactagaaaattataatggtgtacgcatcaacaaaaaatagctgatgatgaaccagtatatcacatcagtaaagaagaataatagagagagagagagagagagagagagagagagggagagtggtgggactaactgggcttttccggaacgccgttggaccatttagagacggcaaaatgaaccttctcgcgttgaagggtttcggtcttgaaaggctctttgaggcaattcctgacgagattagcgcatatgttggagtatgttatgtaagtcatacccgccgatctccagaaaggcactgctgcgttcgatgccatttttgctcttctcaaactctctgtcttagcctaaaaatttaccaaaaaaaaaaaacttagcaaaatgaagttatgtcaaaatatctaacacagacagcccatatagcaactaatctaaaccatttcgttcaaaaagcataaaacatataaagtgactaaaaaaatacatttcttacatacagccaatcaaccatagctaggaataaatcgctctgtacctcgtattctctctttaacagaaattcacaaaaatatacatacatacatatatatatataataattacctctgtaacgtcggcggaggggctaaaaatgacggaaaatctagctaaaagcggagctccggcgaagagaagaagagagaaagggacagatctagagagacggcgatggtgatggagagcagatcgaaagagaaggcgatggggaagaggtcgccagagagacgatagagatggagaagtagaggagacagcacagagatttgtcttctagggtttcattcttttcagtttgaataattagtaatttcgcccttccattttcgacaatattaattttgacccctaaaatctacggcttgttaaaaattttctttgaatttttacagatacggacatatctttgtaaattagcaactttaccctctaaactttgacaactttcaaatcgtactcccacaaaataaaaaaaggaaaatttgattttctatacttaaaaaattttaatattttattcttaaaccaatacatttaaaactaaaaaatatatgacacttttatctaa

SEQ ID NO: 43675 - DNA, 4700 bp, Cannabis sativa
ggattctttcacatggagtttgtcaattagaaattggaacctggctggtgacaaccctttggtgagacaatccgcaacttgatcgtgtgatggaatgtatcgaatctccaattttctttgcagaactttatctcttatgaagtgcacatctagctctatgtgcttagtccttgcatgatacacggggttggaagctagtgcacttgcactcatattgtcgcaccagattacaggagaagcagaagtgcatagcttcatttctttaaacagttcctgcagccatgacaactcagatgcaagttgagcaagggatctatactctgactcagtactagatcgtgcaactacggactgtttctttgaagaccatgagatcagagagtctcccatgtaaacacaataaccagcaatggattttctgtcatctgggcagcaggcccaatcggcatcagaaaatccaactagattgagattagttcctggtgaaatgtgaattccatgatacatggtgccttttaaatatctcagaactctctttgtcgcatgccagtgagcagttgttggagccttgagaaactggctgagtttattcacggcaaacgaaatatctggtctggtgtgactcagatattgcaaagctccaattgtgcttctgtaggcagttggtgagttgagaagttctccatctgtcaatgacaagggtcttccagcaaccatgggtgtaggactcggttttacatttgttaattccactttttgcagcagttctgcaatatattttccttgggaaaggtgtatccctgtgttgtctcgaaagacttcaatgccgagaaagtagtttagtggcccaaggtctttaagggagaaaactttgttgagttgagtaatgaacaaattcaattcccgtgagctatttcctgtgataattatgtcatcgacataaattaatagcatgatcacatactgaggcttcttcaaaatgaagaatgatgtatcggctttcgagttgacaaattgccattgcagcaaggtgcttttgaaccgatcaaaccaggctctcggtgcttgtttaaggccataaattgccttatttaacttgcacacatgagtaggatgctgagtagattcgaatcctggaggttgcaccatgtaaacatcctcttcaagtgtgccattgagaaacgcattattgatgtcgagctgtctaatctcccagtcctttgtaacagcaagagtgagaactactcttactgttggtgccttaacaactggactaaaggtctcactaaaatcaacacctggtctttggtgaaagcctttagcaaccaatctcgatttaagtctttgaagggatccatctgcatttaatttaaccttatgaacccatttgcagccaacaatattgtactgaggagaataggggaccaatatccatgtattatttttcttaagtgcccaaatttcatcattcattgatctattccacccagggtgttgaagagcagctgctacagttgctggtgcatgattagacaagtcgaattttgcttctccaaggtacaccttcggcttaaagatccccgcctttgctcttgtcatcatgggatgagagatgacaggagcagtttgttcgacttgagctgctgcaggtgactgagatgacacactttctgcactaccaggttcagtaacaaattgagcagcagtagtgttatcaaattgaaagttatcactgacctggttgtgtgagagagactgagatgatgattgtgagttgagcacatcagtatgacctgtagcttgagtttcctgagagtgaggagttatgttttgggccattgagggtagagtgaaccaggaatgtggtgtgctgagtgtaacagtactttctggtttgtaattatttagaaacccatgctcgaaagggaactcatcttcattgaaaataacatgtcttgaaatgtaaattctaccatgaggacttagacacttgtagcctttaaagacttcactataccctaaattaacacattttatggaatgaaactgaaatttatgttgttggtagggtcttatacatggaaaacaagcagctccaaaaacttttaagagcttatactcgggtaccttggaattgattaattcatagggtgatttgccatctagcacagcagtaggaagtctattaattaaatagactgaagtctgaaaagcatcagaccaatactttaagggcatgtgagcttgagctagaagtgtgagtcccatttcgactatatgcctatgctttctctcggctcttccattttgagctgaggttctcgggcatgagtgttggaattcaattccacttttgataaccaaatccgagaatgcctcatactcacctccccaatcacatctaatcattttgattttcttttcaaatttattttcagcaagagccttaaactgaacaaaggcagccaaggcatcagatttttgtttcaatgggaagagccaagtaaaacggctatgatcatctataaaatggatgtaatatttatagttagtatgagatgcaattggtgcaggaccccaaaggtcagtatgtatgatttcaagtaacattttggctctactttgagaagtattaaaaggtaatgcatgagatttaccatactggcaggcatcacaaaagcagagtttttcattgattggattttttacattggacacttttaagacttgattcaaaacagataaagatggatgtcctagcctcctgtgccaggtatcctttagggaatgagaaatgacatttggagtagattgaacttgaacagagaacagacaaggttgaaattggttgaaacagttaggtgaattgttgacaggtgttcccaagctgtagaggccatccttaagtgttcctctcagaatcaccttccctgtttgatccttcacacaacaaaaaccagcaaaaaattcaattgacacattgttatctcgagttaattttgagacactaatcaggttttttgcaatggatggaacatgtaaaacatccttgagaactaaaggtgctgcagtaagtgttgtaagagaactatttccaattttagaaatgtgtaacttactaccatcacctatagtcactttctccttaccaccatagtcggttttgttgttgatcttccctgcctcggatgttagatgattgctggcaccactatcagcataccatccatcatcatgcagagtttctggtgtggcaaccaaggcaaattgctgctgtttgtcttgagggtgatcactgtttggtggttggccggtatagctctcatcatatcgattataacacacagctgctgaatgaccatattttccacacacttgacatgtgggttttgagttgttgtgtctaccacctcttcctcttcctctgttgctgcctcctcgagccataccagtatgctgattaccacctcggccttgattatttccagatctgcctctcccgtgactggagttatagccaggattgtaaggtttgtgagccatgttggcagttggattatcaagttgtttagagttggtggaaaatgaagtgagcctctctagtttactgtcaaaactaagaagagtgctagagagttcctgccaagaaagagtggttctggcttcgagaggcacaacaatagttaagtattcagcacctaaaccagataacacattacctcgaagaagattgtcaggatatggttcccctgccaaagcaagagtgtcagcccaaagtcgtttttgcttcaggtaatctgtcatggactgggatcctttccttgctgtttgtaattttgttctgagatcttccatgttagctcttgaatgagcaccatataagtcttcaagagctgtccatatacttgcagcagatctgcagcctataacctcagatgcaatgccttctgtcattgagccaaaaagccaacccattaggagttggtcgtgagttatccagagttcatactcaggatttggatttgaggtttcagcttcaccattctctgaaaccagcagctctggagggcatggtttggcaccattgagaaatccttccagtcggtgtcctctgataatggtcattaccattgttttccataaaggaaagttacttctatccagcttcatcgtgaaaggctggcttagagtgttgctgaagggtgtcgacattgttgcagagtttgctgaagtcgacccagtgaagacgacaccagagttgatcgagggagtctgttctgctcctcttccaggagtctgaggttcattcgtagccatggcaaacgcctagcaatggctctgataccaagtgcaaatattagtaaaaacagagaaaacagaaatgtttgcaaaactcagctcaatgagcttgaggaatttcattcatatttaaggattacatgaattgatcttggccattgatcaaaggacagatggcagaatattgtacaaggaatattacaaaaccaatgattacacaggtacaaaatttgttacaacagaattgtactgcacataggatattccttctgacagagaatctccaaatattgaggagccacaccagcagccaggtcatgcaccagtggcagtccagtcacaagctatttcttcacaccacccctcaaacgacagggggattctttcacatggagtttgtc

SEQ ID NO: 43676 - DNA, 2162 bp, Cannabis sativa
  modified_base (51)..(56): a, c, t, g, unknown or other
tgtttctttattgacattgaataaaattggattacattgaaatggagtttnnnnnngggcataaaacccaacatatacaagcatgggatcgagggaaaaattcatgtctcttgctggtaagagatgaagcataagcaaggcagccaaaagttcttaggtgattataagtaggctacttattgtgcaagagttcaaaagaaattttgtggtgtaatagaagtgttggagtcatgttcataagatagagaacagtgttaattaggtagggccaatataccagtggaagggatgattgaaaagccaatgccttagcaacattcaaaatgtgttggtattttcttctaactactaagttttgttgaggtgtttcaacacaagaattgtggatttggatacccttttaagcataaaatgattcacgttcagttctttttcattatcacatcaaatttctttaatattggtagagtattgtgtatgcaccaagtgataaaactgaggaatatattattgtacatcaaattttgttttcaacatataaatccaatagaatctactatgtccatccactatggtgagaaaataacaaaatcctttaacactttgaatgtggaaaggatcccaaatatccatgtggatgagacaaaagcaaaattagcaaaattgctatttgaattaaagggtaactttttaatagttttgctaaatgacatatagaacaaggaaaaagaatagtagagtctttgaaatgtaataattatttataaaacttgtagtagacatagaaggatgtccaagtctaccatgccatgaatgagcactattataagaattggtgcagatagttttattatgaacaggagatgaggaatcatgcagcaagaaatagagatgatcaatacgtttagcaattccaatcctcctattctgtgaatcctgaataatgcaacaagaattagtgaaaaatatgttgtttgttaatgtttggaggaaagtgggaacactaaacaaattgaattgtaacttaggaacataaagaacataatataagtgaagctgattggaaaattttatatctcttgatttatgtatcttaatgtctaaaccatttggtaattttatagatgtagcaatggaaatgtcatgcaatcgataaaagagtgatatgtcacaatatatgtggtgagcagcaccactgtcgactatccataaagagtttgtggtttgtgtaatgttaccaaaaatatttgatgcaaatggttgtgaagcatctgagttggaggttgtgagtcgaagcttttggctcaacagtgaaataagagtctagatatcttctggtttagtcaagttggccaaaagagatagaggattagtaaaagcatatgcctgattagtaattttcagttttctttttatctccataccctagtgtaaatccaatgagaaagaagcatttttctttaagatgaccatgtttgtgacagttgttgcagtaaggcctcatcctcttattgtgtccttgatttgcattagcggctgataatgagagattttgagcaagagctgatgtttgagcagaatcttggatagaagcaatgagagaggggagttgaggagttttgagtttacgttgccattgttcatggataaccatagagaaaactttagacatggatggaaagggatcaataaggaggatttgagctctaacaggatagaaagattcatttaatcttgttagaaattgaagaacttgttcttgattcaagaacgccatataatcaacgaaagcagcacaagtacatggaatgcgtggatgaagttcttggatctcatcccacatacatttaagtttggtaaaataagaacttacagaatcatcgccttgatgcagagtgattagaaattccctgagttcaaaaatgtgaggacctttccttgatcgtatctcgaattgagttccttccacatctcaacagtcgtgtccaagaacataatactgcttttactgtcagatgtgatggagtggagaatccaggacatcaccatatgtttacatcaaagccaatggtgatgtaatggatcgtcgattggtggttgtggtaaggtacctttgaggaagacgatcttgtttcgcgcgtcaatgaagaattcaaaatcac

SEQ ID NO: 43677 - DNA, 2538 bp, Cannabis sativa
tttttttcacttggaaaatcatattatggaatgaaaattaagttcttacaaattctgaagttgtttccaactcctgaaaaaatctggtagttttccagtaaagttattgctgctaatcctactgcaaatgtatcaagtaaacaccattattgaaccgagtttctcgcttaattctacaatatttgaagacttacagagtttttaaattagtcatgttagcgaaagttgcaggccatggtccggtgagattattagcactaagaaagctgcaattagccacaaaatatataacaattaataatttagcaaattaagatgtttaaagaatttaatacaagagaagaaaaaggatttaaaactgacataatctccatgttaaccaaatttccaaactcagggggaattgttccagaaaaagagttgctctccagacccctaaaaatcacagttcttttaatgttaatagtctcttgaacaagtactaataaaggcacttaaaaagagaaaaatgttaaacatacagagctttgagagtagttattcttcccaaaaagcttggtattggtcctgttaaattgttgacactgagaaccctgcaatatgattccttaacatgagtgcatacatacatatatatatgcttaaaagttgactatatgaagaattatactgaaatttacagtgtttccaactttgtagaagcccattcactaggtattgtaccactgaggtagttctgccccaaattactatatataaacaagaaacattatgaatggaattagtatataattaaactgagtattaggagtttcagataaaaagaaaaaaggctaattaggatttctcccgaacatctcaggctgttaagaattccattgaactatcggaatcattggattcaaggactttcatccaattctgttagattttacaaactagcgcttgacatggacacaagttcaggggacgcgatttggtacatgtcaaagtttatgaggcacgatttggtgtatggacaatcatcaaataaatggaagttttgaatctaacaatctcaataatttgggtataatttttaacagtgagaaaagttcggggaaaaaaaatcctaattagccaaaaggaaaaaaaagaaagtacatacagttgcttaagatattgtagctttgccacagatggtggaagcaccccatcaagatcctgtcctacaaatgtgctgcattaatcaatcaaaacaagcccaagtcattatcatcataattcaacatggattttcttaattaaaagctaaagacaagaagaaaagagagggaaaatatttacatggattggaggtggcatacatttgcagagatggaacaattacagatgatagtgttgaagtactgatcagtatgaggcctttcaatggttgttttgttactacatggatcactgaaattccagtctttcttattcaactgtgctgctatttctctaatggctttcactgcaaaaaagtaacacaaaaatagacaaaaactttataaaaaaaattgtgtcttttttcattaatatcaaacacaaattaaaacttaattgcctataagctattagaagcaatttatgtaatttcatcccaatttttaaatgtgcagacatcaatgtcataagtaaaaaaaagtagaaagaaccatttgaaatagagagaaagactcaaacccaataaaccatttgtactaaaaagctaaaagtttgaatctttttactgaatgtaaagagagatagaaagagtatctcatctggggtttcatcatcaaagctatatttcatattatcaagaagaagaagtaccttcagaagtgggaagaagaagtattccatttccaggttgagctgtggaatattggatggaacccatttccatgcaaagaagaagtagtaagaatacaattacatcatggagtataatggttttggtattacccattttcattcagtttttgttttggctaaaaactcaattgttcaaaagaacaaagaagaagaagaagaagatattaattgaggagttttgtccacttcactgaggttatagtttattacacacatataatattatatgtttatttgttagtttgatttgacccttgacccagacccatctccttaacttgcccaccattggaaagaagaaattatatatgaataatataatcacatttatctaaacaaactatttataattataatccgtgggtttacatataaactactcattcaaactactcataatattattatataaataatcactagggaggaaccttttcaaatgtaataaataggaattttccctcccaattttgacacttcaatgattttgctcttttaattatacttttgtaaaaacaaattgtagtgaataatcaccctcaaaactgattgttatagtagtaataatatttgaaaatgtataaataaaactaaaatcaatcacaaaatgaaaaatttaattgaaattagataagaaaaatttagcttgagaataaataa

SEQ ID NO: 43678 - DNA, 1972 bp, Cannabis sativa
agttagacaattttagttattgtaagttagacaattttgaaatgtgtttgactttgcaattactcctaaacagatctgggagaagcacaatatccttggtaaagtgaaatttgatgtttaaagctaagtagcctagtttacatacatttaccgcttttccataattactaattagtactatgaatcctaagatgtttgacaaattcgggtctatggaaattggaaacatgatcactgttattctcagattgatctagttgcctgcctcccctccccaaaattgtaaatgctttctttttgcttgtgttaaattactattctcgatgtatttctcttgtgctggtttgttttgctgatagatgtttaaatcttgtgagaggttaagctgaatatgagtgatctttgaggcacaatagccattagtagctataagtaatataagtttgcccttcattgcttttctaaacagcttcacgaatggcataaaggcagtaccgctgcattcatttatcatttatgctaaacactttgtttgttttcataatattttacgttttgttgactactgttccatagattactgaactttttctttcctgcccatatcaaaactgttcgttttattatttatgtagtgtggtaataatggaaggtgacccccatccaggagcaacaaagggtcggatgtcttttagaagtttcaacccgtctattgatgtgagtatatgtccatgtactagtctgatcaacgaatattcaccatctgtgttcctttaagatttatttttaatccgccaaaacttgttttcatggtagaaattaaacgaggaagcaacacaagttagtcagccagtaccccttgccacttctaaaggaactgaaaatggaaatgaatcatctaggtctgacatatcaaaatttgttcacattttctgttcgtaatttgatctgatgcaactctagtaaatttgataggatatctctcctagagtatattcttatacctgaaatgcgttgtttagtcctttctcttctgtggttattatttacttaatcttagaattaatatttattaatatttcccagagaaaacgaaccaccaatggaggaaggagagtgctcggatcttcataaaccaaattgcgaggctaatggaaactataaaagaaaacagtatccgaacatgtctccaaaaagtgatgaagttgaacaacagtcaccatcaagtgacagaaaaggtgctttcaagaaaccaaagggtggaaggcttgattggagcgtccttagacgatcaaatagttaacaaggatagacagtgacaatgattttgattcagtcgttgcatccatagttgataatcacttccaatcatgtacctgtaaactagttatcattatatttatatatatatatccttaattttgccaaccagttagtcaagtttgtcttctaaattgttaaggatgagattcatcaccagggaattggaagaatttattcacttgaaaccataattttagacatctttttctaggcgtttgagccgagtcttaaaatctgtttgtagtaaagtttgcatgatacttgcataatttactctagtttaactattattaccatttattgaagaagctatgtggtgagaataaatctctttttgtcttgaaactcaactcaattctactaatcattgacttggtggattgcaccgactataggaaactgatgcatgcaaataagttcgattatatcatgaattaagtatgttacatagtcacaacgtgtgatgttctttttttatttttaaccaaagaagcatatggtaaatagtagatacaaaagaatctacctcccatactgaatcaaaccagagtgattaacagaggcagctcatgcggccaaatggtgagctgacctgtttttctagctctaggttcccaaacaactgtaactgaaatgaaaaggcactaaa

SEQ ID NO: 43679 - DNA, 3858 bp, Cannabis sativa
taaactaattatttaccattagacttatcaggatattacagcataagtacctaaaatgttaagtttgtaagcggccaaattgattatctattttttatattctttattgaattaatttgaaaaatcacgattggtgtctagtaatatttaatatgtcatatcactatcagaataattaagtatttgatctcacacaatttaatttaatttaataatattgataactatttataagagcatatttaatagtctatttgcaaatgtctgcatcattaattcataagtgattctaattactacataaaaaatagtttaacaaaaataaaaaaaaataataaaaagagttttagcatcataataaatatattaatcatcaaattagtatattgagctgtctctaaaaataatgtgatatacacatatattacatatatttattttggcatgaaaaaaattcatattgtaaaaattagtaattttgtaatatatagtatggtgcaattttaaattataattattaaattcaaaactgcaaatcgcactgcactacgtgattttacaaaaatacaaactacaactatactgtatttttcatgtggtgcgaaaaatttgtgcaatataagctgtctgatgaacacattgtacaatattattaagggtaaatagtgacataagtatccaaagttttaagtttgtaagtggcataattccaatgtttatttttagcggcataagtacccaatatttgtaaaactgtaaattttctctaattttatctgtacaagcgctattattttcttaaacaggccacatataaggtctagattcttgatcattgggtctagacataaaacatgtagtatcagttacttccaaatgttcttttaatatattcaaaacagagtctgtactgacaaaactggatgaaaattatatttttacaaacactgggtacttatgccgctaaaaataaacatgagtttatgccgcttacaaacttaaaactttgagtacttatattgttatttaccctattattaatgaaaaattttatatttacattttaaaacagtttatttttttatttttttactgaaatttacatagaaactcacacaataatttaaattgcaattaaaatctacatcacaactcatataaaaactacccaaacaatataaaacgtaaattaaaaaaaaaaaatagtatatgagataaatttgagaaggtaggagaatgtgaaaagtgacttatctaccgtaggattgaattcaacattgtttttttttcttcatctaatccaacggccaaaaattgttgtgagggacttagtccctcctttcatctcatttgatccctctctctcttctttctctctcttcaagacaaagaaagctagctaagctaaaaaacgtttctttttcttcttttcgaactctccaatggagtctccaaaaccctacgcctcatcctcaaacccactcctatcactctccaccttcatacaccaccaatgcctccgtctcggtgccgacctctcagcccgaatccaacacaccaagcgcttcgccgaaacagtgaccggaaattggcccaacggaagacgcctccgtttctcgccactgtcacctcttccgccatttgcctcgttaactcagccaaagcaagccttggctgccgcgttggcttccgataatgtggccaagactcttaccggtactgctgtctatactgttagtaattcgaacaatgagtttgtgcttatttctgatcaagaaggagttaaatcaattggattgctctgttttcgccaggaggatgccgaagcttttctagctcaggtttttcattttcttctttctgccatttttagttgctatgaagaaaaatgatgtttttgtagagaaattaagtgcattcgaaaattccagtgcagattttgtgatatgttgaatttgaacactagggtcatatttggatagttgaactgaattagacaagatgagttgattttatgccaattgcaaatgaatgttttgtaaaatgtagtcaattatgaaattttttattggcaaaataaccatgtctagttgcacaatccacaaaaaattacacaatgctaacattaaaagaccattatggtcgtttttcaaccatataaattcaatatagttacgttgctaatttaacgttttcataagagaaaacaagataaactatttgggtttttactattagtataggtgaagatattgggattggattggataggataggataattttattataggcaaagtaattggggtttctctttaggacatattgaattctgctgttggattcaggtatgtttttcctggttgttttacaggctcggctgcagcgaagagaacttagaagtggtgctaaagttgttcccattacgcttgatcaggtaatattttgttctgaattgagtcatttttccttttgtttgtcctagtcatgactttattacttgtttttgggtgcatgcaaatctgaacataagaagcttaagtgggaactagtccattatctgagttggtggttagagtccaggacaggaacctataatggtagaaagggtaggaaagtatgaggaagataattgtcactgacatttacatctcctatgcttaagcataatacaatgagaaatgcatctcttttcaagtctatatgcattttgattatccctctaaatttcgctaacttcgacagggacaattacaaagaaacctgtgcatatgatctaatgcttttggttgtgatatttaggtatatatgttgaaggttgaaggaatagcatttcggtttttgcctgatccagttcagataaaaaatgctctggaggttagtttttctctagtctcgtgtggaaaaatattggttgacttgtatttggatgagataaatattaactattaagcaccacattactttaatttagtagcatttgtaatattctttctaaggtttctgtgtcaatttggctatattttttgtttttcactgtctgatcattgtattctgctttctgatacgatttaatattttctgacaattgtctttatgttatagctcaaatcaaccgatcgcaaaaatggatttgatggagttcctattttccaggtatactacacttgttgaatctagtatcttgcttgaatacagttgctctatcctttagtaaagtttgtgaggaatctagtatcttgtatgtttacagtactccattatatctaaatggttttatacacttttatttattcttttttatcaacatttactttcatgaagaaatttacctctgctcatacaaatatctttgtattttttaattgtatccatcatgggacatctaatttatttatcttatcttatcagtctataaggtaatcgccatttgttttttttttaataactttatctcattagttgtttgtgtttacagtcagatctactggttgtgaagaagaaaaacaagcgatattgcccaatatattttactaaggtttgttttgacaactctgttttctcgtagttgtaggaaaaatgcttaaaaacaccattagtatctgagaccatatatcgctattgatgcaaatgaatatcgggtcctgcatattttactaagcttaattgtaccaatgacgtataccatctggtgttgggctctttagggtgccttttagcaatgctctagttgtaattgtactcaaaagaaccgagaacgtaacacttgttgtcacagacataaacagctcattcactagatgctaagtatttgacatcaatgcaggaagacattgaaagggagctcagtaaggtctct

SEQ ID NO: 43680 - DNA, 1443 bp, Cannabis sativa
gatgcataatttatcttatttttaacttaatattatttcacttgttttctttttgagttttccaaaacaaggtttgtcagaatttaatagagaattgttaaaaaggcatatttttggtgtcaaatagttattgaggtttcatataatttaaaagaatagtttttaaaaaatatcgttaaccaatcgtgatgtgttacctatagaaagtgttgaacattactgatacccaataataattctcaatttaatattatttcactcgttgagtttttcattttcatccaaaaacaaagactttgggaatatattgaatgcaaagtatgatggcttattttttattcggtaaatactaagtatgagattgttactttgttaattctttctcaatagtcaacacattcctcaacaagaaaatcttgatgtgttgagaaaaaattaacaaagtaacaatctcatgtcactttctacaatttaaataaataagaaaaaaaagatatttatttacactctataaaataaaataggatatatttataaattttttttgtgcaaataaaactccctttaacaaagtgcatctaatattactctaaaaccaatcaaaagctcgaatggtagactccaaaatttcaatatttaacatatatgacccttatgaggtttgacatatctttcatatcaaactcaaaagttggcttttcttaaatttcaacaaaacaaaaaacaaaaatcataaaatacaaatattatatattttgagaccacaaaatatatggattattgatcatatatatttcattttaaaaaatccaattatttttgtgagttaattaaccaaaacgacgagcattaatcagaagttaacatgtcgttcgtgttaaacgacatgaaaacataaaaaacgacaaaaaaaatacgtgtttaggaggctaatgaccttaccttttccaaagctctcgtttttacttcaaagaatcaaaaaaccaaagttttctcctccaatctgcaactcccaaaacccaggaaacttacagtgagtttccaacaatggcggattctgagaagcaaactggtcttggagattccttgaaacccttcttccatagagcctccgaagccgaggttcgagtttttttttcctttaatttttatatgttgattagtcaaattcaaataaagtatcaattttttgttcattcaatggattaatttctgtaatctttactgatgttttatcttttaattttcaatggctttttgtgtaaaaatgaattcttttatacaccatgcttttctcactttgactcaaaatatcaacattaattttttataaccttatacatatactgataaatatatattttctacagtgtttaatgtactgtgatatttctagccaaaatattataattatgccatattttcagaaaatatattcttatt

SEQ ID NO: 43681 - DNA, 1746 bp, Cannabis sativa
  modified_base (1127)..(1128): a, c, t, g, unknown or other
aacatgggaatcacagatttttttagtcattttcatcacaaaacacaaataattgaatagttaaacaaaaatcacttaaaatctctaagtgttatgcctaaagttgcaagtaagccatttatttatttattttcattccaacttccaaatttttttttttatgggagtcattatttgatttttgttggtgtttacttgtcctttattttcttcttaacccactacttggaaaagagggggccttcctcctaaggaagagaaaaaaaaggagagagaggggaacaaaatcatagaaaatgtatagtgaacagtgaaaatcgaagattatttccatatcgtacgtcaaagaaagggatgtccttaaaagagacttatcgaaaaaaaaaaatgaatggagacgaacaaaagacagaagagagacatttatagtctcttaactattaaataagatttaaagttctccaccgactatatttattttctttttccaattaactgctctataattaataaattttgttgcctagcacatccaaaaatataccctacccaaaaacttgtactaaatatatttttgtgaaagaaaaaacaattctacattaattttttttcttttttttttctaatggttatatttatttgtatgaggcctcttacttgtattaatggtactctaattttctctcaattttaatcaaacatttcatcaactatcaaccaaaaagggaattagcaaaagacaaatgaggaagatcttttgtgcaaaattatgaagttaccaaatttaatttttgtatttacgtaagtaacatttttttttgtgtgtttcatttgatttttgaatagcctaatgcaatatcattttctagaaaagaaaaggaataattacataaatacactttttttaaaaaaaaaaatatatttttaagtttatatttttgtttatatatttttttatgatttttcatataacaacacaaaaacaacaagaaaattaaaataaaaataacatcaaaacaacaacaaaaaataacgcacagataataaaaaattaacaacaattaacagtacaacataaaaagaccgtattttttataaataaaataaaaaaaaatcttaaaaatatnnaaaattccgtgaaaccgtatttttataatttttttattattttttgtatttgtgaaataattcccaaacaaaaacatattaacaaagtatacataaatttacaaccctaataaaaaatataatacatctgggatgtgttgagcttcttgtgaggtttgttcgtaatttggtgtttttttggggggtggggggttgaaatttgtaatttgtaatttggtttgttgatttaatgaaaatcattctcatttcataaaataataataataaaagtaaatatatataaagggcaaagcaaacgacataggaaaagagattcccaacttcccataaaagcaaacgacaaaaataagaatgaaacagagaagagaagagagagaaaataagagaaggaagttaggaaacaattaaacaaaccagggtcgccatgaacagagctaataagttgaatagagactcctttgcctactagctcatgaaaacgatccagaatggaggcgttgaagtcattgaaatccaacacatttttcttcatcagaaccacacttcctctgatcttcttcccctcctcctcattgtcaccggagattgccttaatgatatccttcaacatctctctct

SEQ ID NO: 43682 - DNA, 3079 bp, Cannabis sativa
tttttatatagaaaagaaattaatcacaagaataatcaatgtttaattttttttttttttatttgagagcatatatttttgatgatcgccaaaattttattatcaaaaaatctccatatagagatgatttagtcccacacgttactgtattaattcccttttaaaataataataataataataatattaataataatgtcattttctttttttcctttcgaatcaaaaataatgtcattttccatacccatgaatctcccctaatccgaaaacgaaccaattatttgcaaataaagtctcccataacctattttttttagatcattacatcaatattaaaaataaataaataaataaaatctcacatcaacacagaaaaaatttccgttttctaaatatttctgggcaataaaaatatttaattacgtgtttgtgactcaaaagagaatagtaacagattagtagtggtggtagtggtccgactcagctacgtggaatctacgtgtcatgtgatgatatcaatctgacacgtggcaaccatggagatcctttctcttctctatttatagagagcacctacactccttttcttctcaacgtggattgccctaattaactctcatccatttcttcttcctctcttctcttaatacatttctcttctctttatacacccaaaaaaaaaaaacccccaaattttgtcacagaaatattcttaaatttatcatacattattccgttgattaatttttttaattcaaattctttggcggagccgttgagagattttccgggaaaatgaaggacagcgtgcaaaaccctttgcttttgaaatccttgaaccacatctctcttgtgtgtagatcactcgaggaatccattgatttttaccagaatattcttggctttgttcctattcggagacccggatcattcgattttgacggtgcatggtaattaattaatttaattaaatcatgttaatatacatataatgcacttaataaaactcaaaaaaattataaattgaaattttagaggctttatttttattttcatcaattattttgatttaagcatatttgtattactgtttttatatataggctatttggtcatggaattggaatacatcttttgcagtctgagaatccggaaagcatgacgaagaagagtgaaattaatcccaaggataatcatatttccttccaggtaattaattaattattaaattactgaatttaatacataattaccctttactcattgaaattttcttagttgtgtaatatattttgtttcttttaattttgtcatgtacaataaagtagttttgagcacgtcttgataatgatgatctttatttgtaaataaattggattaattgtatttagtgtcggacatatatataattccaaaatagtcagctttatttttttaaaacgtacgtatttaagttgacaacaggttggatgaatcatgaaaacattgatattgtgataagagaaaactgacaaatttgagctgtcaactctcaaacgtaacaatatatctttttaggttgcaagtctacactgagtatctattttatttaagaatgcttttgaattaatttagtatatagtactgaaaaaaaatattagaattttatttttgccaaaattgtcacatattaaattctttctttgtattggctaacagtcaattattcaacaacaacaaaatatttttatacacttgctcaagcaaacgccaggtgttttgaggaacagaaatggagccccaattttaatatggggtctcatttaataatttttcagagaatatagctatattcattacttaattaattgttgtttttgaatgggcagtgcgagagtatgggagcagtggagaaaaagctcacagaaatgggaataaagtacgtgagagccaaggtagaagaaggtggaatctatgtgtttcagttattttttcacgacccagatgggttcatgatcgaaatttgtgactgtgacaatcttccagtcatcccattagccggggagatggctcggtcatgctcccgtatcaacctccagatcttgggccagcagaccctgcaaccacagccagtcgtacaactcttcagtggcaccacaaaacactgaataaaattaattaattattattattattattattattactcgtctttgtttaattctactgtgctctcactcgtgatctgtcacgactcaaattgtttgagccgattgtgtgagtgagtgagtgagtgaatagtagtagtacgtagtggggtgttcagtgtgattttggttttttgtgtactgtaaacttgttttgtgattataattaagacaataaatatagagtgattgtcatcattctgtctttagctggaatctttgtgcttgatctcattactggttttctttttttattttttaattataatattcatgaggaatgattttcaagttttctatctgagctggcaaggttctagacttttctaattttcttttataaggaaaaaagtgaattcatccgttttatattatttccttttaaaaataaaaataaaaatctaatttaattaatctgatataccattagaaacaaactagaatcaagattaattgggaaaaattagtatcccataataatgtattaaatcaatctaaatgtaccaattcaactaattatttttcttaaatactattaaccatgtagacagttttcttttccttaaaatactcttaaataaattataccatttaataatcagtcatgcatggtatgtttgatgtaaatttataaaaaaatgcacttaattattttcctttttaatactagcctggcttcaaaatatgataattaatactatttattgtgtgatatttagatatatacattttaattttgtggtgtaaattaaattttttgttaattttccatagttgttaatattaatgactttttatttttgtactaataaattaagttaaaaataattttaggtaatatttgttgattgaatatatgtttaaacaatttatgtttttttttttttttt

SEQ ID NO: 43683 - DNA, 3376 bp, Cannabis sativa
ttttcacttttgcctattgtcttttgactagttatggtttcatttttgtcaagttcttgtaaaatgttgttcttgttcttgctccaacatatttttattactgagaatacaaggtaatacattacagtaaagcaagcataatacataaacttaatgtgttgtgtatacatacacatattaatacgtatttgggtcctatatattagttgccaaaacacagttttgaaaatgttgaataacataacttttaaaagtatagaatacttcatacatgaatgaaagaacctcttccaatcacatttaccaaattgatgaagaactaaattttgaattttgatgacggtaagctctaagaaaatgggggttgtgttgaacagccaaatggattggagaaatattagtctaaacaatatggccccacaaggaaacaagcaaccaaggatagtgattaatattgatacttgataagcatgaaaagtacatgtaaacaagaattttttgtcttaagttcattgtatttatatttttgtctaacacgagtaaactcatgcaaattgaataaaatataggaatatatgaaggaattaccaagtctctttaacattattcatgaaggaatgaatgtacatctagaaacagaattgtgaacttcgtatactttcccactttttttttcttttaatattctatcattaatgtttagccttacaaaaaaaaaacgcattaatgttttatgagtttttcgctacatcctatttgttgacaaatattattttttaagcaatacttaattttacttaataactaattataatattatattcttattataactatgtcattctaactaatttgactcaacaatttctaatttatttgcaaaaaaaattattttaaaaaaaagtaagtcatgataaaaaaacaataaatttttttaaaaagaaaataagttttttaatgttaccgataagaactagtattttctgtagtgattaattatgtcaaattgcgtttgggattcgtagtgtgttgtctggaatttgtactgttagtgttagtcaacgtcagcaaagatattttaggttttaattgttcagatggtaacagctgtctatttcggtattcttaatttagctggtataaatacaacttcttggtattatgttgacgaacctttttgatcgaagattaggattacgtttctttcttcttgtttcgtctttatgttccatggcaggtgatcttgagcttggtggtattgatccaaagttgcagatcagagcttgatgatgttgacttcagactaagggatttcagtatcgtcttcatcaccagatctgaagggatcaatttctggaggtataaactgagtttagacacaagttggtattagaaaaaattgtgtcgtttaagggatgatttttctcaggcgaatatagtggctgctggagctgaaaacaaattcaaagcttcaaagctttacaactcatccttgcaacagctaatagacccgactgctaaagctatttggtgcgaattgattgttccaaaccatggctttattttgtggcaagtggttcatttgaacctcataacaagggataaattgagcaggtttcagattatggtggaaaataccaactgtgcaatgtgcggattagctgaagaatgccatcagcatttatttttcagctgcaatttatcgcagcaagtcctggcaagtgtgtttgaatggctaggtttttcaggctagtctaggaagttcaacaactgatatacttggatcgggtatgttcagaccaactttatagggagaatatttgcgatggtgttggctgcaacaatataccacttgtggaggaatagaaacaattgtatctttttaaatttttttaaaaattgttaatagtttagttaaagatataaagaaggatgtcaagtatagattgttcttgctcaaaaatagaaaagggtccaaaatggagttggatacacttgaaagattaatttgtaattaattgttgtgagttgagtctttccttttggaagtgacttgagggtttatttgcttggtttgattaatgaagttttcttcttgatcaaaaaaaaaatctttccttgaaaaaaaatattgtgtatatttatttatttattatgacttacttttttaaaagatatttattttttaataaattagaaattatttgagtaaattagttagaatggcataattgtaataaaagtataatattatgactagttattaagaaaatgaacacttctattaaataccagtggtacttagcaccttttatagatgtcgccttatcattaattagcaatattctacatgtcaaaaaaattagcaatattctaaaagttatttaattaatttatataggattttaatacttaattatattaataatagtaaataccaaaaagaatacgtgttttgaaagattaagcattgtttagaagatgacatttgtcattaaaataagtagagtgtgtgatagaactcctctttgagaattagctgagaaataaaaagggtaatcaagtcttgagtttaaaatatagtagcaattaataatgaactcaaaagaaagaatggtcgaatctttccacgacgaaaagaaacaaagcaagagctccaactgctgagcccggtgaataaataaaaatcacaataactaataacataataaaattctagttctaatgttcaaacaatacattatattttcatttgttttgtatcttacatgtatatacggtttaaagttgccagactaagaaagtgtaccactctgccatatattctcaatcaaatatataaaacgaatttacagttctacagttaatgcaaaggcggtgataaaaaaaatgaaaattgtaaaccagtttccctacttattaccaaagattaaagaatgttaataatgataactctacacaaaatttagaccccaaaacaacgttcaattatcaaggtgcaagaaagaaaaaatagatatatatgtatatatatatttataacaataacagctcagacatcgtcagtttgcaccgtcaaatcttgtatgcctaattcatggtacaatccatgcacatattggagaactgatcgatcgtctgtcccttttttcacctaaatttgttgaacaccaaaaaaacacattaaattacgttcagtatatagattattgaactcctcaaccagtaaaaaaaatttaaacaagtaacctgtattgagagtgagccaacaacatggcctggaaccaattcccaaaaccgagcatgaaaaacttcagatacatcttccagggcagaaatctacaacaggatatttgacaacttcattgaaagaagt

SEQ ID NO: 43684 - DNA, 5150 bp, Cannabis sativa
  modified_base (4900)..(4901): a, c, t, g, unknown or other
  modified_base (5097)..(5115): a, c, t, g, unknown or other
tctcataactgcagagatttcaaaaatgcagataagggtattcatgtgaagccaatgacttacaagaaactattttgtggatgcaaattatcttttttatttggatgacttcatagaaattaaaagagagaatcgtatcactctcaactcaggtataatttcttaatgctgaccagtgaatgcaaattatttgaactgatgattttaataaaaatgaagaaaaaaatagcatagaatgataacctttggtcgtatgggctgagcattagggaagaatttcttgatatagatcacaacttcgtttccgatatcccaagccctcttcgtttcaaggacaccgccaaccatcacaacaggaaatgagccagtactatctgcaatcaaatttcagtatgcatcatgaatgaagtagttaatgtgatcgtcaagtaaaatctgtgctgccattataaaaaaatacttcagatatcccaactcttcaatctcacttcactttcttaattcaaattgcttaaagctagtaaacagaaaatcatttgagccaactaaataatgatatcatatattaccttcaccacacaagcgaagcctttcaacaacagccttaacactgagagctaattccttgacagcttcagttagaatattatgtgcaatttgatctccagcttctgcacatgacaccacttctggaacaagtgctgcaatgcgagcccacgatcgatcttcataagtccacctaaatttaatgacactgaattcagcctgaaaatatttcttgatcacaatacatgacaataaaaagtcatttatctattagtgaccatgtttttcataagggcagattatctccaatttaaagactaaacattcagacaaagcaaaccgactttcattttaattctgcacgaggatgcacgcgaaacattgtgagaccacagacatacttgcagtaggcttggacactacactggtcagccaagaactgaagcataagttcacctactaacaacagcgcagaccactttggcaaagcattaaccttatcaaaaacacataaatactaaggaacgggttctcatatctaagttttctgcgatgcaatttacagcccatatcactactctcacagaaaaaagggctgtagaagtgcagatccaagaaaaaaaaaatataaccagaaatatgacaaagcttttctgttttttaggtctagtcaaacaatccatgtccatgcagataccacgttgcttacgccaatgttattgcatgattgatcttcaaacacttaaatcaccttcaaccgtataaaacaatatcagtttgtttaagcttcatttccactttggaaaagaaaaaatatcaattgagtacaaaaatatgtgaaaaatgatcaatacagtacagaagctgcagatcggctcagcttcgtgagtgaaaatagtttaaatgataattagggttcaggtttaaatatgcaagaactctctcctctcacagcataacgaatgcatgaacagaaccaatctgttaatgaatgctaaaaaattgttactttattgtagcgggatttcgaaatttaaaacagaaactagttaaatactcccaattttaactagttcagctcttcctagatacatttatgatttatgtagactttaagactctagataaagaaggtcaaaataaacatgaaaccaccaagtaccaacacattttcaacaagcagataacagaatttaaacaagcatttaaaattacatttgacagccatagtcataaaatttatggtagacaattttattcaaattaacaaaatcgtaaataaatagtaactatagggatttaatacactagatttcaaattactcaaaatcagataaaacatattaatcaaatgattctaattatgctaagtaattatttgattctgcatcacatacccaattagttcatcaggagaagaaagaccaagggcctttagaattctacttgtgagcattgtctgtgaaccacggccatcattagcccttattactgcagttaatgcttgtgcagcaatcccataaccactgcaaattgcaagtgtattattaatcagatcatttactaagaaatccatattataaaccacgaaagtctctaaagactagcaaagcctagcaagttggagactttgaaattaaatttaatttttttacagctttttatacaacttcactcaaagataaacaccttaacatttccatggagctattcttaatgcaatgataaatcaatattactaatacgtagagaaggagaaaaagctcttccagaataaggcgtattttaatatttcaacataggaagtacaaaatgcacagacatctccagaatctacagaaacaatttctgcataactcacacatttccataaaaatctagacaatttgaccgatttttttttccttgaaattttggccctgtcagtttaaccggagacctcccagtgacctagtagacaatttgaacaatttcattttctccataaactcaattgtctgtgtctttatctcttttttcctcttctaacaatctaatttctatatacacacattcatcttctttaacctgacatctaatgttagcttaataattacaaactattctttccttttcaaaagcaggttcttaaatgacaatcttttaccactgacccctatcaaaaaaggtgattgtccaaagtcaactctcttatactatgattccattagacgagcttagaacagaatcctactatcgacaattttattggaagccaattaaaaataaaataaacaagcaatcaaatattgcctattcgttcaagaagaaacaatagtaaatcatttcatgtttagaaatttcctttattattaacagagaaaaaaaaaaaaactatagccagttgcaaataatgttaaacaaaaatcgcatatcttcatcatttaaaaattaaactcgatagtaaaagtaagttcataccttccccaatcgcctaagataggtccaccacccgcagcacgagcttctttgccatcttcagaaaagccataggcaatgctccctgtaccagcaaccaatacacatccatgaagctttcccatggtcccacttgcaagagctgcgacagcatcattttgaacatatactttaacatgcgaagggaatatatccctgaaaagtcaatcaagcaactccaagggaattagagagtaatatgaatatatttgtaagggaagttatttcgtcctatattaacactatcatgaacttgttttgcattgacatttgtaaattagaatacgtctggataccaggcaatcaacatagtaaaaacaataactataacttctcaagatcacacacataactataaaatacacctagggatcatagaacttaaactccacacgcatgaaacttcttccatcagcaaatcattataacatcatatgattatatatacattcatcagcaaagcattataacatcttaaatctttctatttgtgatctttctgctttaaatgaaaacatacataaacacttagtaaaaggtcaactcaaaaatcatgaaatcaatgacattcacattagagctttgacacaaatgaagaccactttgaaagttgaactcttaaaaatcgaatatatgcgaaaggcaatataaatttaattcagcatacaaaaaggtggaaaacatattatgaacagaatattcagattcactcaccttagccatttcagtatcttctcttggtcagttggatggttaacaccagagacacctaaacaaacagcacgaacagcagaccagtttgaaccagattttgtaagggcctctgtgataacctgctccaatgtttccttggcagcattctctgttcaatccaacacatttaatacaactaagataacataataaatatcaaaaagaaaagaacataattaactttaacttaagctccaaaaaacagttaaagattaaatattttcttcaaaatgtgaagaaaatagctaacccttttcccttgagctgataataaattgggcatattcaaaattaaaagcgaaagctaaagtttatgcaacataaaaggaatttgaataaggtttgccaaaccaaacaagatttcccaaaacaagaaggaaaaaaaaaaaagcataactgaatcagtagaaagaaagggaaatgaaatgaaacctccaacactgttgtagttagagcaaccactgacagcgcgagcgagaagaggaagagggtcagggagatcattggggtccgccatcaatggaagacatacacagacagtagaggtggtaccaccgtccaaacccaaaacgacgttgggcccatctccattttgacgtgcttcatcttcttccaatgagaaattcccttcaacctcatttgtgccactgttcacgggaaccgaatgagaatgagcaaaccctcgatcagccatgattgaatagttttggtttcagacaagaaaaccgaacccagttttctgttaatttgcagctctgccacgccccctaagattgaccaatcgcaatttgctttgatttgttttgttttttaatttctattttttatattttagaaatattctcataaatactaaaaataaaatatggaggagtgctaattacaatctcttactcaatctttaccttcgaaatcacatatcggaatattttttttaaaattttttttttcataacgatatttattatagttactgtatcatgtaaatttttgaaattttttgaatagtttacagtgttgaaaacagagttcctgatattccagtttaccacgcgaattcaaaaaacttcaaacgtatttttggcattgtaaactattcgaaatnnttcaaaaatttacagggatgatgttgtaagcataacgaacaccactgtgaaaaaaaatttgaaaaaaaatattccgacatgtgtttttgaccgtagaggttgactaagaggttgtaaatggaagttgacggtagaactcctcttagttttaatttaaatatttaataagatattttttagcaattaatatttatannnnnnnnnnnnnnnnnnnttaagtccctattataatatttttaacatttaaac

SEQ ID NO: 43685 - DNA, 1725 bp, Cannabis sativa
tgtgtaggtttatatgtaataaagtgtgtaatttgtatttttggtgtaaaaatttctaaaaaaaatttaataaatattaattaatttaatattaaaaaaataattagcttatctaataaatatttgtgtgaattaaattaaattggacttgagctataacgtaaattaaattaaatataaaatccctaattaatgcaaatatgagcaaaataataaggaacacctctacttactaactaatgccaccacctagctaataagtgatgtcatttttgtcgtttcatcatttaatgacgtcggtcacctctagcttttatgacaagtgtcacccatacagttcaatttattgagtcgtttgtggaattattttttttcggaaagtttttggaatcatttatgtcgtttactcttaggtagttaaggaagtttactgaggcttgtttgtcgtttattttatcttcttttaacaatccaactcccaaacatccatatttctatcccctgcaatggaagacaaattcatagaaaggaaaagacactctcaaacccaagaaatgactcaactttcttatctttgcccagtgtactcgaagagcacagctggttttgttgcaaagttggtgactgagaatgctgctgcttcttcctcccaatctccattgagctgtgtttgtcggctgctcctatgtcgtttttcaacattgagatatcaaacaacagcattttagtcgatgatagatcagcatcggtgcttgaaactttaggagaagccttcactctcttctcatttatttggaaagggcttccaaaagaagcattgggtttaaccctttttcccggccttctatcacgtacacagtttcctacctctccggcttccgaatctgatattaatatagcattttccgtaggatcgtcggaaatagtccacagtgactcagttcggggctgcaaattacttaactgaggaaaattcttggcttttttccgtatgtgatcaaatattgcgtcttctgttaaagtttcgactgtgcagtcttcaggttcaggtgaaacgccaccttcaatgatcagagtttaaacgattaaaaacttggtataaagagaagataaacatttacctcaagtttcatccaggaaaagaatggacctatttgttccatgcatttgaagttagatgagcttttgggtgtactatggtgctgtggtttttcagtactgttatgttcgtattgctctgcctcactaggttctatagctgatttgtgcgaagtgaaccttgcatttattattctttctatctctcccaaaacttcgctatcatcatcactaagggattcaaggtcattttcgcgagtgtgctttcgtataagattcagtgtctcagtcgatggagagcatgcaatacttggggctgccaaaccgggaaagcttttggccttttcacgtatgtggtcaaatatcttttgctctgttaagcttttgtgtttatcttcgtcaacttgtagaacaggctcatcttcgatggcagtacaagtgattagcgaagagagaaaaaataagtgggaatcactaagtttgaaaataggtaatagttatcatttatcatatacctcctcctctttcaaactcttcaaagttctcatctagaatattgaaactaggcctgggatagaaaacacagtgaatttcataatctattgtgtgtatatatgcatatatata

SEQ ID NO: 43686 - DNA, 3065 bp, Cannabis sativa
cagatggtgttagcaatgtattgagttgggaaggaagacttcaaatagcaattgatgcagcacaaggttagacaaatattgatccattgatcactatatattaacatttttagtttttattagctattttaataaccaaattaagtgtgtgaacattgaaatgtagggttggagtatttacacaatggttgtaaaccacctatagtgcatagagatgtcaagactcccaatatattaataagtgagaattttcatgcaaaaatggctgattttggcttgtcaagaatttttcctaccgatgatggtactcatgtatcaactgttgttgctggcacaccaggttaccttgatccggagtaagtaaatatttttttacaaaaaaacttattatgatatataatataataagggcaaatagtttttttttttttctctcctaaacttctacgtacatacctttgaaaggtttgctcttccaactttttgtatggcaaaaatctcttccaaattatctagcaaaagttataattaatattgaagagtttttcatgttgttcattttttgtcatgcaaaatagtttcaacgaaaaaactttacaaggagaataattgagggcgaaattttttgtcctataattaatacgagagcaactaattgtttttattataaatacttatgttaatgttctataaatatttatacattttttttttttgaaaaagaacctacatacagtctctcaaatatagttttattatatgattaattttcaggtattacgttacaaataggctgaacgagaaaagtgatgtttatagttttggagttgttctattagagatgattacaagtcgtcctgttataagtagaacccatgagaccagaactcacctaaaggaatgggttagtgttatggtggcaaatggagatattaataatatagttgatccaagattaaggggacattttgaaataaactcagtgtggaaagcggttgaaatatcaatggcatgtttagcaccttcatccaataaaaggccaaacatgactcaggttctgagtgaactaaatgagtgtttgacaacagaattagctggaaagaacaatagccgtcaaactgattccacaagctcaataaatgaggtgtactctatgaatgtgactagtcctatggcaaggtagaaggtgtaactaattaaatttatttgcaaatattattctctctagcgctattgtataacattttcattttttattctctcatgtgtcagttaaataataatataatatgcatgctgtaagcatatataatttcaacatctttaatttctgtatttttttttagtacaaaatatatatttatatatcttggctacgattattaaggttataagtaataatttcgttttgtagcttcaacaataatcttgaattttaatattgttaaaattgtatagccacttgtaaccaagcataactataattaatgcatcagtacttatttagccaaaaatattcatatatatatatatatgcataagatttctggagtgttcaacatatcaaaatatatttgctttattttctctatcaataaattatagcctgtttatcctccccaaaaataaaaaataaaatgtcattttaagaatttcattaatggaatattggcaaataataatgataatataaaattaaactttaatttttgtgagtttggactcctttgggtttgggcatcggcattagtgtgcaaagaactcaactctctgatttggtctttggtttaatttccgcaaacaaacaattggaagtagttaagagaatagttgacttaattaacacatatataatacgcgtaaatatgaaatttgtccataattctagacaaagatgtgcactagttttgaaaattgagttgcaaagatgtgcaatagttattattttgccaataatagctttttaatcatctaccttaaaaaaaaaagaaaatatttacctgtcccacgatcttttattttttggagtagtgcacaccggtattaattaatgtttaatattgttataagatgactctaaataattattgaattattaaattaaaatatatattaaatatctaatacttaattaattacattacttaaagtggtagtatgataattagtggtgatgctatacgtttaacgtatttttttttgacacagtttactatccattaattaatattgacagctcattcgtgaagacttgacttgcatgaatatgaactttagaattaaaataaaactaagctgtgttaattaagcttttatgtatatatgttaggttaatattatttgtaatgtagttatacttaattatattttaaatttttcttttaattatttatatttttagttatataattaattctttttatattattcaataaataatatttttttataaaaaaaaatatataatttaagcactattcataaaaaatataataatatttaaaattagttattcattataattttagtttaattataataactttaattttataatattattttttaaaatatcaatgtttaaatatatatatatgaattggataacaaaaaaaaatgataaaagatcacttaggtccgtgagaacgaaaattacaaatggagagaacagctggatgtacttaattaattccaagattattcccttcggtttttatatatgattggtggatagtttatattatatagtgatagtccagagaacgtgctcaagtcaatctttttcttttttgttgatacaaacagccaaattcttttaatatatatgtccaacttttttgtttctttctgtggtgggtctaattctatatattactatatatatatatgagtcctttttacgatataattcagttaatatttaattagtatataagtttgatatacataataataattaaaaaaaaattcggcacttaattatcgatcaattcctttgttatatatatgttggtttaatatattaatacgttaattgaaaaaatagtcttgtcctctgacatgtt

SEQ ID NO: 43687 - DNA, 2391 bp, Cannabis sativa
gtgagtgtgattttccatcatattttctcatgaaccaaacagaaatataattaaagaaaacagaatgaatgaatggagagaattattatacctttccagtttcagtctcatcaggaactttgtaggtatcaattgtaatctcattcaaaaacatacccggaaacaaacactgcaaaacaatttcaaaccccaaaatcaaaatcattatcagaaagaaaaacaaatttcgccggaaaataaaaaaattaaaaaaattgttcgatttgacttacatccaattgcctctgaacgttccttggtcgcttcttaggtcggcgaggaggtttgtgacctaatagagagatgaaatcttcttcgatctctttcttcgcaagcttagccgagaatttgactctctctttattctccggtggcgataaccctctgacctgtctcgtcaacttaaccccattgttcgtctcacttctcaacggtgagtaattcgccttaatctcttcgattccagagttcttattaaaaccctgagcttcttcaacctcaagactaagcgaaaccttccttgccctgagcttacgcggcggcatcgaaccagattgagccgattgtttctcggcttcagcgtctctctccgctaaaagctcatcatttaacttctccgacacagttttcaactccaagatgagtttctcgctcatcgccgcgatcccttctttgccgtcattatcctgaaaaacaggtttaggagaacgaaacttacgtttctcagactcagattccctcctacgattgttcaaagagctctgaaatctcaacgaatcagatcgccgatcaatctcgccgccggttacgccgccgccgccaccgttcgaatcatccctcatacacctcaggtacttctgattcccccatttcaagcaaggaagatcgaaattgtgtagaggcttcgttctcgccggtgcaaccgccatggaaaccgacgatgtcttcaacactcgttgctgtgagtcaccttccctcacgcaaaccatcaaacggaaaaagattcttcggatcagagctacgtgagagagaaaagttgagtaatttgatgattctagggtttttggatcgtgaaaagtagtgtttggttgctgagaaaaatggccggaaaatttgattttccgatgggaaaatttagagagagagaaagagagaaaataagaggagggagtgttgtggacggttttaacgttgggcttattatatactcctttgggtcatgctaaaatgcgcacttgagtgcgcaatgcgccgctatttgggatttcccgggtgatacgtcgtttttgagtgacggtaattgctttttaagcctttggatttcctttcgctttgttttgatctatatttacagccgttagattagaaatttatgtttttttaaaaaaaaataaattaattaaattttccaattttatttattcctaatcctaatacgattctatttgttagctttatttttttattttttcaaaattaagctttgatttattaagtgacgtattttatagttaataatatttttatgttgtaaaaaaaaaaaaagctttgattttatttcacattttttaaagcaaaaaatgtgatattttttttatttaacggaaaaaaaggggtgaatatcttaaaggaactaaatcaaaaaataaatagaaaaaccctaaatttttaaacctagttgtattcattagtaggtttgttattggatattaggaaataaatttttacgtttcttgattataagttaaaagaaacttttataacatgaactttttgtgccaatattattttctttattgtttcgttttagatccatggtaaaaaattatgtttaaaagctatattaataatgaaaataaagcaactcatgacctaagtgcaagaagatcattttctttcaatgaaaaatacaaaatagtaaattgtgatcataagtgaatgaaactacatattaataggggaggcagtcgtcttatctgaaattaaaattgattttaaactatttgaagttaaagtttaaataatttttttgaaccttcatttaaatacttttctaatcaaataatattgagtaagtttaacactagttggtgaaagtattttcaaagttcagggagctcacaagtttaattcaagtgaaaatataaatgtaacataattatgtattattttatattttattttgattatgtatatttttagttgtataattagttttttttcttttgtgtgtggatgctattcatcaataaaccaaattatttaggctaattaggattttttttcccctaactttgagatgtatcaaatcatgcctctgaacttttttggtcgttaaaaattctccctgaa

SEQ ID NO: 43688 - DNA, 4298 bp, Cannabis sativa
  modified_base (3784)..(3784): a, c, t, g, unknown or other
  modified_base (4060)..(4061): a, c, t, g, unknown or other
gatctaagattctggtaaaataatatccaacagtctaatttctgatggtaaaaaggaaagaaacaagctgcttctttgattgagggttttttcaagttttttttttttagttttcaccctagttttggttctattgctttcggatgttgttcatttgttttgatacacgttgtttcatagtcctttttaggtttggtttattgtttcgatcgtttcatgttcatttgtattatgcattagttagttttaggatttcttttagttttctaacttcagaatcagtttttgcttgttaagtgtttatggatgttgttgttatttgtgatttttatattttagattcagtttttgcatatttaatgtttagtctagtgtgattttttttttgttggtctttttttgaaattttttaagtttagtatatgattcattatttgttttgggtgttattcataattttatttatctatgcttgtaatatagtgtatctacttattttttttatatggtttagttgtattgtgtgaatgatttttttattagtttacttataatgtcaatgtagttttaaaaccgtttttatcataatatttctgtttctttttttatgttgttgtatatatgcaagaataggaatacaagttcaatccttctgactattgcatgtccaagtacgtctctacttgcacttgcagtgttatttccaacacgaagaaaacaattttggaggatgttatgaaaatattttgtgatagtcaattcggtcatttcttggatgttcttgagtataaattttatcaccaagttgtttaagttgttcacaacctttgattatgggtttagattttattgtattgtcttttgttgttttcatgcttatatttttgtgcatgtttcctaattatgccgatatatattatttgactcaatgatgaaacaacatttatgcaagctgtctaattagtaaacctaggaatatagttgtagaaattatttgaatctttgaattgctatgttatgtataacaccttttttacaactatcaatcaatggttggacaacttttgaagattcaacaaatagtcagtataataaaaaaagttgtggaactccatcaatgtgtcaaatatgatgttaataatgctttatatttttgttaatattttcgatatgacatgcaaccttaaaacaactattatgcaactaatgagttgctcattgcaaagaaagagatgtcggttattgttgtgttgctgaccatgttcacacacacaatagataccttgtgaagttatgttatttcaattttagttgtatgtagaagaataggcttgggtcatcatttatcctcagtagttagtaacctcatttcacttggtattttagttgcagttgagtattttcttggttgcattctagcacttgcttcaacttgtgcacaagttcttcatatttgaaatcccttgagaagaatttgccaccagctacgtaatttacataattcattccttaatcaaacttcctgttatcctaattttttcccacatgacgtggcatgtccacataggcaagattgataccacgtagagtacaacctatcagtaagaggaccaagtcaccatgcacaacgtactagttgatgaagaatccaagtactcaagcataacaaagggacaacaaaatggccaaccaagagggtctggctggacaacccctagccgaccatagtgaagcatgggccgaccagcctcctgtaaatggtaggtcggccagcttccttcctagcagacacagttgatgtcgctgaagctttcaccctggatagacaatggttcgttctcagctacgaattcactctaacaacccacgaaagtaggggttcaacttcagatatttacctattctttaagaataattaataggttactttttatatatttaatatttttaaaaagaggtgatatctcctcattttaagggatatcaacctactttggcttagatcttctgtaagctctctcctatataaagagcactagattaaaccaaaaagttctaagttctcattcttaagctcttgagttcaagctcttgaaaccctagctccctctctcctacatgccacttacagtgtgtgtaagagactaagtctttctcatctcacttacttgggatctgctctacattctcactatagtaattcaaagagagccactgtagaactcacaacacttgtgatctgagtggtactatctctcatatcaatacaactaaaagaggagtacgccattaccctttatccaagggagttcaatctctgtaaaattattgtgtctattttatttgcttgttctaattgttcacacgtggtgattctaatcgtgaataagactctgtcgttagttgaccgaatctaaggtcaacactgcccattgatttgtatgaggaatagaattgattttgtttccttaaattttgaaaaaattcaaatatggtcagccaattataagaaaactgtaaaaaaaaaaaactgcaacacaatagagcattgaagatacatgcacaacatcagctatttatgtaatacatatgatgtcagacattcctttatatgagtcgtgtattgctaattttgagttctgatttattacataataatatttgagtagcatgactatcaggtaactgataaacaacgtatgtacaactatgtataaacattgtatttggacatcattaagaaaaattttaataaagttttattgcactgatgaacaatgatttgtgcgttaagaatattttgtgaagaaagaacagtaagacattgtaaaccaacatgaactcgaccaatgtttaaatatgaaaaaactaatcatattataattgttttttataaaagccttgtgttggattgtcactatgaaatacttataagactaaaattattgtagcattattagttcgtaattattaatacgttaattatcagagcgttaataaaaatgaaggccaactataatgcaaccacttagaaacaaaaaattcaaacaatgttgcaagattcattgtgcgagatgaatgcaaatttgaatgactcgtcgcgatcggaactgaataaattcaagattgaaattctagaaaataatataaatgcaataggtataatattagctactaatattttgttagttatacttgatttggattgatcgaaatctcgatatctatttgttacaaatctatattttacgaatctgtatattgaatttaggagaaattagtttatggaatctaaattattttacagggttgagtttatgtttcaaaccatgttttttttttttctacaaaatcgttcatgaattggtaatggttaattcttggtttgatatttttctggttgattcgccggaattaataatattcttcatctgcgaagcgttgctttctcgttccagagctccttctatctcagttgacttcgtttctcgtttctgagaggttactttgttgtgacttgaattgtaaaggaagaggtatttttattattaatatttttagatagtataaatgtttatatagcggctgcacaatatttatgtaatattattattatttttattataaaagagaaaaaactcaaaaacctatataataacaaattaatactaaaaaattgtcatttataaaagacaacaatgtgataaaaaggaaataaataaacgttacttatctaaaaaacaaaaagaaaaaactaattaagatttttgctccctgaactttnacatgtattaaattatgccccttaaacttttaaagtcgttaaaaatgcccctgaactatcgagattgttagatttaaggactttgtctaatttcattcaattttattatttcaataattttttatgtactaaataatcatgctctctgaattttcatccatgttagacttttttattaaaattggacaaaactccttaaatccaacaagttcagagagcatgattaaatacatatcaaagttcaggaaacaaaaattctaattagccaaaaaaaannaaaaaaaaaaaaaaacttcatgtactttatggatgctcatctccacaaccggaatccttaaacacttctttgctcttaacgctggtcatcatctactttatctcaaaactctccattaattaattttgtttaaacatttaagacttcaaacacatgttcaaattaatatggacatcaaattgtataaatctacaaagatatgtggatccaaacgcagaccatcttcggtctacctac

SEQ ID NO: 43689 - DNA, 2188 bp, Cannabis sativa
  modified_base (1016)..(1026): a, c, t, g, unknown or other
atgtagtttttataatttataagagtattaatttactagtctatttattattagttggttttgtgatagaacaatttaatagagcatgtgctactcaatttccacattctaatttcatccaaattcaaaccctacaaaaggagagtaaaaaacaaaaaataacttgcaaaataatcaatatgtgagagatgttatagagtcttcattgatagtgtgtgaaaaccaatgataagagcttgtactactttgattcattaatttttaaatggaacctcttgtatgcttcttattttccatacacatcatattttactttctaacaagcacatctatacattctaaccatatatacacattagttttttttattgataaaaaaataagtaaaactacatcataattatatttattttcttttagtggattttacataattggagcgacgaagaatgtgtaacgattttaaagaaatgtagagaagctattccgagcaatgaaggaggaaaggttgtgataatagatgtggtaataaatagcaaaaaagatgaacatgaagtaaatgaagctaagatctcttttgatttgatgatgatggttttgttcaatgggagagaaagaagtcaaaaggaatgggaaaatctctttttcaaagctggtttcactcgctataaaattacacccatatttggtttagagtcactcatagaggtttttccataaacatatgattaatcgtttgtttggcttaatgaatttctcatcacttttaaaaaataaaaataaataaataaacatatgattagtgatgtaacaattaataatttagcacaataaaattgtatgcaaattgtttgtattttgtaatgtctgacttttttaatatagtaatattacctaacatgatattattgtaattttatttgtattggttttgagttatttataaatagagattatttcacaaaaacataaaaacaaaaaaaattacaaaaatacagttttacagaattttaaannnnnnnnnnntttttttgattttatttacagaaagtacggtctttttatgttgtaatcttgttaattttttgttatatgtatgttattttttgttgtttattttcatgttacttttatgtaatttttttgttgattttatgttgttttcgtgttattttttaaaaaaaaaatcgtaaaaatgtaaatattttataagaaaattatgcctaaattattcctgataataaatatgatctgttaatgttggcccaacctaggctcttcgtgtaaaataatattccaaaatgctaaatatttcaaatttcacgtactgcattttttttattgttattatatttttactgttatatgtatacaataatttttttactgtctaatttttatattgtgtattaagttcttgacagtttttttttatactttactattatttttttttactattcattcttttatactattcaatagtcttttttttttgacatgtaactattattttcacattatttttccttacacgtcattcgatgttttttatcttttcatcttttacatttatattttttttttcttttatgagtgtcatattttttattcttctgctcaatgtttttttttttttttttgaagaaaaagtcttgtataaacaacaaaacaagactaactgaaaggcaaagaaccattccagagaaactcactatcaagcccaataccccacttagcaaccctatgagcaatagtattaaactccctattgacatgagccacccgtagagatgggcgaatagataacaagttcttaatacaatcaattaaatcatcgacagaactacaactcagagtgccatgatgaagtttatcaacaatggatttgcaatctgtcttcaatacgtccacaggcaggcaaatagaataagcccactgcaaagcatgcaccactgccttagcctcagccaccatcggtgaaacacaacctgaaaatggtttagccaaccctgctaccacctggcctgaatgattaagaacagcaaccccaatgctatgcttctgtctattcagatcaatggctgcatcagtaaagatctggaaatcaccttcaggtggtaactgctgtaaaattgtctgatccgaattggaagcacaaggcagcacctgaacctgctgtgaatct

SEQ ID NO: 43690 - DNA, 1733 bp, Cannabis sativa
cagagaggaaggcttcataacattcaagtggactggaaaaggatgcacatgcaagctgatctcctctctagaaaattggcaaggtatatatagcttatagttgctaatagatggttccatgatttttgccatactatactaaatatgtctgtacatgttggtcactttgtaaaaggttttgcgtacaaacaacattaaattgcatctgaggtggcttggatgggaaatctttacatattatggtctaaaatttcattatatattgtactatttggaccagtgaactaattgtttgcaaattctattctttctattctggattatttaacaatggatattactataagtggaacttgtagaattcacacatgtaattggttgtatatgatcaggaatttgaagtaaggtataaatgtttaattgttgcttttgcagatgttggaggcggttcctaagacagagaactaccttgaccctggtgaaagcttatgataccctgaatattaatgagaaatctgtcaaaacgatgccctttgagcagcttgctcttttgattgaatcgcctgatactctacgtgctgtgaaagctttacttgatcgattagagagtcgattaagagtctcaagagctgttgcttctaatccttcacccggtttggagaacattgatcaccttctcaaacgagttgcttctccaaagaaaaggagtaccccaaggtcatctttgaggagcagagacaaaaaaaaagctactatatccagggaagcagctaggaatccagcgaagcagtcaaggtatccagtcagaataaccctttgctcttacatgatcttgagtcatccagaagcagttttcagtggaaaaggagagcgtgaaatgtccttggccaaggctgcagaaaaatatgttaaggaatttgagcttttgctgaagattgtattagaagggcctgtacacagttctgacgaagagtctgattcaatggcacaaaaacggtcaactttcagatctcagcttgcagcttttgataaagcatggtgctcttacttaaattgttttgttgtgtggaaagtcaaggatgcacagttactggaggacgacttggtgagagcagcttgccagctagagctgtctatgatgcaaaagtgcaagataactcctgaaggagatagtaataatcttactcatgacttgaaggctattcagaagcaggtattctccagccctatattgatacatcttctaacaaaatcttcacatgctagtgtgactgttaacatgtatttacatggcattgttcgccactaaaagaggaaaacaaagtaggtttcagttcaatatttattttttactttattcataagcaggggaagaagtatgcatgagagacaataatgtccagaggggttggaaggagataagttactgtagtttgtcgtgctatttttttgtttcttttcttttttcagcatgccacttcctgtgatcaccagatgggagaagttagtcaaaaataatctcactctgtttattactttcacacttcatttgaactacatatattgtataactgcatacagaaaatgataatatatggtttgcaactcattcgaaccatgtaaaatagctcaagtgatttagttttgtttgagatcacttttttgtttttcatagataatgaaagtcaatgttgtgattactgagaggaattcttaatattaaattattttga

SEQ ID NO: 43691 - DNA, 1960 bp, Cannabis sativa
tatatatatatgtattaatgtattacattatatgagttttgaaatgaaacaaaaacaggaaaaactataatatttatgtataatttcatcatgccaacccacacagtagaaaataatgtaacaaagtcaaaagctttatttattttttttttatgaaagtaaaagctttatttattgagagtggaaaataatatatttttaagcacaagttgaaaaatcataggatcaatcaataacaatttttgggtgatttaaaaaaataaaaaaaataaaaacaatttttgggaatgggacattactttttctttttctgttttattttatgagatgctttctctcccaaagttcttttgttttaatatttttttaggtaaaataacagtgttcaatacatgtggtagattgttttgatttgcaaaatcttcttctttttttttttttgaaaaaaaatatattatataaattttacaaattgataatctttctttttaaatatattacatttttatgaggacgtgtttctacaagagacacttaaatgttatgatcattccaacttttaggctatgttgaaaagaaaaaaaaaaaagaaaagtggaacaattgtgcattaaaaaaaatactgattcaataaataaaaattatatctaacataaaaaatttatttttctttttacattttttttccttaaattttccttatatttttctttactatcaaaatttaacttacaaacatagtcctaaataaaagaattcttatgtgatgtgattattcacattaaatttattacgtgaataaaaggaacatatatctgtagctatcaaagatctatacatatattatatatatatattaattaatattgtatgtatgtggacagaaacctcatgtactaaagtgattactattgagaatgacactgttcttcccatcatttataatgttttcttttattaaaataaagaaataaagagataagaaaataaagcttaataagtattgaattgggtcaagctagcattgcagaaaattatatgtgatggtttgttgcttccccatcacttttgttctttatttaattttattaattaatatttggtgggcttattgcttcatctcttctcttctcttctatttatatatatatatataaatatatatatatcatcaccacacacaggctagctaatccaagctgttgaaaaattatattcactaatatatatgttttagctttttggggtaatttatgtaatgcataagaaaagcatatgtatatatatatataataaactcaatatatgacagtattagaaaatggtcccaagagaataaaaatcagtatatagaagttcatctgtgatacatggaaacaaattaacgattgatatattttaacaattatattgtttgttaatgcataccttttttgttatgaaaaataaattctcatataaagttgaaaaagttgtatgggtggtcccatttctttgttgattaattgtattcatgatgatgatgatttggaagttatatataggctttgttgttttcttgtttagggaagataaaatagattctctcatcaattttctgttcttcttgtgattatatataattaccatcaatttagttaaaacccactgaatttcacttatttaaacatgttaaattaaatgagagaaataagttaattgttccatttttcttttccaatatatagagtttggaaggcactggcatgatcacgacacgatattgtaaattaacacgacatgaaaaaaaataagtttaaatacgacacactacaataagtccaaaaacacgacacataagtattaatagaatatcttaaaaacatgatatgataattttttatataattatgtgtaaagtattgtggaaaatctataaaaaaaaataattgaaatcataaaaaatatatataatttagtg

SEQ ID NO: 43692 - DNA, 3317 bp, Cannabis sativa
cgaaaaggcttagtaggacattgttaggatctcacattgactaagtacgagattataatttagtcttttgggagttttaccctctaagatattgtatcgaatggtataagagtcaccggtctctagggggaaccgaagcctgaatccccgtctcgtgcaagatcaaactcataaagtttgggtctttaatgttttttcattagtcttttgctgcttacaattctacattgttatgtttgtgattcccaaaagggagtgtttcaagtattcttataaagttgtgaaatttagctcaaacccagaaacgtgtgttgtatcgaaatggtctaaagagtcaatggtctctagtggaactcgaagcctgaatccccgtcttgtgaaagatcaaactcataaagttttggtctttaatgttgtttcattagtcttttgctgtttacaattctacattgttatgtttgtgattccgaagagggagttgtttcgagtattcttataaagttgcgaatttagctaaaacccgaaaatgtgtgctgtatcgaaatggtctaagattcagcggtctctagtgagacccgaagcccgagtccccatctcatgtgatcaaactcataaagttttggtctttaatgctctttcattagtcttttgctgttaacaattctaaattgttatgtttgtggttccgaaaagggaggagttggttcgagtattcttataaagttgcgaaattagctaaaacccagaaatgtgtgttgtaaagtttgcatcttttgaatgctaataaaatcattcactctgaattgcagaggctatttggcaccggaatatgcattgggcggtcagttaacgttgaaggccgacgtgtacagtttcggtgttctaatactcgaaattgttagtggcagaaacaattccaataattggggagggtctcagccaaagcttcttgtggaatgggtatgtatttatgtatgtaacatagtataaacagattcttcatatcagattatctctaatattttaaagtgaaagttataaatacttaagtttaactcccgttacagataaatatctatatttaatttatgatagtaataacacttaagctatatttttggaattttcataggtaactggtcattaagtgtgaagtcaatgactaaatgacaagacagtacttgattggtctaagtcattaaatttttattttttatttaaatacatcaataaatatatgatacgtggacaatgacttaacacttaacggttacatacttacagaagttttagaaatataacctaggtattattgccgtcaaaaattaaatttaagtatttatctgcaactgagagttaaatttaagtatttacgctgcaaattactttatagtttatagtatgtatcatctctgttttttaaattttttgaataatttatcgtgtaaaataaaattcaaatagtcaattacattttttaatttttattttccaaatataaattattcataatttttttagaacatatatgatgtataactgtataagtataatatataacatcatgtaaaaagaaattattttatatttgaactagaattattcattttaaaatataaacatccaagatcaatttgcaataattataagaaaataaattattatgcaaagtaactattttttttttcttaatcaattttgttgtactttcattaggcatggcaacttcatgaggaggggaaactgttagaaatagtagattccgagttaaccgatttttcggaggaagaagtcacccgatacatgaaggtagcattcttctgtactcaagcaactgcaaaccgaagaccgctaatgagccaggttgtcgacatgctgtcgagaaacatccgaatcaacgacaaacaactcacggccccgggttcctttcaagactcgaaacttagaggatcttcttcgaaaaatacggcttcgactagtcaagagatgagttctgtaccagttactataactcaagtgacccctagatagaaaaagaagaaaaaaatacctaccaattcatttttatggaaaacagaaattttagtgtgaaaaaaaataattcttgaatagcttttttttttttaggttctttagagtagtgtgttttgagcaaaaggtatattgtaccatttatatataaatataatattatttcactattgaaatgataaaataatggaaatttatacaaaattaaaatatttatatttttatgtttatatatttatatatattttatatttttacggtgttttaaaaaaataatatgaaatttacatgataaaaaataatgtacaattaacaacaaaataataagattcatttagatcgtttagagcggttcttcttcttcgcaatccaaattcgtagtattggagaatttttatttttataatttttaaattaaaaaaaaaataaaaaatatgaaaacaaaacaaataagatatctggttaccaacttagataccctttttttttagtactcttcatcttttccttcaatttttttttttataaaataactttttttttaaaaaaaaaaatcatatttttatacaaaaaaaaaaaatataaaagcccataaaattataatttcttcttatttaaatattgctattaaaggtcccgtgtggtagaaatatagacggcattattattgaaaatattaactgacaaatgataaaggacaacactagtgatgcctaacacttttctatgtgtcagtattgctattggtccaactaaatatcgggtcccacatagtttaatataatatttttttagaaagtacgtaacgtgacatgtcgaaaaggtgctagacactattggtacctaataacaatactttattcaactttaccaaattagttctcgttactttgttcccccaaaaaaatcaagtagcccattctttggcgaaaatcaatctacaaaagattattttaattatttttgtggagttgttttttctatcaatcaaaattataaaataatcaaagctggtctcaaaattaaattgattaatcattttttttttaaaaaaaaatataacaatttcacattctcaaaatataaaaaacataccaaaaacccaatgtgtaataaaatcaaaaagggtattcaaaactaaaaaccctcttaatggaatccaaaagattaccataaaatagtaagaagaaaaaaaaaaccaattaacaaaacacattatgagaacatagagagaacaattttttgttattatataatagcaggctgatcatttgttgttgttgttg

SEQ ID NO: 43693 - DNA, 1645 bp, Cannabis sativa
acatttgatttctattatacaggttttttttaatttattttttcgagaataatcttttaagttattgaagccttctatcaagaaaaaaaaaagtagttgaagccatttgacctaagaactatacctaggcaacatgtggaggtagagcccacctaacatgacaaccagaaataggcagcaacaaaattcgaagactttttggcccctcattatttattgctgaattattaagcctactttagcctaaaaagtagaaactcaattttgaacaacaaaacaaaaaccatgtatacttcctcatcatctgtgtcgatttcttcatcaaatctcaaaattggcatagtgggatttggttccttcgcccaatttctggcacagactatgatcaaacagggccataagttaacagcaacttctcggacagattacactgatctctgtcactctttgggtgtctcattcttcaggtacaaatttttgcatacaaaatgtacaaagggaaagacagaggtatgtctttaacttttctttttttctaaaagtaaaaaaaattacttgagtatttaacagggatatagaagcgtttcttgaagcggaaaacgacgtcgttttgatatgcacctcgattatgtccttatctgaggttgtcaagtcaatgccatttcattgtctaaaaaggccaacccttttcgtagatgtactctctgttaaagagtatccaaaaacatttctactgcaagtaagctaaattgactcccataaaaaaacactccatagtaaaaacaaaatgctttttagtttttacataacacaaggcgtgtttgtatttgcttattaggtgcttcctgaagagtcagatgtgctttgtactcatcccatgtttggaccagagagtgggaaaaatgggtggaaaggcttaacgtgtgtgtttgagaaagttcgaataaggaaccaatctacttgctcaagctttctccaaattttccagactgaggtaactagtcatttcgcctaagctaatatcttgatcgattcctctgttaactaatagtgctttacatttttgttcctacaattattaagctaaacaaacatcatgccacatgtataactatttaatactcagaagagtatgccctccttactcaaattactatctgatcataatatgtgttcttagtatgactatttaatagtcagaagagtctgctaccccttgcatgtaaaaaaacaccatttagagatgccttatagtttcaagtatctttgctaacaaaaatcagcatgtattcaatccagggttgccaaatgctggaaatgtcttgcgaggagcatgacaaagtggctgctaagagccaatttctcactcacactattggcaggtattcttcttctttttcttcttcatttttttctagccctatatcagtaatgactggtgaaaaaaaaataaaaaaattctgtcatgaacaagtctcaagcatctacatgtttttcagggtattgtcggaaatggcgattgagtccacacctatgaacacgaaaggctttgaaacactaatccagttggtataataaatgaccatattgaagtgttttctttttttctttctttctatatttaaatagttaaaaaaaaaaaaaa

SEQ ID NO: 43694 - DNA, 962 bp, Cannabis sativa
tcaagaacagaatgatacattaaattatccagaatcacaccttgaccaattgctgatctggtttgacaccgcgaataaggccaactccaacagcttggtcactaacagcttgcacaaatcttctcacaacaggaagactcacctattagaagaacaacatttattgaatatcttattagaaagtgtaaaaattaacaaaaattacaagacatcagcaactcacatcagcttccaataacgccctcctaatatctctcataggctccacaatattttccttagtcaaaacctctgaaacccaagaaatccacaaataagtacaattcacagtaaaattcaacttcgttcttacaaacaaaaaacaataacaaaccttctcctttaagcttgttccaagctgattcaaggccactggttaattgtccaaacatctctgctcttataattccacgcatttcccttttatggctaacatgttttgaattcaccaaaccccatatctccctctgaataaaaaatacacaccacaaacacatatatcacgaaaaagaagaaagcgaaatttgggttttcgagttaattcgagctaaaactgaagaagccaaaatctaagagtaattcagttaccgtgaataaattcctggaagagagcgcagtggagaggtgtgaaccagtccaagctgagcaaaatctagctgaagaagccttggaattgttgcaaagggttttagttttgctggtcgaaagagaagagaaatggcgggaagccactgcctgaaactgtacggcttccatggcaaagtgaccaaaggttagctctgaaattctgagataaaaaaaaaatctaatcgttatatgcaattctatccgttttagtgaaaaaggtttaaatacggcgcaggtctaccatattactgtgctccctcattaaacgactctttaaaaacaaaacgacgataacg

SEQ ID NO: 43695 - DNA, 2206 bp, Cannabis sativa
ctacttggctcagaaccaagagtaggccaaggtggataaaggatttccagcaggtattggggtcaagaattcccttctggttttaggtggaaatggaatcaacttcttaggtgttcttttcacttttttagtccctgaatcaaatgggaaatctctggaggagatgtcaggagaaagcaatgaagaaaacaagtaacctttgttggtttgtagaaccctttagttggtaaccagtaacctttgtttcaatagaactgcttcttatcttaagatgtaaatcattattgaaacttcagaaattggttatttgagatggtttattgtgtgtgccagtgttttgagcttgttttttcatcaataaacttgagatttcaccataaatatatatccataaaaatactgatctacatctgagaagtaaaaagtaaccaattttttttttcagcaagtagataaacattaagcttagcccagcttttcacaccccaccaacattgccagtttattcatcagattggcaaaattacaagttagaaggtgttgtatttgattatggcagctgctgagagcattaactgacagaaaatagagaatccaacgcttgaaagtgagagtaaattaagctcagttcgctcgctctttgattacttcaagatccatctctgttggatcggtagcctgaatctcgtagtgaatgccttccagctctcttcgaaacctgtctttggatgtggcatagagcatcttcgagcgaattcgagcagttgaaggagacctgataaaaattgttatgcaaagaacaatacataagattggatgatatcactcaatgaaaaccaatatgaaaactacatagaaacaaagctttgtgttaagcttaagaccccaaacccgaactttgttttaagatcccctgtgaaataaaacaagtcatctaatcaaacaaattgttcatacacccgaaaaagcattgcacaactaatctataaaactgattagggatactccttgaaatcttgataacaaacttattttaaacatctataatgatctaaaatcattagagtatgaaactcttatagcgaaagcaataactaaaatcctataacaggttctaatccaatgtcatcatgcaatatttttcaatgaaaactacataaaaagaaagctttgtgttaaaacccaaaacttagattcttatgcaatttttttcttttgaacaatttcattgaaaatataggctataaatatcataaatgaaataaagactgacaagttgttcatccaaccgaaaagcatgcacaactaatctatgagtaaaaccgactagaaacactttagataacaaacttgcaaaaactaatagcaaagatctaaaatcactaagagtaagaaactctcattaaaaaaaacaatcatagtgactaaacaaattgattatagactaaaatcctagtaacagattccgatcgaatgtcatcataaacaaagtgaaagagatcgtaaagattaaagagttgaaagctaaccatgcaatgaagaaaatcttgctcttttgacagttatcagaggtgacaaaatcatagtcataaacagcatatctgcaatcattctccggtaaagctgcagtgaaatcatcatagttctcagctgggccaccagtcttatcaaccaaaatttcccttttcttctcatcaaccttaaagatcacatagcggtgaaccttcttcctttgcaattccatgaaagcattcttgctgtgatcagcaactcccattccagatgaagcatttggcttcaagaaacaaaatcaaggcaaaattcattcaaaatttcatatgaacttgaaataacaaacatcttgaatcaatggctgctgaaatttaattaacagtaacatcacttatgagcaagaaaaacaaaatcttacattcaatttgaaccaatacaagtaaaaaaggatcattaaaataagcaagaatacaaattttccgaaaaacaccatttatcggtatttcaaaggaaaaaaaaaatctgaactaaaataatgcagtcttcccagaatcaaggcaaattcattccaaggcctcaaaaccaatgaaaaccattcaaaatttcagaagaacttgaatgaaataacttagttatcttgtctaattcatctcagaacaaacatcatgattcaatggctgctgaaatttgatta

SEQ ID NO: 43696 - DNA, 3234 bp, Cannabis sativa
  modified_base (2042)..(2052): a, c, t, g, unknown or other
cctaaattggatatggtccaatgaacccttggtgcctagtaattcttataggctatgccttgttagagatattctctaaaaactattttcttaagttatattaatacttaattacattaatagtaatataataccgaggaaaatactaaatactaatggtatcttttagcattttacttataaactataaaccaattcaaagagtcatcaactgcaaaaaattatgactcatataattgagttctccaaacatggccatatatgataaaatctagagatagcttacatctcacaaaaattggtaacttctcgaagataattaaagagagaaaattgaccaagatgaagtctaaattcgagctttctttgtagatgcaatgcaaaatcgttgtttgttcccataattttgacttgtattgattttgattgaaagttatttttagaaactttcctttgtgaatgttgtctgtttagaattgtgtaaaattgactttgaataagtattatatctataaatacgaaccaaaagctcatttttaggttatctcttcgatctcttaattttttatatttttagaagaatgtcttttttgtaaaagatagttgtgtcgttattcatttgttatttcgtgtgtatttgtaattatgtgttaagtaaattcttgaagtgaaaaagtaaagaataacctttaggagaagatttattaaagtcctgcatcagaagaaaataagtatttatcaagcgatttgaaaggagtttcaaaccttggtgtcttaaggatgttcatttagcaaaaagagcacatcatgttagacatttatatagtgtatatatgtatgtatatagtgtatatatttgtacttataaaatctgattaatgaattttatttattccgattgtatttgtttattccgtattttatatatttgtacttataaaatctgattaatgaattttatttttgggcatgatccgattattaacatctgaaataaatattgagattgtgtataaaaaatctgtgtgtatgtgtgtttttatttatttttattttattatactagtgtgatattttacagtaatatgaacgtaatttgtagctatagaatattagtttacaaaactaacttgtttgttccgtgagattttgtatttttattttgttatttctccaagttattgccactcttatttaaagatattattttagtttgtaataatttttatgattatatcgttctatttttgttaaagaccaacaaattaataattacacactcttttgattaaacttgctcatgagaaggaggatcatttagtttcgcatcaatatatattttaagtagaatgtgtgatacaaattaataggtttatttttgagtaattggcagtaaatttttcgtatattttaatttttatataagctcttgattttttttagcaatacttttttaattttatttttatttataaatttgatgcgtgtcaattaaattttaccgttaaatatcaactgagattattgtattgtgtacatgtgacactaaaacttggaaaccaatgagaacatgacacgtgtacatagtggtaattcaattagcatttgagatttaacatgtggcttaattttgcaaataaaagtgaagttaaaaaagtattaccataaaaaaatatcacgagataaaatatataaaattaaaaataagaagaaaaaaagatttcaccgccaatagcaattttttttgaaaaaaaaaaaacagactatgactgaataccttaattcttacccctttaataaaattcattatcaccaaaaaggttctatatttactaattcttccaatcacgagcaaacatacataatataattttagtgtgcattctcaaccacgctatttttttttttttttattttgacgtagtaattagaatcacttatgaatttacgagatatccgcaaaccgcatagtaacctccttgaactaggatatagctcattcattgtctaatcgaaaagcatgcttgtcaaaccatgaactnnnnnnnnnnncgagcaacatgagacaaactgcccccaaaaatttagacaataaaactataacgtcctaaaccctaaacccttaaatcctaaatacaaatatattcaacttaaaaaaaatgctaaaaggtacttatgatatctattatctatcatctttatgacatgtaatattactattggtgtaatttaatatcggatcctatttattttattttaataaatatcatagaatattactaaccaattataaaataacactccatcataatatttaacaccatgagtacttcgtaacaatgttattctctaaaagaaaattacatataagttgtaaataaatataaaagactaaaagagtataaaaagacttcaaactgtgtatgtgacattattagcctccaaataaaacaagaaaaaagtagtaaattatacataggcaatgaaattttgtctttattttataaaaaataatataatgtataacatattttattttaatgtagtttgatcaaaatttaatatactgtaatttttgttatgtaaaaaataaatatacataatgaatacttcaaatggaacaaaaaatctacatccaatatgtgatgtagtgtttgtacattagaatatgtcaaattaagttttgtatattttgaagtgattacaacataagctttttgtatatgtataataaagaccaatgaatattcaacattttttaaggaacaataattaagttttttaatgaatttaccaacatacttgctcctacaaaaataaataaataaatgtatattactttgaattttgaaattgatataattaaatttcctttcatgtatgatttggtaacacaacaagataataaataattacttggtttgtcattaagaattatataatattggttaatttttgaagtaggaaggcttttggattgcttagtacattctctatctctttttgtgtatctaagagagttatttaatttatttttttaataattataaatgtttttattatttaaaatcacatataaatttttaaaaaaattcataacactttgtaatgtcaaaaatattaaggtttaaataattatttactagtataagaaaaaatagttacgtatataacaaaatatttaaattttatttttaatattataatatactcataattttttgaaaactatta

SEQ ID NO: 43697 - DNA, 1471 bp, Cannabis sativa
  modified_base (1338)..(1345): a, c, t, g, unknown or other
aattcctcctcaaaagtaatgtctcaaaaattggttaatcccatctcaagataccacacacatattaatatcaagtctttagacagtaatattaattgataacggtactcttacgcaggcagttatcctggattaaaattctaacaaaaatttctatagaagtgtaatgttatgtagttcatagaatagaggaaactcacttgttgaaggaagtggggatagataaggatggaaatgtctggcgcgaaaagcgaatgctcaatcaaggattccgtcattattcgcctgaatgtctaaaggctctggcgtttgggtgtgggttactattgggctcaaagggggtggattgtgggtactccttcactctaattcatagaagattgtggattgtgatgtcaaaagagatgagacattcactaaagttgaagatgagggtttttggtatttttttttggttttctctctcgaaaccgagtttaaatggccgaaaggaaaaagtgatgcaaaggtttcccccacttgtatttatatgagggtttggcgatccgcgtgctcttgaatcaaaggctcagatatcacctagagaaacacaatgggcatagttaaatgcaccttacggtactcgaggcatttcctcattatcaatattctcctaaagacttgctctaatatcaaacatccatcattacaatatctcaagcctcacacgcttctcaagaacgtgtggaattcatgaattagcaaaatgatgatacgtgtgcagtgcaagatgtaacccttgagaatctataacctttcacattaagttgtatagaagatgagtgggctactttttcaaaacaacccacgtgtttgaagtgcttagagccatctggaggtgagactacaagctttcgccactcacgagttccgtaagcttaggcgtaaatgttatccacgttgtcggatgagtgacacgtggcattttagaggagtttccagtttacataaatacctagcccaggccttcaggtatacaaaggtccaatccaaatcggagatgggtcctagcccatcttatctcgaggagcctcgcctctagaagtaagatcctcttacttccaatatcccatccagcctttcgagaaatggagcttgcgacgtcctttggatgattaatgaaatatatccagataagaagcccaagaggtgcatatggaagcccttttatgatgacatggttgcgctctaattcctgggcctactgatattttgcacacgcaagtgtacgtaccgtttcaagtagtagactcaccagaagtgaggtcgatcccacaaggagtgtagttaagtacgttnnnnnnnnacttttacttctatttggttaatacaagaacagaaaatacaagaacagaaaagaatgaaaaataagaaaactagtaagaagcaatgattaaagaaaattgaaagttaataaaaactagggcttcga

SEQ ID NO: 43698 - DNA, 2845 bp, Cannabis sativa
  modified_base (58)..(94): a, c, t, g, unknown or other
tacaaaccgtaaagttcaggtggtttagccgccaatatccctaataataataataatnnnnnnnnnnnnnnnnnnnnnnnnnnnnnnnnnnnnnataataataataataatataggatggattaatttgtgataggcgcgtgaagctttcatatctgagaaaaaggaggtgaaagtagggcccaaatggagttagggcatcacatgggctggagcccatttgattggatcacatccaaaaaagtccaaactaaaatagacaatgccaattttaagtagtaaacaaagtcactctagtgttacactctatcatacactttttaatttttaggtacatcatccacatgattattattattactattatttatttataatgttaaatcaccatccatatccataaattgtggatgctcttcatttcaccataattctcctttttaatgtctaaaagctaaaccttgttttcataagtgaaaactacatattcaaatttataatattcttttaattttaatattgagagtaattaaaaataatataaagcttgttaccctaactcgtgtcaaagcctcacaagtaagactcaatacttatttatactgataacaatataagatgttgaacgccctaacactattttaatatttcactttatagttttcagtttccgaaattaataagttgttcattaagatctcattaagtttctcctaaaataatattttagagctaaaatgaaaaacatattgaaaacctaatcaattttgtaaaagcacttttagagtttaaaaagaccaaaaataacctccaaaatccaaccaaccaattatttacatgatcactaagatttcttcttcaattatttaatttcttttcaaatcttataaagatataatcttttattataatatctttctttatagattcacagctaattgtacagtcctagtgtcactgcaagcaaatacatgttctgtttgactatttctcatttcattttggattctattaaataaataaataaatgaaccattaaattaaaatgttatgtacccataaaaaatagaggaaacaagatcttgggtaggtgggctatggtattatatgtttttgtttttatttatttatttcatttaatattttatggggagttttgccaattcattgattgactatatagctcattagactagaaaattggtcaatcattgctaatggaagaacaacaatgagagaagtgctatgacttgttttcttctttggggccctttcttagcataatgagctggctatagagaactattttggactttttttaattagaatgtttatttgtttatttaataaaaataaaaaatatataaatttgaattttatattcttcaaatagtatagtgttggatgaggtcggtttgaaaatttctacaaaattctatttttggaccaaggcattttagaccctaccttcacccaactccctacttcccaaccccacacccctcacaatctaacattcactaataaatacataacaatattgttatgaaatacatttaataccattagacatgatatacctatttagtacattttaatattaaaaaatattttttattaagaggataaggtacattttgaattgcgtgacaatacgaaattggttgagatttattgtaaaattatcgagtagcagctttcgaccaatctcgtactgttactggctcgagatgtcgttcgtcctgagaatatataaaactacacttttctatttgagataaactttaatttgccttatataaatacacatattatatataactataaaagaattattttcgagttacgtgatagcataaattaatcaagattactgtaaagttgctaaatagcagttgtcgagtaacatctcctgaaaaaatctcgtactatcattggctcgagatgtagttcatcctcgaaatttatagcactcctctttcatatctaagatataagtattgaattaaactaagagcattaaaatggtagttaaactttgttttgacatatatcaatacactctatacacatatataagatcattttaggtagttctcaaattattaattcaattagcaaatgaaatctacttcatcataaagtattgaagacttttctagttttgttaagtgtagttgtgtattagtgtatagtgaaacccttaattttgggtaagttgactaaagtcccacatgggcagcatggtagctctaatatcacacaccatcatgacatgtggacatataattggtcaaacatgcataagtgtttaatgggttcatttgttcataagggtggctttcacatttaggccaatttcaattataacattatcttcaaatcaattagtgggaagttttttcagggaagtttaggaatattccaataattaagaaattataataaatatgaccattatttagcattcaaaatttatgtctaatgaaatcgagtcatcgattagttgttcacactcctattcttagataacagaaaaagtataataacatggatgaaaagatgaaaagacaaaaattatttcttttccacgcgttgttaggaccagtcctgaaatttaattgaccaaaggaaaaaaaaaatatttttaggcccttatttttttaaaaaaaaaacagtatttttcaaaattaataaaaaaatatgtaattttaaaagaaatttttttgtagtcccctggactaagtggaccctaggcacaggcctagtccgcccatgttcaagatcatgcctgcacgttgtaattatctttgattatttttatattttgattagtaaatttttta

SEQ ID NO: 43699 - DNA, 2803 bp, Cannabis sativa
tcactcatttattttgatgataaacaaatatttgattattatttgttactaatcttttcttgattttttttaagtaaattcacaaagtatcaattatcgctcagtaaagttaaacataatcgaagaagtggattcaacaagtgtagcaactactttatacttcataagagcaaaaggttcatcaagagatcaatataattcaagaccctataaaaagaggacttcaaaagctcaaagtcaaaagtcaactcaaaagtcaaagcaactctcgagaaaagtaaattttggatcaaaacatgagaatcaaactaggaatctcatctacatcaagactacacacaatcaaatggtataagtttactttagtcttgttaaaatgatttgcatagtaaattagagtttataagttaaaagtttgaatcactaatttatgcgataatttacttttaaaaagtgacatataatattttcaaattagattttaagattattcatcttttaactaagagaacacaactggataagagttatgcgcgtttaagtcaaaaaaaattgcatttcaccactgcctcacttattacgacctactgtttttaaaccaacagatcgtttcttcaagtaagttttttgaaaaacgtgctaatggttataaatagctagttttcattcccacaccatgtaaattcgtttttcacttaaaatttaaggttgattgagtttctattcatcatattatatcattataagtgttctaagacaaaaaaaaaaattatcatctttttataaacacaccaaccacacacacttgagccaaacttgttcttatcttctctagtgtgcttgcaattctctctaggatttcacattgtattttatcttattagagagagtttacttttgatatcacattgtatttcatcttattagagagagtttgctttgtatttcaaaatcaaatatctgttgtattgaaaggtgaggttatcactggtttaaaaataacacgactataggtaaggttgacacaggtttcgtaaacaacccgagaagagtgagattgttactaaaataatctgagagtgagattggcacttcaacaatccaatgagggttatagtcctttggaaaactattagttgaggtgaagttggcaccagtggaaaaacaaatcggttggtgagattgacacttaaacaatctgatgaggttgatagtccttggaacaaaataattgtgagaggtttgggaaaaactttggtgaaaaatttcccagttgtaagggttagtcacgcccgttaacttggctcgatagttgaactcaaagctaagtccataaatttgaaaaccatggacgtaggtggcttagttctaccgaactttgtaaaaatcaagagtttacaatttctttccctaaactctttacatttcaagtttattatttgtttatacttgtgtttatttatgtgactacattaaatttgaatatttacataaattatctttgaggcttttaaatttctgaaattagtttaaatttaaatttctaattcacccattccccatcttagaaacataaattgggctaacataatgaaacacgatttgagagagagaagctatggaatttttaaaaagagaaaatgaaattagtctctttgaatagtccaggtcaaagaaccagttatctaacaagcttgtcatcttatttcttatatcgacacactagatttaaggttagatgagatggacaaaaattaaagacaattgggctcaaatcaaagccatggccgaaccctatagaaatggcccataaattttattttttccactttatttcaattaaagttaaattaaataaattccctagaggccagttacttgtactgtaaagcaactctactagaggccaatcagattcgagaacttcttcaccagtttgaatgtgcttcaggacaaaaagtgaacttggggaagtcatcaatcttctatagtactaacactgagaaccaggtgagggaggatataaactctttgttacaaatgcctcaagctgatgaacggagtatgtatctggggctcccaagtactatgggcaggaataagtcagctgtgctgggtttcttgaaggacagagtcaggaaaaagcttcaaggttgggattcaaaagttttgtctcgtgccggtaaagaggtattaattaagtctgttgctcaagctctccctagctatgccatgaatgtttttttactccctttggagattagtagagacattgaaagcaccatggcgagattttggtggaagagttcgtcaaaagaaaataaaggtattccttggatgtcatgggatcggatgtgtaacagcaaaagtaatggaggacttgggtttcgtagtcttcatgattttaacttggcgcttttaggaaaacaaggttggcgttttctaacaagaaccgagtctctggtttctcgcattttcaaggcgagatatttcccacatggaacctacctcttggcccctattggaaacaacccgagttttgtgtggcgtagtatttgggaagctcagtctcttgttcgggcgggagttcgctggagcgtggggaatggctcatccatcaatgtgctgaatgaaccatggctaccggatcatcaacaaccgttagtgacttcgtctcatccggcccttcaacaagccaaagtgtgcaacataatgtcaatggatttgtcttcctgggatgaggatattctaaaggatttgtttgtggaacgtgaccagcgattgataaggcaaattcctttga

SEQ ID NO: 43700 - DNA, 2126 bp, Cannabis sativa
catacatgttctaaaaactaaaaaggatacatccatataccttattttttttaggtattcgaaaaaatcattaaattttttgtttcctcattataaaatttaaaaattactatcacaagtgtcaaggattgtcttttacttcaaagtcatcatacgaagcttagtttattcaaaaaaaactataagtaaatatttatcttactatattgaatcaaatgtgttactttctaatttttgcttcaaatttctaaatcattctctcattcttttttattgtaattattattattatcatcagaatagtctaagcataacttgaggttgccacgttttgaattaaaaaaaaaaaaaatcaaactaaatgtacgagagaatatttgcaatctttaatttttaggggtgatcatcattttactataaaaatttaaataattgactaattagctcccctactcactttagttcatattagttcacacttaactttgtcaatcaaccaaacacataaattaaaagtatcctttactatattgatttacttttattataaattttgattatctataaccaaacatgacatagaattatctatttaataatttaaccattctctttataaggcaagtttatccttaggtagagtaaagaaaaagagtaaaataattatatgtaacattgagtgggtgagattgcacatgctaatgttatcttatcataaagatttaaaccaataaaatgtgcaaaatgtgacttcctcaatcaaatccatgtgtttagatattatttttgacaatgactacatttcttctcttaatttgtattattattattattaccatccttaaaacaattttttgaaaagaccattcttaaacaattggaatgattttcaaaaaaaaaaaaaaaaaaacaattggaatggatatccatattttggtaagaaactcatgcctttaagccaaggcacaaatgtcaccaaatttaattttttttaaataaataagaaaccgtttcgcctaaattgtttttgcaaaagtacattttataatttttttttgagggggttaattctaaatataaaaaatgtatggcactttccttcttttctttttaatttcgattattttatgaaattaaattagttttttattgtttattcgattgtaacattaaaaaaagttaccaaatttttaatgattttttttacaaattttagtattttacattattgtttggtaaatttcaccattaaaaaaatgcattagaaaaaaaatattatatgatgtgtaagatgtttgtagaaacattaaataaaagattttacttttcaaagagatcatataatgaaatattatatgaacaaaaccctacttatcaaaaaccacacaaaaactaaaaaccatacaaactaattagcccataccataacaaaacaaatcaactactaccaccaaaaatatttcaatttagatgggatcacatagccaatcaatcaaatgttcccttgactaaacacttatatatattaatatcatattatatataataaatatatataaattatatgtatatctacatctaaaaaaaagaacattttctgtacacatggctctactgctaatgtgcacctttccgtacccaattccactcccgtgacccaaaaatgatggaccccacaagtaaaattcccacaaattacaaaattttacattttccttcattatccgatgagctcgagtccacaacaacacccatggatttgtgtcgtgttgtcttcggtctttaagcccatcaaggcccaatgtcgggataagcccatctcgggcccaaatagagatcaaaagaaaaagcccattaaaacggtttctggaggtacatgaatatgtcctgtaacggcgacatttgattgccagctggaccgaacgagttgtccacggtggcatccatataattataaggaaaatcaagggctttatcccaatcatctttccacttaggctcgctttgaacctcgcacgtgaattcgggcgaaaccacgtgctccgaacagctcgagtccgtgtggagcctcggtacggattctgacgtgtcgaagtagacgaaatcgttcccgccggttgtggtgg

SEQ ID NO: 43701 - DNA, 1788 bp, Cannabis sativa
aattttttttctcaatttaaaaatttgcacatttattgatttttttaattattattttatttatattacatttttaattatcatgtataaagtttaaataaataatatcatctataataataaaaaaaaactcaatatactatctttttagtttctatatgaattattatacgaattttagttgcgatttagattgtttcgtaaaaataaaaaatcttcataaaagatattattttcaataaaaaataatgatacattattaatatctaaaaaaaatactcatatttttcaaatctaattaactaaaaagttatatgaacaaataaattaattagtctacatttcactcaaattaatattaactcaaatttaattatttctttgaaaaataaataaatataagaattaattttaaaaaaataaaataaagtaaattacagttagcccttatcactatgccctaatttgtctctctcactaaggtttctttctctctcttctctctctcactccgacaccgtccgaaagcttaaattcgccgccgtttcttcctaccatcgccattcgccattgtcggaggtaattctgaattctaatacgaaggaaaatattcaaattggttttgctttggtttcaattttctttttgacttatccaatttgtaaaaccctgatttcggttctagggttttagagttcaatcatggagcacgacaatgtcgacttggaacacgaggtcaagaccaaaaagcacaaggggaagcatgataagcccaagccttgggatgatgatcccaacatcgaccgctggaaggttgagaaattcgatccttcttggaacgaagggggcatgctcgaagtgtcaaccttttccaccttgttccctcagtacttaggtaatttatgagaaagtgttgggtaaataaagcatttgtgttcaaagtttttagcttgggttttagcggtggattactgatatgagctatatgtatacattcaatactattgtaatgtgatttatgttttttgatgagtatttgaattagaggaacttagtttggatatgttgcatattctcatgctgacatgtattttgctgttttgtttagaaaaatatttgcaggaaagttggcctaaggtgaaatctgctttgaaagaccatggtgtttcgtgtgaactaaatctggtaggttattgttgtagtagtaaatagtgttctaaagtcactctcttttagttattgacaaaccatatgagaatttttgtgctgctgattaattatatgaataatatacgataccggaatacaaatcagaaacactttaccacaagtgttcttgatagatttaggtttgcctgttggtttattgtggttcttaactgttggccaggttgacggttctatgacagttacaactaccagaaagactagagacccgtatataattgtcaaggctagggatcttattaagcttttgtcaagaagtgtgcctgttgctcaggtatagattaccatagattttctcacttaaatttgtattttaactagatttatatttattttatgtatgttgatatgagggttacatactttcaattgtattcatctaaatgttcatctataatttcaatgcaggctataaaaatactgaacgatgaaatgcaatgtgatgtcatcaagattgggaatttggttcggaataaggtgcgcaatgagtatgattaaaatagtttataaaagatgacttctttgaaatcttacagaaacaagtgctgtagtgatgtgtgt

SEQ ID NO: 43702 - DNA, 3297 bp, Cannabis sativa
gagagagagagaggaagaagaaggtgaaaaaaaaaaacaaaaaagatataactatgaattttgaaacacacaaaaaatacttacaaagaagatgatgaatatgagagagaggactcaaatacaattaaaaaaaacatgaagaagaaaaagaacagttgagataaaatgtgaaataaagataagaacaagagtgttattagaaggtttctcaatttttaatcatcaattttaattaaaaaaaaaaaaagtatcacaaaaatgacatgaccaatcacatcaaaactttaacttttacaaaatttaaaaataataataaaaaatattataataaactttgactgttacatagtaattaaatggaagaaaatgtgtaaattctcattaaaaaaaaagttagtatgtggcaatattattaataaaaaataaaatgcagtataaaaataaaaatcaccgcataatagtataaaagaaaagaaaaacaaattgaaaatacagtattgaatgtaattttccttgtcatattaaggtacaaatgaaataaaattttaaaaagcgaaacaatgaaaacataaaaacaaaataataaattaaaaatgtaagaaatgaattattaaaagtaatgtaattaaaatatataacaagtattagagtgaaagttttccaaaattttattgcatttctaagtttttccaatattttattgcatttctctcagtaataaatgtattgggaaagattccatattgcaggtagtttgtatttaaatagttgagaggttttagagaagcagaaaagaatttgtattctctgactgaatttgattgggagaggaggaggtggtctctttaagaatttctattatcagttaccatatggatatacaattcacatctacacgtgctgagtagtaaagttgaaattacaaatgaaaagtaatgaatatattttgctctcaataagaattttggccattaaaaagagttgctacctgaaaacaacacttgctaatgaatttgattggtagctccctatttcatcatattcttgtagctctgaattgaatactcgtgaaatataactaatgaattaattagtgtggacttaggcaagcatagattacatttgatggcgcataataattttcttttgcatataaagaaaattttgtgctcatgttggaaaacttgtgagacaccagacgaaacaaagatttctaggataagttatcatttttttacaggcccccaagagaggggcaaataccactcacaaagatagaaaatttggagaaagaagcaacacaattctgctgcacaagtctgataactaactaatttagttatgtcttacaagaataatctgattgggactcgtaaaagtcgctaggatatggtgacataacctcttgttctagcaactgcaacacttcacccatagatggccgatcatctggatttgagtctgtacatctggaggctacttcaagtattgcttcaacggtttctgcgtctgcgtctttgcacctattgtccacaatgtcctccaatcgattttctttcaagagtgtgttcatctaaaatgatcacattatttgatttagttgaattatgcatggttggttagttccaaacacaagagaatacttatagagaatgtgttgaaaaagcttacccaaccaacaacatttaagcccctcttgacaaaagatggatcagttggtctctttccagttacaagctcaagcaaaaggactccaaagctatacacgtctgacttctcagtggctctaccactttgaagatactctaaaatgtagtcgaaaattgaattcagttttcaaaatgcagtcgaaagataatagtaatgagagtataatatctattagggaaaacaaacaagtacaaacctggtgccaaataaccaaatgtgccagcaacaacagtggtgacatgagcatcctcatcaaccaaaagctttgcaagaccgaagtcagaaacacggggctctaagttttcatcaagaagaatgttgcttgattttatatcacgatgcacaatctttggagaacagtcatgatgcaagtaagctagtcctctagctgaaccaagagctattttcaagcgattgctccagtttagagatcgatcttctaccccatgttctggagcaaacaaagaaaaactcttaataataatgttgcccccaaagaaaacataacaaaatgttatgatgccaaattatagtcttaccatgcaagaaaccatccaaactgcccatagccagataatcatagataagaagtttcgaagcagggagtctgcagtaacctcgcaaattcaccaaatttatgtgttttatgctgcccaaaatctctaactctctctcaaaaacttgatctgaaccttgacgacttctatcaatccttttaacagcaaatgttccacaatcattcatgaccatccggtacacagtaccaaacccaccagagcccacaatgtcctcttcatcaagtgcctccagcttttcaatgagttcacacgaggggtatggaaggtcaccatgaaaagtaataagttttgtgcctgtttgaaagaataagttagaaatagtagcagtagctataaaaagatagaaaagataatagtgtacagttgaggaaacattagcttacttgcttcatgaaccttttgctttcttacttctgagtatctctttgcagctctttcttttttagatagcaaacgagtccaaaggaacaaaaggagtactaccagagtaaggcccataatagacattgcaccaatcatcactcctttgatgtcatgtgaagacttcttagagggaactgcagataacaaatggaaaatacacatcaattagcatattcaagttcgtatcctagatacgaattgggttgacatcattttgtggaagtagatacaatttcaaaagctaaagaatggaccaaaacttgcctgacgcttcatcacttgcagcagtatgaggcagcactgcaggaaatcctagtgaagtccgacatggtttacgcatttgttgtccacaaagatctagattacccgtgaacctggagaaacaaaatggattattcaaaagtcaaaattcattactacaacaagctctggggcatctctaaatgtattgtcacaggttgcagttatgctgtacagttgcactagccaaaccaacatgcttgttctactgtgattgatatggtactaattgaacaacatgattgaaagctttaattttcttctagccaagtgtcccagaaattgt

SEQ ID NO: 43703 - DNA, 2288 bp, Cannabis sativa
attccttccaactaaacgctatcttagtatttttcttttctttagtgtattcgcattaaagtaaaagacaaatttgttcttaaggaaagagtgttttacgttcccccgagtttccttttaattactagttttacatcttattatttgtatttatatttttattctttaattaattaataatatattattatgtttgcttatttcattcattctctatcttattcataacaatacttgctaaattttgatttggtaatttcattctttcttttattttgtgaagcaacctttcaatcatgtaccaataattaagaatatgaacacatttgtcttattaaaatggtattattcaaatataacttaaaaacttaagagagattttagtgtgaaagaaataaaaacatgcatgcatatgccaatattgccatattagcaaaacaaagactatatataaatattaaataatatacgcgcttattaaatatgtatgcaacgttagtgacacgttgcttttaaagtttaccacccttagtgatcaccatgatcataataatcaactctttctttaactatttttgcataattaatatttcttttttaaatttaatatataaaatataagttattaactaaaaatgatataattaggatgatctaaaaacaaacttataaacttgagtttggtttggtttggtttcccatgtttttctccctacaaagaatctttaagcattatatttttaaccttattaatttcctcattctttaaaatcaccattttatgcggaaacaccttcaaattaattaacccattttcgttgctatgctttttttggtccaaaaactttcttctcttcatctcaggtaaacctctcttactggatttcttttctcataattttcatctcttattcttctttcttcttctgtccatgtatgtaatataatatttttaaaaaaatttatatagataagaaaatttaccattaaaaaaaagaaggaaagaaatgagttgcttttcgtgttttaaaaaaagtaaaaagaaaacaacaaagagatcaattgacataagaaggtctggccaaacaactggagttcatccaagaaaagagaccaattctactactgcaccacaacctcgcccttcaggtaattaaaccaaattatagctccttttttgcaattatatgaaacagagctctctctcttttttatttatttatttaaatttttttagtattgttattaggcactagaagccactcttgagttgaggatagtcagacaaaaaaaatttatatgtattttcatatatatgttcagataaaaaaataattatatgtgataattaacaatttgccccccaaaaaggttttttaaacaatttgccccccaatagtgccttttagcatatatgacatttttacttcattattatgtaatttgcagaaaacccaaaaccaaaatcagcagcagaatctgagaccacaaacaacaacaacaataaagatatcaataataataataatgaaggaacatctaatgggaaccaaaatattggagcaaaaacatttacatttagagaattggctacagccacaaagaattttaggcaagagtgtttgcttggtgaaggtggatttggtagagtttataaaggcagacttgaaaaaactggccaggttaagcattacttcattttattttttaatttacaaaaatataatacatttttattttattaatgggattgttgttttttttttaattattgaactagttcaggttgtagctgtgaaacaacttgacaggaatggtttacaaggaaacagagagtttcttgttgaggttttgatgttaagcctcttacatcatcaaaatctagtcaatcttattgggtattgtgctgatggtgaacagagacttttggtctatgaattcatgtcattgggttctctagaagaccatttattaggtactcctttctctctacatttgttaactaagcattgctattgctattacaccttaatagttttaatactatattgagcatgtgatgcattgtaagtatttacaagtttttcctattatttgcttaattaaaataagtgaatctgatattaaattacatcaataatgaatataatacttcttatgatacttgacaatttagggtgttcgtgtaacatttatcttcttaattaatgtccgacatcctaagacatgtcataagttggcttattaaacccttatttaaaaaacataatatttaagaaaaaaaaaaa

SEQ ID NO: 43704 - DNA, 2804 bp, Cannabis sativa
tttttttttttttttttgaatctcatattttgaatttatataataaatatgagagattaagaattttacccttaaactttgtcaataaaaaatcatgttccttgtatttacacccatacatagggatgcacaaaagaccagatattagaggtgagtgctcccctaccctcatccccatcctcattaaggattttaattctcatccccgagaatatacaggaatggggcatgatatctcctaacataaaaaaataaaatttacattaaaaatttaaatgtacaaaaaatattaaacattatttattgatcaagttactaattatcattcaaaacgcaacataaatttttataaaaagatacagacataaattataaaatattattaaaaatataactaaaacattagacgggtccccatctccatccctgtccaaattcctacctcgtttaacattcaaggacaaaaaataatcaccatccccatcctgtcccccgagaatccctaccccattaggggcgagtctaaacggggccccatccccataagataaatatgcatccctacccgtacactattacaaacttggttttggttttaaacttggtaaacctaatttttgagtatttataagtccatacacaaaacaaacactattacaaaagaagcagtttgtccaaaatgaaccattatatatcaacatgtatctgcttaaaaagatatgtgagataaaatatacaaacttttgtctgtttaccattcaagtacagcttcaactcaactcagtgcagtaaaagattgcaaaagtaacagacagaatatgagtttcagtgccaaattaatcccattaaacttggtgttatagtttctactctacaagtgtctttctactttgctttgaaatgggacctgttttaaataagaagaaagaacatgattatgcaacattttcaacttaataataaggaaattgacaaagatcaccttagctctttaattctatacaaattcatattaatacctaataataaactaacaaattgcaaaccaacacaacaattttgctaattgctcttgacttttccgtcaccattttcctccttcgatttccaatggaccggagcaatgaaggtgagaaattgcacaacaattctcccaaacaatctaagtttctgttttcataatttattttcctttttctagttttcagccacttaagtgattatccaccatgtcgtgccacataagcaaaattatcaaaatgtaaacagaagtctcaatatttactaaccgttaaaattgagggggtatttttaacagcgctaatacactactgataagccaccatataaaactagactttaatcttagttgttaactctctttgttttaattaaaagctgttgtattagttttaggggttgatgaggagagccccaatcctctcgaacagattggaataggagagaacaagcttctcgaaagcttgtgatttgtaattttttccatcaaattcaataaggtttctgcaagaattcccgctatcctattgtgtaattacaagagttgacagggagcaagatcatagataaagttcagaggacaaaataccaaattattttaaataaaatttctttcttgcataggaagagaaggattaaatggagaagaaactctaagaattggaagctacaatgcattgatgaagaattctcttccaaatgagtttcaatactacaaagcagaagaagaaacctttgaatcatcacatgaagtgtttagatcagcttttccaagaggatttgcatgggaagtaattcatgtctactcgggaccaccaattattgcgttcaagtttaggcattggggtttcttcgagggcccttacaagcaacatgctcctactggcgaaatggttcagttttatggcattgccactctcaaggtttttcattctcacactactacgactactcgtgtttttgaatcctgataccagtgtcgttaaagttggagtaatgtacaacatcgtcagttcaaaaatttgattcttgaattgcgttggtggtgttgtatattacttcaacttgaaacgacaccatctcagtttaggtctaatgtgtttttattgtatgtatatgtgtgtaattatgtataggtcgatgaggcactgaaggtagaagaagtggaggtgtactatgaccccgcggagctaattgcagggtttctgaaaggaaaacctatttcagaatctggggatgaagactcgaaatctaaacttgaatgcccttttgccaaactaaatgttaaataagttttgtgttttcttgcaacttatttttagtacttaatgtatagttgtgtgttgtttattatgatttaagttttaagccaaaaaaataataactaaacaattgcttgttatctgtattttattcttgtatttgaatgttttcatgtactcagcagatttccacttaatttaagccataatttttagttaaaatgaagactttttattggaactcaaaaagaaaaatacccaatattttctagaatatgtatcaaatattacacttttattgctcccaaaaaaaggttcacttttatagttaaaatcatttatcaaaacatctttaatatacatattcagtcactatagtaaattaaaaaaaaaaaaaaatattcagtcactataacattaagtatatttacttaacaaaaaggaaaaaaaaaagtataaaaatacaagattttgaaaatattaattaatttagtgggcgattttttatattatttatttttt

SEQ ID NO: 43705 - DNA, 2796 bp, Cannabis sativa
ccatgtaaatttccctaaaaaaattccaattaaaatgtttggcccaaaaccttctggaccgcattactcttttatcttattgcaatggaaaaggaaaggaaaagtgtaaagggtaacacatttcttaatgggattatttagaaattgaaaaatacaaaaataataaaaaaaattataaaaaatactgcgaaatagattataagtacataaaatatagtattttgatgtaatattatattatatacttgttattttgttatttgtatattatattcagaccattgctaataggcaccaatgatgttcaacacttaatataagtggtgttttagattagttagttatgtttttctaaaaattattttcttaaattatatggtattacactaataataatatgatatcgaaaagaatgttaggcaccaatagtaccttttagtaattttttaattatttttttatgttatttgaatgaggttttcaacgtaatttttaattatttcaatattatttgtatgaaccctgtaaaaatataaaaaataaatctttaaccataaaagtataaaattttaccagaaataataatttatataaaattttcttttttaattttatgaaaagtaaaaggtgaccaaacaatatcatatgggcctatatgacaactatatatgatgaaaataatatacaaccaccacttttgtgtattttggatcatgccaaaactatatattatgaatttatgatgaaaagaaatatcactatcaatagaagagaagattggttcatgcaccttccatttattgcaaatactcatgacaccttatcattgtgtttttatctatttttgctgagtcattacttaaggtaatttattttttatattaattttttccttttgataattgaaatgagattaggtagtgcatatcttaaccttaattctttcggcttaataacaattcaaaaaattattgaggagtaagttaaaacttatacacgatctttaagatagttgtcagctgagactcttcttacgcagaatacactgacacttattacttaagataacgtattaccatgaaaattcaaactccaaaaaataacaaagtgagaaagcgtatacaaagcatctcaaccactataccctacaatcgataattttttttatattggttattaaatttaaatttaaactcttcatattaaattatactaataacaaatatatataaaaatatttaaaccaaatagattaaagtaattattattattctaatttttaaccatttttatcaaataattaaagtgatactccactcattttttagtcacatttattattaatttctctaaccatacatagaatctgtgcagtgtggaagcttattggtaagaaaattattataatctaaaatatgttaacatatcactattattaacctttatatgtatcacatataggtcaattataatataaatattacatgtaataatactagaaaaaattatgtaaacaatgacatatataaatatagctatttgcattaattaatgtatattattgccacttgtagagtttgtcaagttgcaaatggaagctatatagaaagagcaacccattatagattcttataatagaaaaattgtaaagagtaaaaataacaaaatcattggaagtttagaagtagacacaagagtagagaccacctaataaagcaagaccaaccacgtttctaatgtatgtggacctatatatataaatattatgtatatttgtggttatataattaaagatgacgaaaatatctcgatttcgagtttggtattgctacgagatacttatggtgtttattcttacgataaattgttactttataaataattaacgattttctataatatttattataataaaacaagtcggattgaatattaagttgcatcaataataatattacacattacaaagatgttagacactatgagtatcctttaacatttctctttcgggtcgagtcggatttaactgggagggcgctttaacgtcgttgcctcgccctgtcactgtataattaatattcattatttatttgttgggggtattatagaacacttgtttttttatagtgtttatggtagttatagtgattttttttatataaatttttgagaaatttttaaatattttaccgtgtttaaaaataaatttaaacttaataacttagttattttgtacatgtttttctattatacttgtgtgaaattatagtttgatcaaattctattttagacattatttggtgcttctataaatactttctttaaaaagaaagaacggatgcactatttacttatttcgttattaaaaaaatatatattctagtttatgtttttttatatttgtgtaatttataattatttaagatattttgtaaaattttaagaaattcagaataacttacaatatagaaaacagtgttcaaacaatctatttcacacacatataaaataaaatatagtcacacatgtagactatttgaattctatttttggcgtgttaaatttttttgaatatcttaaaattttatagaatgaattaaatagctacaacgcacacaaattatgagaaaaaaataaactaatttttttttagataccgaaatagataagagtgtattagtatatgagagaaaagaggaagtatagtgctagaatttacaaattatggaaagcttttgtaaagtcagtcacgacgatggactacttttcaaagatttaaactgaaattgaatttta

SEQ ID NO: 43706 - DNA, 2160 bp, Cannabis sativa
tataaaccgtcatttaaagttctgcatttttatgacacccacatagccaacggttttaggaaccgttgggaaataatataaaagacagttataaaccgttgggaatagccatttttgtagtagtgcacataaaaattcttgtcttctttaagattatatttattatttcttaagtccttatttaagtagtttgtaaaaatctcagagtttataattgatttcttgtaaattaggttcattatttattttcatggaaattatcaacaatttaattgtaaatactaattaattaaaaattaaaatttgtaatagcaaacttatatgtaatgttcttcaatgtacatagagtacttactcttaagctttaatgtttaagattgtatatctattattgtttatctcatgacttttttgagttttaataatagtcatgttctaaagttaatcaacggtttgattgtagttgaaaatttttaaaataaatttattgaaaattatagatttttattattaaaagatttatcaatactaaaatgtactggcaatgggtcttttactagcgctttcttctcgttgtaacttttgcaagtgcttttcaccaacatcactggtaaaagtatgtttaaattaaaagttttaccaactcatttttcacttatacgggcaatgtgttgacaaaagtaaatgtgattataaatttaaaatccctaattttcagcctcaatatatttgtctgaggtaagtgttaccatcttaaattacagggttttacaatacattgacacttatgtctaatagtaataggttctatttcattattttttatgttttaggctttggaacctcctacggatgatgctatgacctcggcaatttcattgttgtatgaggtacatcaaattctgctttgcctacatgtctgtttcttatcaataataacaatataattgccaagttgattggttttttgctcatcattttattttattgtttgatagttttctcttccaatgtcttggttattttaatctgatttctgttttttttttttttttaaaaaaatattttgttaacaatttagaatcgataattttatggtttggcgtgcttggtatctttgtttttgcattagtcctaattttatgtgttccctgattgcagaagtttattttactacttttacgcaatactatttagtttcttagtaaactctccaaaaagaattataatcactttctatttacataaagtgcttcttttcatatgtttatttatctgttaacagtatatttgtgtgtacttttcttgtgatcaaatgcatttcattgtttttcttaaaagtaaattgattttaaggttgtttatataggttgtttatcttggacatcatttagctaaacttccagttgatgtattgattgggaaggtaaataactaccatatttccctttcataatctatattgtaataaaattttgatattagggtattatgtaaaatataattggtaagaccgagtacgagaccctgctaaaattccagcagcagctaaaaattatccacataatataaggaagttagataaatttcagtttattttttgtatcattattttttttatgaatcagcaacctttttattactccaaaaatatccttacaaacaaatagtgccttcaatcaaagatctatgaaaataaccactacacaagtaaacttttctcttttttttttttttacaacttggagaactagtttgtgtctataacattaattttcttaagccaaaaataagtaattgtacttttaatatcatttttaatcttgtttatgataaaggattccttggcattacccgaattccacactatttcatttctagtacgccaaatttgataaaccaaaactgccattgcagccgcatatacttgtttacgaaatttgttacatttggctttcccaatccatcgaataaacttgttcaaatagctcaattcagccctccaagagagccactttttcacctgttggaggcagctaagagacaaaaaatattggaagaaaatatggttagccgattcattatgggtgttgttaggttataattagcctatgtctcgggtctttaaaattagcattatctcgtctattggtgtctttt

SEQ ID NO: 43707 - DNA, 2197 bp, Cannabis sativa
aaaagttatttttggagtgtaacagtataaaagaaagaaaatgtaaaaacacagtaaactgtgtaaatttcccttaaagaattcagtatattaatttaaactcgtgaagaaagaaatgacaaaaagggttttaaagaatttcgtgttacgtgtgccggggtttccaaagtggacaaaaatatgatatttttattctaattggggcagaaagggaaactcccaccaaagtcaaagtcaatgacgcaacaaggaaactactacgaactacgaactaaatcatcaaactacactgccttaacaattcatctcttcaaagcaaccgcgttctacttctatctatgtttccttttcctaatttatttcacccaaattaatactaaccatatcaaaacatataaacgcgtttattcttacgtacataataatacaaaagaaaatttgtcccaaaaaataaagtaaaaataacacgctctgagtcacacaaaaagtcattcattagttctcaccttaaaatctactaaacccctataaataccacactttgcatttccatccttccattcccaaaccaaccattcttctacctcagaattttattgtttattattatctctgttcatcttttgagttcttgagtttttgaatttttcattccctccatggcagacaaagctcatctgaatggggcctactacggcccatcaattccaccaccgagcaggcccaaaagatcattcaacaggcccggacgcggcgttagtgacttctgttgctgtggctgtatctttagcctaatcttcaaactaatcttctcaattataatcacagtgggtatcgccgccttaatcatctggctcattttccgtcctaaccaaatcaaattccacgtcacagacgctaaactcacccaattcaatctcacagacagtaccaccaacaacctccgctacaatctggccctcaacatcacaatccgtaaccctaacaagagaatcggtgtttactacgatcgtattgaggcaagagctttctacgaaggacagagattcagttcgattcagcttgagaaattctaccagggacataagaacacctctgttcttagccctgttttcaatagtcaaaatttgattgtgcttaacgctgaggaacttgctgagtttaaccaagaaaaaagttcaggaacttactccattgatgtgaagctttatcttagggttagattcaagtttggtgtgattaagacttggcgtttcaagcccagaattgagtgtgatttgaaggttcctcttagtgctgctgatggaaagtccaccgttggacttggagcattccagagaaccaagtgcgatcttgatctttgattcattcattgcttctttcatgtcctgatttttttttttttttctgatcacatttgttattattactattattattctttcctttttttttttacataatagagacctggttttttaattctagcattcctttttccttttttgtatgttgggttttgattttgttattatattgtttgatgtgaataaataataaaaaaaaattatttttattttagttatttaaattttgttacactatttgttttgagggaggtttggtagaaaagtggctatgataccaattagattaaaaccataaatatgttcaaaaaaaaaagattaaaaccataaatatatactagtggtcttttaagacctcattatactaaagtgagagaccaattcaagttggcaatggtggtggtggtgcatgctttagttttgcttttttttttttttttgaccttatataacggtaacattgattcgctttatgtatgagcattcttattagacactagtggtgtttagtacctttgcgacatgtcacgttgcgattagctagtgatactccctaaaagctattatattaaattatatggaacctgatatttaatttgaccaatagcgttattgacacataagaaggtgcttggcaccactaatgccctttagcatttctcttttatgtatttatgtttttttcttaatcaatattggtaactgtatctactatctagataggctaggtgtgtagtaaaagcatggataacaacgcctatatatatgaaggttattctgctctggccaatttagatatatgagcatgtgctttattgagacttggaatt

SEQ ID NO: 43708 - DNA, 3949 bp, Cannabis sativa
tgctcaagtcaagtactttcaaagaaccaaactgagaaatctgatctgggattgtaccccagataagattgttactgagattcaaagtctccaaagaggtacattcagagagatgaagaggaataggctggttgaaaagattgtcagcaaggttaagatgagctagattaagaagcttacaaagtgaagaaggaatttcaccagaaaggttcaagcttttaaggttaatagaagtaacagacaatgttggtgaagtggtacaagaaattccagtccaattacagtaatgaatgtctgaggtatttgaccaatttgaaaggtagttctttgaatcttcaatggaagacttgaatgatagaagaatgtctagctcagttgacactgaactatgaacaaagaaagataagactacagagaaaagaagcaatgatgaatatttgcagggcatagccattggtggtggtggtgagtggtgactctgagagagagcttggtttggttctggtgccaatgttttcctatataaaatctctctacaagagtcaatagagagagatatgattaaaggacgttgattgattcaagggtatattagcaaaattttccataatggtcatcatagctttttgagtagtatatcatccaacttttctttttgacaaaatacaaaactttagcatcaaaattctaaatttacataaagggtcatcttgtatatagaattatataagttaaaatttctccttttcatctacagaaaaacagtataaaagattctcaattattagattaatatttttgggcacgctgacacaaagtccaaggctttaaaaatgcttatcatataaattaatcaaagtttttttttttggaaaaaatattatatatgcatgtaattcaagattattaatatcaagaacttctgaacatctgtgaaggattcagtcttccacacttttaacgaaaaagctaaaaagcaaagtaactttttgtgtatattttaacagagattgagattcaacacttttaaatttcttattttataaagattaaatttaagcctaaataatggtgcattgcatatataggtaacagcaccaaccataatataatttattttattttcttatttctttatttattaattttaaattatgattacatattgtgaaaatgaaaatggtttagctacaaggctacaattcaatgtagactttttctcttcttttttagcttgcttggttaatcttaacgattctcttttgtttgttctgattatttatttatttttagagaaagattttctattaagtataaaaagctcaagagaatcctaagtaaacattttccaactaaacaaataaataaataaatagaaagacaagatttgacttctgttgaaattgcaattgacttttaatccatttgacaaaaaccttaatcagaaggaaaataagtttttgacttattattccattgtaaaatccagtcatctatctcatttgtggtggttattgtatttatattctgttctaattccataattctaagtttaatctaaataattagcaactataattgtataagtttgtttgaaaatagatcttaatacctcttacaatatatacataaccatatatagatattgtaatcatatcaatataagaagctcttcttgtataaatataaataactagacaatactaaactactaaagtaatataatcacttaggagatttttttcaattttattttttattgtttcttatgattgtcacatgcaaggtttcaatctcggcagagcagatatagtattatatatatataatatagtttacaataatttaatatcaccacagacaaattctactacacatacaataataccactcaattatataatatatgattagacagttatgctttgaccattttaacccatttcaagaaatactgatatgagaaattctaaagttcatatcagttttcataccattttcttttaagatacctcattaatttttttttattattatttattctaattcaaaattaatttttcaaataacaaattaaatcctatattttttaattaaaataaaattaaataataatctaacataaaaaaatatatgattagactgattatatttctttctgtatttattcgttttcaaaatagtgttattaaaaaaaatgacaaaaattaaatttggttactattttgtagcattttacaaaatacccaatcaaattaattatttgacccaaataaaagagcattatagctcgtttaatttgagtattttgtttttttactgcactaggtcattttaaatggcatactataaacttatatacagtagtataattttttttacaaaatattccaattaaaccttaaaatttatcctattttaatgggagtttagtgcattttgttttactttttaataaataataaaataatataataataaaatttataatgtaatttttaatattgtagttagaattataaaaaaaattaatactaaaataatactttcttagtataaatttaacactaaatttaaattttaacattagaaattgcctagtgtgagtaatcttggatagatcctacttgttctcatttttattattatttttttttctaaaccaaaaaaaaaggtcagaaaagtcatagtataattttcttttctttttcctttttaaatgacttcttacaaagaataagagataaaaaggaaaaacaatagaagacaaattctaccttcggtttgatgatgatgatgactcattttcaatgaagagataatagtaaaaagacaaaaaagtccacctcccacgtgacttcataaggggccatctcacgttttctcattctactactttcaatacaaacaaacccctacttctaatttttatttttatttttatttttattttttttatttttatttttaagaaaaatggttggtcagaaaaatggttggtctattttcatattacacaatccacagtagtactagtctctgtaacagtaatcctttggttttggctataaaaacattcttattttaaagtaaaatacatacaacaaaaataaagacaaaactctttcatttgcactctgattattccttcctctgaccccaaaaaaaaaaaaacttaccccataagccaatacattatacatatatatgtataggaatagtacctcttttcagtgtgaaatttcaatttcaatgaaaaaaagtgaaaatgaaactactattgatttacatccacataaataaatgagagccttttcagatttacagacagaaagggtagtaaataaagaaagaaaggaaattatagcaataataatggaagtccttgatgaattaaatttcactgtaattaattaatgaaagtaattttgctgttttgccagctatgacccaatcaagacaatccaccttattcatcattatggtcaatattctatgtctcaatctcaaaactcacacacatacttggtggtctcttttttattattattattatggaaatagtatcttgtaattaataacattaattattattattatttaagtaaatagtgttataagtacttcaagtcttaagtttgtaagtaatatataattttaatatttattttagtggtataaatatttaatatttgtaaaattataatttttttttaattttatcagtataaactatgttattgtcttaaatataacacatataaagtctatgtattagaacattgggtctaaacagaaacatgtagtattagttactttcaattgttctttaataaatttaaaataaagtatgtattgaaaaaattgaagaaaaattacaattttacatgttggaaaaattctcattacaagagaaaataggaggattacaatcaaaatactcaaaata

SEQ ID NO: 43709 - DNA, 2227 bp, Cannabis sativa
aagccaatgaaacgccaagcgaaccccaagttgttctcaactaaagcattaatgtgagaaaccgtaaaagacttgatctgcacctcaaaatcatcaaaccaaagaagagccaaaccctcgcatttgcctttaacatccaccaaaaaacagccagcaaaacccaactgcacctgaaccatttccatttcaacactagttaaccgagtttcagacagataaatcatccagagatgatattctttgacgtgggatttaagagtatttaatgttcaagggttcccaagaccttggacattccaaaacaaggcaatcatggctctcggcgacccagctccactaggttcgctgcttccatcttagaatctagggtcaaatccaaattattagaaattccccttgatgaattacctccttctgtcttaaccatctccaacttgtttatctcgggctgtccagtaccccctttgttcttaattcgctttggagtcacctttcttctttttgtagagccttccacctgactttgagtatcaatcctagcctcataacttatgggaacctccactaaattgtaggaattagtcaaagaaaacttactctccttcccctgtggctgagattgagagctacttttcttagccattactgcaaaaactttaaattcccttctgtcatccctccaggatccacttcttttacaattaatttgcccatctgccaccccatccgtcaccatctcaatactagtctccttccctttcccactactatcaatattccccttctgaacattaatacccgatccagaactcgactcaacctccttcctaggttctgatggagaggataataaatctccattgcccaagccagtaatcttgatagtagaaaaagattgctcttccccattttggtccgaattattgggcaaccgcacggaggagtcaagaacaccattatgcataccagccttggcatccttcctttcgtccacttttaaccaagtaccatagctcggcatccagtttccaagaatatcatcaaacatcttaattggttctgcacaaacccgagtatcatgccccaaaaaaacacatttaaagcacataaagggaaggagatcatacctgaatgggagccatattttcctgccatcacaaggaaaaagaagccctggacatagcggtttgctaatgtcgcaccagactttgaaggtgaaataatctttagccacaattctagggatatcagcgttctgcacttcaatcgcctcaccagccaaattcaccaatcgaaccaagttttcctgagtaatcgaacgagcaggtaaatgaaggactcgcccacttattggaaatcgcaacagttccttttcccaatcttgaggaatactctccattctttcaagaatcaaagtaccattatttaggaaccaaggactcttaaacagaattctgtacaaatcttgggcagatttgaaagaaaagaccaggaaacttgaattgttagtgataagtttaatctccacaccccaatcacggtcggagataccccaaacacgtcccggtatcgtcttcagcagaggatgactcatcggcctgtttgaacaaaatcttgccttcgcatagtgtctcccaacttcggcaccccctgcctaattgatttcccatccatcttcatccaatactgtaaggtttgtagtttttgctagtagttcatccatagtggtttcgaacttttgcagcatttctaacggaaggctgtaattctacaggagaaagcatcaaatagtttcttttatttagctttataattctatttacatatattacaacataaatttagttatctaatccattaaatatttgtttaaatgtctaaataatttataatattgaaaatataacaataatttaattattgtatttgtttttatacgcttgtaaaattataaactttgttttgatacaataaattattttaaattttcaaaaaaaattaatacctataatataaactcttataaaatataagattaaaattaagtatatatacatatattttttatgaattatacatctcatgagctaaaataactcaaaatgttttttaaaaaagacttgataaaatgagctaaaatagctcaaagtattacattataaataatgttttttagaggggcggaggcacgttaagcttcacaagggtcatgacccctttcactttc

SEQ ID NO: 43710 - DNA, 1636 bp, Cannabis sativa
actttcagcataatccaatcttgtccagtcaagtccaatccttttcagtccaatccagtccaattctgcgtaccaaaggggctctaatagatagcttccttattttttttcattaatattatcttaccttgtgacttttgacatagtattatttgtccttttatgtggtaaagtgagtattattttacttctactttcaatactatcaaatttaaacctcaaactaacattttttgtggacacaataattattttcttaactattttaagggacattatatttgcaccctaataattaattaaggcaccttatttttgttaaaaattaatatacaatttagtagaaagatttttgtatagtaattcatacaatagttaaaaaaaatgacaacaaagtcaaataggccattaatttttctttttttctttctgtgacaagctattaaattattaattaagttttgtttacgtaaaacgggagaagcttcgccgagtaaaagaaaaaagaataaacacgcacataatatcgcaagttctcgttcaaaatatcgtgggtggtctagaatcgacacgctcatgattgggacccacagcgagatttgggccaactagcgttcggctgttcagttggttacccctgcggccctcttctctgacaactgtacctaatgatttcacaaaagtgcgcacccgaaggcttacaatagcaaaagtggcttactttagagagtatacacacggcgtcgtttttcatctctttcttgccgacgattataatagctgcctaccaaaaattcttcttcgcaataaacaaagacagccatgaaaccacgttgtctcactgtattatgtccctgtttcgaaaatttcgtcacgtgacaattaaattaattccgaaagatatttgctaaccataatttattataggattgataaataaataattaacattatattttgaatgaaataattaccaactaataataattaataactaataagtaatatgtttacgtactcaagaatcataatgcatgccactaattattcttttttgctatataatattatataaccaccaaattgcaccattccagcctttaattttaattttttgtgcctattttgtcaaagattttgaatttttttcatttataaattttcattatttttattttgtttgagggtattcatttataaatttttggtgtcattaatttagcataaaataactttaggtgcttttatgcattctatacaaaaaatacactgatacaccttttatttatttcggcatctagaaaaaatttttagtctaactttttatttcatattggtgtacgttataactataatgtacaaactgtctatttcacacgagtataaaacaaaatagtcactcctacaacatactattttgagccttatttttggcgtgttaaattttctaaatttcttaaaattttatagtatgtctatatgttatagaattttccaataacttttattgtctcttacaaaaaaaaaaaattattgtctattttgcatagtcaattgattttggtgaattaattatttcaaaatactgctaaaatcgtttcagtaattgaacaaatgttatgtttgatgtgatttt

SEQ ID NO: 43711 - DNA, 2166 bp, Cannabis sativa
tatccatattaaaaaaatgatcagttctttcgatctaacttcaaagtaaagggttagttcccaactgtatgaatgccggagtgagctgaacctcctgcttctggtgttccttggcctgtggcccttgctggagtgtgagatgccatggcgttggccgatttcttctctgataccaagtgaagaaaaaaaggtaaaacagataaacaatagcagaggcaatgaatgaattctcagctcaatgagcatgagtgattgtattgatattttatactcattacagaattggcataagccattattcaattgacaagtgtctacaatcattgacattaaaatacccaacaatatggaatgttaagttaacactaatcacacctaatcaccggtcagtgatatagcaacaggttgcttgtcctaatattaacactgtatttttcatagacagattgcagacctttaaatttgattatggtctcaaggaactcttcagctttcaaaatttctccacctaaacagagagagtttgttcttttaaacatgttgaatcacagcgttaacagctgattggttgagaggttgcctcatgtcacataaaagtggtcctggtccaatctaaatattaaaaatgaccagttttacaacatctgaaaataactctttttttaacatacaaaagatcagtctgttaaatcagtttgtatcatttaaataaatataggaataggtagacaatgatatttatcctggtttggtaacttattacctttctttgcatagctacattttgaaagaactttgaaatttgtcaccatcttccttggcctgcaaataactaaagaataaataatgttctaacttcttcaaaattaaacaaaaccaattacccatgatctcaaactggaaaaaaaaaaaagcatcactactgcaaataaaagatcaatcttcattttggaaccaatagaattataaagtgagcaagttttctgatcagtgtagatgtttctatcttttcctgaaatgtgaagaatgaaataaagaacagatgagctaaaatactgtcatggacacaaacagaaagtgctttattttactttttattttattttaacatttgtcttatggcttaatcgatctataatgctcataacagatacggccaattcttcgtaatctttctgaaagaacatatcaatgaagagaagcattgttagacagagcagatattgaacacagatcaaagatagagatcattaaaaagttaaaaaccatactttatcatcctcagatttgcaaggacctgttcttgctgctagtcttatccaaaatccctcattaaatgccaagacattttggacaaccagtttttgaataataaaaaatcactcaaataaaaataattttcaattaatattacttcagttagaattctatgctaagcaaaatgaaaagtaattaaatttattctcaataccaatatgtgaatgaaatatacttcatttggatttgcatcagcatcttgactgactgcacatatcaaagttctcttgtttaattaaaattcaaataagcaattttactatctaatgaacaatcaaccggattccatcaaagaataattatttaaaatgaaaaatgttgcagcatatcaaagaaaatatcacatctatagatgcagatcatttataatatagttggcctttaaaatccagccaaagcaactaaacagtaaaacaattcctttttaatttaacaaaataaaaggataagaattccctagactgactaactagagcagaaaaacaattacacaaacaaaacaggaaaagattttggttgtgaatgagtcattttggcctgtgaatgtgaaaattattcctattggcataaacattatgttttgaaacacccaacatatgaagcaacaactactaagaacagtcctccatttaaaaaggatatcacaaggcaatcaaatacataatatataaaatacactaaaaaataacgagtcaaagcatatgtaaatggaaaatacctcatctttaaaatcagcatagctttgactattccaatagaattttacaattttgataacattaaagaggcgtttggttgggaggaatgaaaatataggaatgggaatgagaatgggaatagaaatggaat

SEQ ID NO: 43712 - DNA, 2223 bp, Cannabis sativa
ggaggaggtgggcatatcacgagactggagagctaggtggtaagcagtcttgactgtaaagagcccggtcacatctgggccccaaatcatagtatcattacaattgtgaccagaaataggaacctacaatatatcctccaccaaagtactatcaaaaaaattgttcaactttcttctatcccaattcccagaaggggaaataaagaaagaaagaaactgagagggagggttagaagtgaaataggttttaaaccggctgccaggaagccaatgatcctcaagtgtacgaatactcaacccattacccaccttccaaataaggccctgcttaaacaatgcacatccccatagaatgcttctccaagaaaaggaaggcctatgaccgagaactgcctcaagaatagaagaagtagggaaatatctggctttaacaactctacttaacaaagagttagggtattgaaaaattctccatgcttgtttagaaagcatggccttatccttagactggcaaacacttgaccaattctccatgcttgtttagcaagcatggccttatccttagactggcaaacacttgaccaattcttccaatgaactttaggtgattctgtagaagaaccccactaaaatttagaaatcagagattcaatttctttacaaatttttgtaggaatgcgataacaagccatggcataagacggaatagcttgaaggacagccttgatcagagtttcttttcctgcccgagagaaccatttatgattccaggaagggataatattggcaaccttatccttaaggaaagtgaaagcatggtatttaacacgagatagacattgaggaaggcctaagtatttggtaataaactccctatcctccagttgaaaagtttggaaaaagagacttcgaatctcatgactagtattaggggagaatagtatagaagatttgacaaagttcaccatctgaccagaggctttagaataaatagatagaacatgacgcaaagtctcacaagattgctgatcaccagtgcaaaacagaaaaatatcatcagcaaacaacaagtgagtaatagatggtgcatgccgagaaatagcaatacccttcaaaagttccttattttgaaaatcttgaagtacagtcgaaagaccttcagaacaaaggataaagagataaggtgaaagaggatcaccctgcctcaaaccacgagagggcttaaaagaccgatgaacttgaccatttatggaaaaagaaattgaagcagtggtcaaacaccgaaagatgagcgagacaaaatggacaggaaaattaaaatgaaacataagatgtctcaagaagtcccattcaacccggtcaaaagctttggccatatctaactttaaagcagcccatccccgcttacccacagtccgattagtaaccgcatgcactagctcattggcaatgaggatattgtcctgaataacacgacccgacacaaaagcactttgacagggagaaatgattttatccaaaacttttttaagacgattagccagaacttttgaaataactttataaaaagtggtgcaaaggctaatgggtctgaaatctttaagagcattggcatgctgctttttagggatgagaacaataagggtagagttgatcttagagaaatcacaaccttgattaagacaagcaagaatagccttcgtgaagtcagcccttaaaacagaccagtttttctggtagaaaaaagcattaaggctgtcaaaacctacagctttatccccagagagttggaaaacagctttcctaacttcatcagcagtgaattcttgagcaagaaaagagatttcaggatcatctaatcctggacccaaagactcaaaaatataggcggcagcctcaaggtcactaccttgtgaggagaaaagatttgaaaagtaagagatgacaagctcagcgatgccctcttcagtgttaatcactaccccctcgtcatctttaaggtattttattcgattagatttcctacgtgaagatgcatgcttgtgaaaaaatttcgtgttacgatcacccgccttaagccatcgagctctagctctttgcttccaatagatttcatccttgtaaagcaaagaatctaacctagactgtaactgggtgagtttagaattgtcccccctagtaagcatgtccttattttgcaggtaattgatttcctgcatcaac

SEQ ID NO: 43713 - DNA, 2792 bp, Cannabis sativa
gggggaagctaaatagttgggcatgagtttatgttcccagtcattggaaattatggtatcttacttgaggagatgcattttatgttcggcttgtagatacattggcaggctatctctgttcctgatccatttgatgttgtaaataattctagttttaagcaattagacaacagtgtaattacttatacattgaagggtaatgagttgaaatctgggtgattttattgtttgcttgtgtgagttatagagcaattgctcgaattaaaataatgagggaggtaagaactgaagtaatgatctttaaatgatgaatttgctgtatccgtgtagtcaatctcaccgggaagaaatctacaaaaatttaaatatgtgtactatgtgaactgtttggttagctggtcttacatttgcttctactgtggctacctcatcgctattcaattatttgtgtggatgagatctttgattttctatggtttagttgataactaagacttatctacaaccaagtataaatttgtgtgttattttattttcaatttaggagcatggtggggatctcaatgaagctgtgaatgctcattttagtgaaggagacaggggcgcttcagccaagtatgttatttactgtaactttcttttcttttttcttttttcttttgaataggtgctttgacataatatttcttgttcattttcttgattttgtatttctttctgaaattttattatcacatccagtgtcaatgaactgccagttgctgtccagaatgatttaatggatattgatgaaccagttcaagtcgaacagtggcctcctctgtcacgtcaaccaacaaatccgagtttgaatcctttttctcttcttggtccagcctttggaagaagcgtatttgatagtgacttcacaaatcctcaacctcttgttactcatccaagagaggtgagacggatccccatagaagtcagggatgacaatcaaccatctggtcggtcaggcaatgctcctattattgaagaggtcactgaaacagtggactcaccaattcctgaaactcatgggactgtgattgttgatgatgaagatgagattcccgctgggttagcagctgcgcaacggagggagcaaattgatgacatgtcaaatgatggagctcgtgatcggtttattggacccccagttcctcagtttggtgacttgcaagatactagtaatgacattgaagaacaaatgatccgtgctgccattgaagcttctagacgggaggttgatgaaagctttccaaatgagccatttggggctgaaagggtatgttctaaatcatcttcacattcacattagctgatgaatctcgtttatgttggctgatattgaaatttatgctttagctattaatgtatgatgatgttgtcatcttaatgcaggaggtaaaccgtccagaacttcagcaaagacaacctcagttagatgacactgaacttgcgcgtgcagtttctttgtcattaaaggtctgttctatttaatgtttcagttttcttatgtgataaatattgtcggtcttattttaatgtgaatggaatccagactgcagaacaagagaaagcattgcgtgagctggaaaggaatgtgggagcatcatctggagtttccaaaactgaagaggtggtggagttgggtgatatagcagcaacaaatggaaggtacagtcatgtattgttacattagtgtcagaatgatcttacattttcgttatgatgccttctttgtgtcttggtctttgtgcttgtgttcattaatgttggagacaaatggtctaataacaatgtgtcgtgtgaatctataggttggagggaggaagctcattcattccagatgaaactgaagatttggaagagcaacctcttgtaaggcatagatccaggcggatgtcttcaggttctgtggaatctgcccaagaagttggagttgctgaagctactccaccattgagtcctagacaacccattaggagtactagtcctcaacacaatggcgaggcctttcaatctgacgatgtatgctactttgttctgtatgacattagtatttcaggttatagtttgatcaattgtgttggtaatttagtcacattttttatccttgttctttaccaaaatgaagtggggaggtatgtcgtccttggaacatgatgaggctgtaatgcttgaggctgcaatgtttggtgggattcctgaaggaactaattatcgctttccgtatgctgcacctcatcagttcattcaacctgatggtccttatccccgaccttttcctcggcccccttcaccctcgctgactgcgcagcgcttgatacgtgaacagcaggtctgatgtctggagaaatttgttgaatgcattgttctgaaaatagtgtttctaatttttttttctactggttttataccgctttcaggatgatgagtatcttgcatcactgcaagcagacagagaaaaggaacaaaaagctaaggaagaggccaaagcccgtgaagaagaagaaaaacgaagagaggaagaatctcgcaggaaattagaggaggagcaggtattcttaattgatgcatctttttcttatgatgatactattatcagttgttagataacagaaaatcaatttaactatttaactacagacttcttgatataattacacttatatttctcaagatgtttcaagcattgtccaatttcctgcttgtctgtacataaaagctgctcttgacttttatgataattataatgactgaactaa

SEQ ID NO: 43714 - DNA, 2696 bp, Cannabis sativa
atttaacagaatattctttttatttttaagtatattctgttaaaccaagaaatgccgttaaataggcacttttaatatataaagatataatgtattattatatctgaacctatataaagtttatgtttggtttggtttgatatgcataatgaggttggattggatcaaaacccaaaggcttttctgcatgaattggaaaaagaaatactactttgaatattgaaacttggatgaaaattgaacattgtgtgccccataataaacttactggttttttttggatatatgctatgtcccaattccaatgaataaaagagatatttatatttgcaaactatggtcaattgacttgatgaaaccaagttgaacaaatcacaatctgaaacccttttcaacagagaacatataaagaaagatccaagttaccagccaacaaacaaataatatttttagcataaacttttctcaatccctcaaatgcttgagatatttttagaataatatttcatgtcttgtctgtgtgtgaatgcatcacactgaaacttgtacatgaacaagaacagctactgaactggagtatttaacattttggactatgaattggaacaaactaaacaactttgttctttcgagacagtgaacaatgaaaatgtagaaaattatcatgcaaaaagaatgcaggaataataagctatatagccgttatagagtgagtatttgaaaactccgtctctatgacaaaaaacgtattctccgcatggctaccacgtctatatatctgctgcaagaaagttcccagacaatgctacctacacgaagagataaataccgattacagatataattttacaagagtttcggtaaaaaatagagattttgatttcacaagtaccttctcgcccagtttgaatggaggaagacccttgtatggacatgtactgcaccgaaaagcatctcccagtccacactgcaaatagtaccaactttgttttagagaaaatcagaataataaatgcaacataagcattaagaaaagtgttgatagaaaaataggccacaatcatgggaaaagattagccttaggttctactatgctaaaaaacaaggagcacaaaccaaacacactgctactatatctagttaactctcttttgctagagaaatgtagtcaatttggttgtcccaaggtgatattgaaacaatagcttagtcactttaataataaccatattgggtaaaagaaaacatcattgaaatcgtcaaaatatgcattacactgccacaggctgattgaggattgtttagtagctcatcagtcaatcctaacttctccactttctcctcggcttctgctctcccacatgtgcaatttttacaagctttctttgtagctccaacttcacaatccccaactgcataagccaaagggtacagttaaataagagtacccttaataagaataattcgcaagatattaaattttggactatcatatgtacccggtggaagttgaggtttcttcaaatcctcttcagttaataggctatcctcatcaatcaaatctgaatcatcatcgtcaatctgaactactagtgagctttttggagccttcttaatggcaaaggatgaaccaatgttccaagaaggcttcttagccttaacctatcatcaacgaaagaaatgaaatcaagttttggtcagcaataggcaatgcaaaaagagtgaagttttcaatcaaggtaattaatggccagcacacaaatttcaatgctgctcaaattcacaatgtctcatcattctttcctctgtccataaccaataattacccaaaattgcttcgtcagatcaattttaatttggatcaatctttgaaaagcaagaaactcaagaatatattttggtaggttccacggaatccaactacaattgtgattaaccctcaacctacccctcctggttgacaatcgataatggttgaaaagctgagaaattgaaagttctctgtttataacactgaaaactcaccagaaatgacggcacatcaggtgccaaaattgattttggtggaagtgaatttgtttcagagaaaccagacaatagtaggttgcgctcaatagcaaaagttacctacaagagggaaggaaaaaaaatggcatgttagtctgctaagcaaaatcagaatcagtccagcgagtcataagatgcacatattaattactatatctgcatcctcgatagctgactcagaatggcaaataaggattgttccaccaggcttcaacactcttaaaatttctttaaacagttggtcagtgggagattcaggcgatctacaaaaagatagaacgatgtcgatggaagaagattctactggcaaccgacctgcagtcagtgaagacccaaattaaaaaaaaaaaaaaaaaagatcttatatatatacaagcttggactcaaaaaccatcccaaaatcccttttacatgtggtcagagaagggcataaaactaaataaataaaagatgagaaaaaaccaaaaggaagggcataaggataacttgagaaaccagaaactcataagacaatatgtaaaaaataattaaccattcacataatatccaatctgatacattgggaacagttttagtaattaaatttaaaatggtaatggaaactattgcctttaatagtaaaacactgg

SEQ ID NO: 43715 - DNA, 3664 bp, Cannabis sativa
  modified_base (27)..(28): a, c, t, g, unknown or other
  modified_base (58)..(59): a, c, t, g, unknown or other
  modified_base (85)..(86): a, c, t, g, unknown or other
  modified_base (113)..(114): a, c, t, g, unknown or other
  modified_base (143)..(144): a, c, t, g, unknown or other
  modified_base (171)..(172): a, c, t, g, unknown or other
tttattgattagtaaatctgattatanntattgattagtaaatctgattataatgaannattagtaaatctgattataatgaaanntaaatctgattataatgaaatgagttnnaatctgattataatgaaatgagttttatnnattataatgaaatgagttttatttagnncacaaaacccaacagtttgtgcattgttatgtcaaattagctagttgtgagtatggtttctgtgcaacttttgtttatgggatcagtaccatagataaaagaaagagcctttgggaggatcttcttaaactcaagatggttgtgaaaccgtgggtagtgcttggagatttcaatgccatcattaatatagatgatcgagttgggggaaactctattactttcaatgacactcatgatgcatctatgtggcttgctactgccaatgttgaagtcatccctagagctggttcttcttttacttggtctaataaccaagatggaacaagtagaatttattctaagatagaccatgtgtttgctaatgaggattggcttgatgagtttcctaatgttgaagccttgtttagatgggagaccatatttgaccattgctcatgtattgttagaagtgtcatttcaaacaagattggttttaaacctttcaaatactataatttatggagttctcatcctgagttcaaagaaacggtgctcattagttggaagaaaccaattactgctaagggtgttcaagctatatatctcaagttgatgagattaaagcattgtcttagaaagtttattcataatctcattggtgatatagggaagaagtttcaagaggcaaagtcagattttattgaacctagaatgcaagctcaagctcatcttaaagaagccagattccttgataaagaaaagaaggttgctgcaacttttcttatatagaaaaaatgtatatcagtttttgaagacaaagaagtaaggtaaattggctccacaaaggtgatgaaaactcacccttttttcatgcttgtttaaagaaaagaaaattggaaaacaatatcactaattacactaatgagcagggagaaattgttgataattacttggaggtggtgaatcattttgtctctcattttcaaggtatcatgggaacaagaaatttggtttctatgggattaaatactgcctattttgatcatggaactaagctagaattatgtcaacagctggggcttttaaaacctttctcataaaggaaatcaaggtaatttttttcagcatatcagaggttaaatccccgagaggtgatgggtttggtttggttttttttttgaaaaaaaaactttggcctgacataggagctgaaatatgttttgttgtcaaggatttcttcatctctggttctatgcctaaagagcttcactcagctcttatttctctagttccaaagattgagaatccttcaagagcaggggacttcagacctattgcttgttgctctacaatctacgagtgtaattctaagctcttatgtaccagacttgttgtggtgctccctagattgattaatcaaaacaagggtgcattcattcaagatagatctattgcccacaatgtgatgattctccaagacttgctgaaaaactataacaggaaaaacatttccccaagatgctccattaaaattgacataagcaaggcttatgacaatgttagttgggattttttggagcaattgttggttgcctacaactttccccagaaatttatttagtgtattatggtttgcttaagagcaacctcctactcaattgttatgaatggtaggatccaacgcaaattcaaaggagagaaagggttaagataaggtgacccaatctcacctttgctttttgttcttatgatggaatatctatcgagaaggcttcttatggcagcagacaactctccctatagattccatccgatgtgtaagggtttaaaaattattaacctttgctttgcagatgatcttattttgttcagtaaaggaactaaatcctcgatcatggagctaaacacactcttgatgagtccagcatagtttcaggtttgcacttctaaaagatgttcaattatttgaatgttcttttcctctcaaataccttgttgttcccttaaggcctactaaatggagctaaggattgtggcatcatcatcaagaagataaaataaagactgcatacttggtcaagtaggcatcttttttttgcaggcaaagtgcaactgatccactcagtcttacttggtctccgaaattattagatgaacatttttgttcttccacatagtatcacaaaagagatagaaaagccgtgtagagaatttctttggggaatgattggaaacatgagtaagattcacattacttcttgggataaggtttgtctccctcaaacttatgatgggcttggctttaaagatgggataaaatgaaaccagactattctagcaaagtacatatgggctatatccactaaataagaccttctttaggtcaagtgggtggatagtgtctacttaaaatctgtttgcttctaggcctatgatcttaaacctgatgttaactggtattggcggtaaactatgccacttaaggaagaaatttgagagagttgaaatcattaagacaggatccaccaatcgattcaaaaccaactggttgtataacagtaggttggatcaaactccggtcagttataataaggctgtttggagttctcttactgttcataaacacaggtttattctttggcaagtgatgaactctcaccttctcactagggataagatgtctcgatttcaaactatattgaactcgatgaattgtcttatgtgtgaaaaggttgaagagtgtcatgagcacctatttttctcttgtgttgtgtctagaaattttggatgagatttttcttagacgagttacaatggctgtccgattgattactctagctggtataactggattgttttggctggtctttcttggattcataagatcaacatcatcattttggcagtagtgatctacaatatttgacttaacagaaacagatgtatttttaatgggtattctaaatctctgtggtattgtaaactatgtaaagaatattttaaagtatagattacaaactgtaaacagtagaaatatgaccaaacaggaaaaagacaacctagtaagattatgtaataggtagttttagttttattttttggctggtcagtctaggttggctggtctgattgaatttgtttgtacttgactctgttgattaatgaagtttttcttttttaattaaaaaaaaaaaaagaaagacaaggttttaatttttttttttaattgtattggtttttgttttctaataattattattgttttttttccttgatagtaatgtgtattggtcatatgataagaaaaacaataatagctaaaaaaactaaagaaagtgattgacacacaaaaaacggggagaaagagatgatagtagtttgactttgattaaagtatcaatcatgtatatacaatgtgatttttatttaaagtatcaatcatgtatatacaatgtgatttttatttaagagcatgtgcaatgaagatggaaataagtggtgtaaagttaaaat

SEQ ID NO: 43716 - DNA, 1630 bp, Cannabis sativa
ttttcaaaatgtataaatttttaaaataattttttttttttgcacattttttgtaattattttgtttttgttgtacatttatgaaaaaagcccttttaaaaactgcatcagttagaatttaaatcaatttaataattgttaatttaatttttattttttaaaaaagtgcattttcatatttggaaattataaactatatatcaatgattagaagctggggcagcctaattccaagtcttcataattgggaccatgttttgtgccatatatgaagatatctaattgtttcacattatcaaactgaaaaataaaccctctttctgaaaaatatgcccctatttatttttattttttccagttcttcatttgaaaattatgagttttgttaaagagacacattctaatttaaacttttaagttatgaaccacagtgagagcacagaattagaggcaattcaagttgaagttgagttagtttcttatcatatttcctacatattctttccttctttttttggtgattaaaattataattgaactctatgctataaatttgtgtccatttagcaactcatttatcaaatttagtcataataacaaatgctgtgttaatttttttttattattttttttcagtaagttggatgggatttttaaccatgatcatcttaataagcaaatttgcatgaagccaagaacaagaataagattaagaactggagaaattcttgatccacatgggccttaccttccaatgttgaataaggtatttttaggttcatgggtgattgcagtgttaacagatcctctgtttttgtacattacaactctggatgaggattaaaagtgcctcaaaatggactcaaatttgaagattatagctcctgctttcagatccattacagatttcttttttcatttttcatattacttttcaacttcttgttgggtttgtgcctaaggggtatttggatttcaatggaaaagggtttctcaaatatgttttggaaagagctacaaagattaagtggtcatatattttgattgatcttccagttgttctttcagtcccacaggcagtttttatgcttatttattattgttaaatattttaatctatttaatgttcaaacaatatttatctaattattaactttgtataattgatcatatgaattttacacaaggggtaattgatagaaatggacattaattaatttataatgtcactttattttcggattttttttttttttttttgtaaaataacttctatgtttgggtgtttgaaatttatggccgaaggtggctattggacaatattgtccaatatggataaaatgtaagaatattaagccatatataagaacatgggctactccactcattgctaattggttttgaaatagaactgggggtgaaaatcagtcggttatggtcggtttttacaattttataaccgaccgtttagaaattataaccatataaaaccgaccgtgcggtttttggcggttttcggtttggcgattttaggcggttttgacgattttttggttaaactatttttttttattttaaaaactgaaaccgaccaccatgtcaaacgattctaatcttacaatacatacca

SEQ ID NO: 43717 - DNA, 2137 bp, Cannabis sativa
aacagttatcaaaaaaaaaaaaaaaaaaaattctaagaagacttaaatttgcatggtcaaacaaattgcaaccacaccctgcaaaatttcaatttatcaagaaatctatgtcgtagtcctttattattttttttcattctatttattaaatattggaggaagaaaatttaattcatctatatatatttattttatataacttgcagcctttatttattttatatttttttctagtttgactagtttatttatttgtatttgtttttcttacaaaacaaatttttgtatttgtttgttcttgaagccgcctgattcctattttccttctttagcctccttagaactaaatcacatgttttttttttttttatataaatagatgattataatcacttatacgtactacatagtaactaggctacatcaacatcaccatcaatatgtgatcatcaattacttaataactaattatttattcaagttatttataattttcctataattattggtgataaattaagcaaaaattaaagccaccgtacgtgattacaaaaaaggatgtgtcatcttgttactctgcatttgggagtaaaaacaatcggttttaaaagcacatattgaattaaaataaagcatgacacaaaatgcaattttttttttttggtgaaataaagaagatgcaatttcttttaattaattgcaatgcccttcttgcacgtgaaaattaattgcaatgttttgcatatatttccaaatttttgaaaggcactaagaaaaaaagagtattaggaacgaatagctaaaaaacgactgcactagctaatagtttagtttgataggcagtataaattgttggaaagtaaaaaagctagtctgtcatgactgatcaagtcttcatattatgaatgctgagaaaatattaccatgaaaaatatgtaatttatgaaatcattttaagggctaagacataaacaaaactaaagaggaacatataactttattttaaaattgggataataactgatgaagaatatactaaatttgtaatgtcctaatttttaggaacatcacttttttttcttttttttttatatataaataagcttataataataagttcaactttaaactctaaaaacatgtttaattaaaattttgattttgatatttggtataaataaattatacattcatttaaaactttaattttataggctcttactattagataaactacattaataatgtgtgaaaattaaataccatatataagatgcataggctactcattattaattggttttgagatgaaatctcatgcatcttatcctacacactctattctaactttctcaaccatacgatcctaaattcaaatatatggtatcttagctaaaattaaactctaacgagtatccaatccaaatctaaaaatcgatccaaaaatacgagccaaaaagagatgcttgtgattcaggcttagtgagccaaaagagccgttgttagctaaaaaagccacttgtgatcgagacgtgcaagattggtgacttaaaattagccaccatcttgaggagagatattggagagtctcacataaatcactacaagaaatgtcattttttctaacacatttttgtattggaaaaagtttggtattgcaatagtaaaatagaatttacttctgatgtgttggcaaaaggggttggcaaattaacgttggtattagaacttttgccagcacaaaataaaaagcgctggcaaaaatgacttttcccagcgcgtaaatacactaataaaagttagattttagccactgcaaatgtgcgctggtaaaacttttttttatttgacttttttaccagcacagttacttttaccagcgcagtagcgaactgttttggtaaaagtgacacttcttgtagtgaataatatgtatagaaactaaataccgtaagatgcatgaaactcctctcattgccaattggttttcagatagatcctcatttaaaattaggataagttgaggaatacctcttttttgtatatatctattaaataaaaataccattgtattatattttattaaaatgtactcacttttgtgagtgggttacccaatatactctcactctccact

SEQ ID NO: 43718 - DNA, 1095 bp, Cannabis sativa
cgcgaagcgcggatctattccctattctaataaataaacaaatggggaacaaagaaaatctaattcacataaaaagacttttttctctttggaactctctggtaagtatgtgaacccgttcttctcttggtgagtgtctggtccctgctataggggttttggtccgtccatatcatctatgtggtggtttttctcttgattttctgtctaatctaagctttcatctaattaatgagagcacttattgctctgagtattatgtttattctctctctaatcttgtttgtcttactccgagcatttattgctctttgattcatcttcttcctcatattaacccaacctgtcatttctcttcactctctctaaactcttgcattaaaaaccatcttgtcatcttctattttggtgttggaaaccgtaagatggaggcggatgaaggatctattgaagctcatcagatctatttcatcattgaggctactccggctaaatttagggtatgattaagggttattggagagtcatccttaggggttactggttctacatctataaagccagatttaggtacttcactttcttctcacctcttatctattcttcttcctcattttctttactgtttaacttatttatctctgctatggatgaatttctaaatagtgttttgagttctcttgcactttctactgatgaaaacactgtttttacctttgatgccaacccctcaaataattctccagctcctattagtttactacttaaacttcacactgttaaaccttttcataggccctctcttatgaaaaccctctcgggtatctagtcatcgcaatgtagattccctgtttatgtctctgaacatgccaatggtctgttcatggttacatttggatgtgaaggggataagggtagaattcttgagggccagccttggcattttgctcagagcatcactatctttgttgttcctgagagttctttccctatcactcctaataacctccactatgtccctttctggctgcaagtgtatggcatcccttttatgtgtaagtcccatgaattagctaaatttattgcctctgaaat

SEQ ID NO: 43719 - DNA, 2468 bp, Cannabis sativa
agtcattagtccatgaagtagccaaagtgacgtactcgtgtataaaagccattattccgtgggtgtaaggacccaatgaaaattatttcatttatatttcatttcattacttttaaccaaatgtcaccttaattattagtgtttccaattgaagcactcaatgagtaaactgacgttccttttcaaagaaaaaagtaaattgacatcttttttagtgttgccaattactaacacttattatttttcttgtgtggaagaacgttatgaaatatattttgtgtcgatgactttgtgatgtaaaaaacacaaaataaaaaaaaaaattctgagcacaaaaatatttagaaaaaagtaaaaaatatatatataataaaaaaaaatctcatattagtattgaaagaaaaattgtatgaaaaataacttgatttaataaatttttcatacctgttagacacattgagagataaataaattgaatcttgtattgattaatgtggagctgttagctcattatatatacagaggataaattagttaacataactaactaacaaaatatatacatgggaaatgaactaacaaactatatacagttataactaactaatgacatcactaacaatatcaaacataaaaaaaataattcttttaattattttctataattttatttttttacatcttttttccctactaaaatttaacttccaaacataaccaaacatatattttcttttcatgtgaaaacttaaatttggtaagagtgacacctctgctttgattagaaaacttctttttttcttttaaaacaatgatacctacaagcacctctgctgctgcaaactttgatctctaaaaatctgtatgatgctttattgttatctcttttttttcttcttcgatgaattggagaaaagtaatgttaagtggataagtagttatttaaaaaatatttcaaaaatcactaaatgtgcatactaaaattattagatgcttctccataattttgcaagatttcatgcttctttcaaaatcccataataaacatgtcaaataagaaatatccacttctaaaatattatttcatcaaaaacagtatataatcatttaaataaataattaataagagaaatacattaatagaagaagaaaagcaaatgaaaagtagaaaaaccaggtgctagagcacatgatgatgatgatccagtgggctttagctgattcgaatacaatgatggagagtgaatcagaatcttcacactgcgcttgccacgaacacagaaaatccaaatcagtggcacaaataatgaaatatccttttaacgagccgaaattagaaaactttatatttaaaaatagatatagtttgggtggtgggtctgggcccaggcccaccagactctatattggccacataaaattttgtttcctagccagcaaccacctgtcaaaaccatcacccagtacctggccctccctcaccctactctagagtctggagcattctttattgtgtaattgatttttttgtagtgtggaataatggtattttacaattatatgttagcttaatagtttaaagatcttaagttcgaacccatgatctcttccttttttccatccatcccttttttccatccatgatcttaagttcgaaccaatgattttttgtaattgatgcttatacaccttcttatcttttatacatataaaaaaaaaaatcaatcaattttttaattagaaaaatatcaaattaattttacataaaaatatccaatcttttaaagttttttgtgaggctgaaaattgagttgagagatgaaaattgcctttaacaatattgaggatcctaatttatctacaatatagtattgatagttgacttgttgaaactatatttaaatttttctttattaaattgtactcgttcaacttggaatacgtcattgtcataaatttatctcaatccctaatcatacctaatgaagattcaaatcctcactggtaataaaataaaaactatatataactatttatttagtttagaaaatatttacttaaataaaaattctccataaaatacaataattacataattatgcctcttccgttcggttttttttttttttgccgttaaaaattagtacttttaccctttgaatttcgaccaatataaaattttattccctttcattaaaaaaaaaaactaattttaaaaattgaaatgttctattaattctgaaaaaaaaaaatttaataaaaattattaagaaaataagataaaaaaaatattaagtttactttaaaaaatctaaattattcctaaaaaaaatatttttacacttcatttttttataaacacgtatcttaaaaattaaactaaaattattaaatatctaattaataatttaacaaactaagattttttaaagaaaaaatcaagtttatttgtatttataaactcatat

SEQ ID NO: 43720 - DNA, 3187 bp, Cannabis sativa
ggtaaaataaatttccaacaatgtcaacttgggcgctggatgtcaacatgggcgctgaaacttgtactgccttaataaaacgaccacaacccactcaattttcattcgattgacgcgattcaactttcattttgaagctatttaagctccctatcaagtcatgtctcacaaaccagtcaaaattttaaagctattgtcgtcaaaattcactctcatgggagttacaaaaataagctccgagtaactcgtagcgagacttgccaaacataaaaaatcagacaacaccactagaatctaattttcaccgttagatcatcatcaacggtggaaacactttatttgtattttatctcctatttttgtgggcctccttcatctataaaagcagagctcccttagttcatttttcatgttcagaaaactacccacaaggtcagagcttctctctgtagactttctctctctagagttgggagtttctggtgttctctttacttgttgtttttgttttttattatttattttatctaatcgctttatcttgactcactgtcgttggctagaagtgaggtcaataaccatattaccattatttaaacaataaaaaataaaaaataataatttttgtatatttttaataaaataataaatgataatgagtaataataaattttttatttattttatatattatgtattaaaatataattataaatagtgaattaaataaatttatttttgtgctaaatttagcaaacattttacatcttgtatagagatggtctaatacatggtatgaattttataacaatttagttcaaaaaaggactcactattatatttaacttaaattttgcaattgcattttaatatataaggtacaaaacatttcaaaaaagaaaaaaaatgtataaggtacaaacaaattaatctaatttaaatcaattatatacgtttacttttataatatgagctaaaaatatatatacaccacaattataacttttatgctctaaagatttgtattttaatgttagcctctttctttttctcctaaattcgattacttttatactcttttttgaaatatcatatcaccaattaaacagctaagtaaatctaacaaaacataaagaaatgagcatttttgtacagttgtattatattagagtgtttttaacaagcgcatatgagagaacattatttggtcgtatgataaattcatgggtgaaaaaaaaactaataatattattattgttgttattattttaaataggggcgataatgtaattatattttagaggtacgatgtaagtttcttaattaattaatttagcagataataaagagaagaaaaggcatctttttcttctgacccagaatatataacctgagaaaaggagtaatcactcaccatcatcaatccatctctctcttcctcgcccttcaagccatgagtctcttcggtttgggcaggcgagtaccaattgagatctttccgttttcctttttctacattgtattttctgtttttattattattattgcatgcgatcaatcaaaattagatcattcaatgtcagaatcgtaatttttggtgtttctttctctgtgatttacagatttaatgtcttcgtaacctttgcacttatgttgatctgaattacaagtttatttggcgatttcggtttatggatttggatatagtcagtattggatactaattttattttttactgatctgtttgtataatggtgtttgttggtttaattaacgagggcatgcttttgatgttgaataataatttgatatggctttaatttattgcaaataaccatagaagtcaaaagggcaattcgatatgcatatatgtagttataatgtaattacacaagatgttttgtgtgtaattttatgttagggttgccaaaaattgatttaaagtaattgttgatatgcatttctgatgcgtgttctatgactaagttagaattttaggttgcaatagattgatacttcagggtggtgctcaacccctgacctgggaatgggatttcaaaggtcactttatccagtcagctaacgggtttcagagttataggctgcagttatagctgggattttgttaaaattcggaaaggatttatctctatttttattgtaaggaattgtagtactaagctgtgttttagggttcttagtatcaaattggttggcacaagttttagaggtcttattgctggagaactgtgatgatgaagtttttataatcaccgacctggttgatattgttacaatgtgtggaagtacattaatatgggtgaaggcgtagaaagttgtgctggggcttgaattatatttagtattcaagcgagagagaatcaagttcttttttggaagagtgtttgtgtactttgacatcttatacatacattgataaggttcctatacttgcctacttggtggttacttttgttattactattgctcttatctactcttgggttgtctgccggtcacctaattgcattgcagatgattttacattgttgttttccatcagtattcaaattgctgcagttttttattcttaagtttcaattgtttgagcagaaaccaaaggacatttcggcctaaaaagagtgctccctctggtagtaaggttagctcctttacaacttacagttttcaattatctcctgcatgatggaatttaatgtagatgtttctgtttatgtttaggctttcagtatctttagtattgagaaatctgttacactatgactgattaagactggcagtttttgttatttatttcctttttttgtttcttttcgtctcttattttcactctagttgatagtttgaagtgtctacccttatttaggagtatatcctaatctagtcttttgctatatcattatcctattcttatttgatgcagggagctcagcttagaaagcacatcgatgccactttgggtagtggaaatcttagggaagcagtaaaactcccaactggggaagacctaaacgagtggcttgctgtcaacagtatctctctccccccttattgcaatattattatctgtttagatgctttctcttctgttacatctgcactttttattgtctattatatttctgaatagctttttctttgaattccagctgtagatttcttcaa

SEQ ID NO: 43721 - DNA, 3575 bp, Cannabis sativa
tgtaaaaattcatttgtagcacattatctagtgaattaatctcataattatcattatgtttttaaacattttactccaaagaacagttaaatcctgtaattaagtctacaacaaccaccccataataaaaaaaaaaagacatggcatgtcccacaacaacatcatcattctcgacgacaaaccaatttgcacccagaaaactgagcctgacacaaattttacaattttattactattttcagagcagagaaaaaacccactaactaaaaatgaataattacatgaaatcttactgttgaagagcagaaatagcgttgtgaacttcaaaatcggaaggaacaggaccgagaccaaaataatcatcaacaaacccatatgaagtgtcttcgtctggatacccctcatccactgatacccaatccaactcatcagaatgaggccaagaagacgaagtgggcaagccatgaacggaagatacaggaacatttaacgaagcaaaaggtgaagaagaggaagaagaagaagaagctggtgaaggggaagacagagatagcttcttctgggcatgcttagggttggtggtagtactagtactagtagtagcagtagtagtactagaagaagaagaagaagaaatgggttctgggattgggccaccagcgatattagacctggtcacagctctgccaaatgaccttaccaaccttcctccagtaccaccaccgcccatgtttctaccgccgaacatgataaggtctctttgtctagataacttttgttcctacaatggaataataatatggaggaccatagtatagcatagcattaatattagattttctttttcttcaagctttgtcttttgtttgtgtatgtgtgtgtgagtgattttctcgaggagattaaaatatagataggaataggatccattccagagttaccattggcatcattttttgttttctttctccatttaaagaaactaaaaggaaaatattatctagtttcaaaagaaaatatatgtgaatgaatatctagttgtttaacgtcttcgcgacacgtgtccgacacagccaaatttagtagggtggcgagtgccacacgtggtccaattgtcactgctgcattatctaattgacattaaattgatttattttattttattattttgcaaagttattctttttttttacttgaaattcttttttttttattaattttgaaatgagaaagttcattgtgaagatttcaaaaaattatattggaaaattttcgcctcatattcgaatagttaaaatttaaatttttttatatgatgatatatgtggtaaacattagtatattttatgaattactttagaaattcataatgtaaaatatttaatagtgaagactttaactctagtttgattaaaaaattaattactgttttgttatttttattagagttatttgatcaatgtgttaatgtattaattaaactgtaatcttgagctataaataagaataacacctcagttttaactaagatttttcttacttattcttttgtgaaccttttgtaaagtttctcatagattctctctttctccctttctttctctgttctttctttgtggaaaaactttttcatggtatcagagttaattaactagcgtccatggctaattcctcaaatgatccccaatctgacactgatgttaacaatgctcctgctatggcacactctacaccaactccgatgatctctagttttttcaaatcaaccatggaatccgttttctaattccctaagctactccttagcgattaaacttgatcgtgtcaacttcctatcttggaagtttcaagtcgttccaactactattggtcacgatcttaatgatcttttgttcagcaatgtcaaacctctaaagttcttgactaatggaaggtcgaactctgttttcaaacagtggaaacgcaacgattagctatttctctcctggttgtgatcttcaatgacagaagttgttctagcatttcttgcttcacataccacatcctactcactatggaaaacacttgaacaacgtttttcaagctagtcgaaggctcggcttctacaactcaaaagtcagttgtgcaacgtccagaagggtaatctttctatctctagacttgttgataaggttaagtctatttgtgatagcttagccattgctggatatgtggttagtaatgaggatcttgagcttcaattgctcaatggattaggatctgaatatgactcagtcgtttctggtataacgtcgagtactgaatccaagtctttggaagaaatttaagccttgttgatggctcatgaatgtcttcttaagagacatcacattgtttttaatttatcttccaagatgtcagccaatctctcaatttgttcctcaaagagcagctatcatggaccttacaagccaccctttgcaagaggatccacatctcactctggatcaaaacctggtgccaagccctttcctcgatctttttttttaaatggttctcaatctttgtgtcaagtctgtctaaaattaggtcacacgactatcatttgccgttacaaatttgacaaagcttttgtcactcccaagatccttaattagcctcgtgcatacatggctgaaatagagtcaacttttgatcctcaagtttattcttcttccaccataccaaactttgttgatcatttatgcgactactggtgccacaaaccatgttgctatggtatggaacacctttccaatactactccttacgcagggtctgagtctttggatgtaggagatggtaagaaattagttatatctcatattggtcatgctcttcttcctttttcttctactcatcctttacagttaaaatatgttttgaatgttcctgccataactaataatcttgttagtgtttccaaattagcagatgataatgatgtgtttcttgagtttcataaatcttgttgtttctatcaatgacaaacaatcaaggagggtcttactgaaagggaagtgtaagaatggcctttacatgcttggagatgaatctcaatccccatcaactcttggattgcagtgtcacttaactaccatttcaaattctcttactgggactatttagtcatctgattttgaatcaaaatgttgtactcaatcttgtaatcattcttataataaacaccctatgtcaaatgattgtaataaaaatagtagcaataaaaacttagttatcgatctttcttgcaattctcaagttttttcagcttatataactaatgttgttaatgtgtggcattgtaaattaggttatccttcttcaaaaatcttaagttcattgttacactaatgatgttaactaatgatgtactgttttagattcctaatttaggttccataaaagacttaaaattttgtgaagcttgttaaaaaggaaaaagccacaaatttctatttccttttgtctacaactcgtactaatcaacccctataattattacatgttaatctgtggggtccttcatgttggaattattttaccaggatttagat

SEQ ID NO: 43722 - DNA, 3507 bp, Cannabis sativa
tcagccgcacgctcaactgtctccattctccaatcagctgctgcgcccatcgccgcgtccgcttcccgagtttgattatcttcagctgtcgaactaggccacacgacggctccgacgtcatcacattgctgatgatgtagttcatgactttgactactttgataattattatattgtagcttggtaacgatatgatcatgaggggctgaggataaattagggccataactataatcagtgtcgaattcatcttctagaagatgttgacgaatggactctagataaacattaaattctgattcaaaagtacttataatgacctcattgttagccattgactgtgagctataaaaagtttgatttctttttactctaagcttaattagaaactgtaggatgtgatcgaagcaggaatgtacgtctgatagttgcatgggttgggattattattatgtttcttccttactcattttatatatacccctagtaatattaattaataataatatattattgcaaaggcacacccacatatacacttgtcatttctatgaagcttcacttttaatcacgtttgtgcacgttaatgcttggattaatttaaatatttggaatatagtactttatgtattaaatttaatgaatctttgaataattaatatccctcgtaactttgtatttcgtcgttatgcttattttgagagtgtgtaatattcttgattaatatatatttgttagctactgtagactgtagtgtatatactacattgctagatagttgtaatatttgtaatacgtgtaaaatatatcaatgtctacattattataaccagagtgtatgaaagacatatattaattatacatatttgtcaagaacaaattctttgattagaatatgatccacgatgaattattagtttcactcttttagacaaagtggttgcatatggtattattgtagattaaaattatatatattcggagtccaatacttctccttgctattttaatactgtatctaaacgtagtcgatcagcgggagcagcatagaaagtaatccaaagcaaaaagaaaaaatgagctgggagaataaagaaatcaatgtaacattttttccacatgacgatatgtaattaaaaattatcagtatattgtatttaaataagtgtttgtcgttgagtaaatatattaatcgatcataatttgaatcaataaacaatcgtatcagaaagattcgcttttgtgattttaaaaacaagacgaatcgatctactcaacatttcaattatttatttgaaagatatcatttcaattaattgataagctaaaattcaaaccaaatgcaaatatctgactacaggttacgttttctttttttttttttaacaatgtgaacggtttaaaagctcaataaaaatagagactataattgaagtgttgctactttgcaaatttatgttcaggtgagtcctatatggacttttagaggttttttttctttcaatcaattttataaaaaagaaaactaaagggcgtaaaaatactcgcataattaaaaattgacatttaaaaataattttttagtaaaaaccttaggtatagaaattaactataccctatagagtcgattgtaggttgggaatttttcaaggttacttattaaccctatgtcgtcggttattaggaaataaccgacaccatacgtgcacacctttactaacacgtgtgcacctgccgttggttatttcctaataactgacggcataggtttatataaaaaaccctcagacttcgtcttccccacttcgccttctttttcttcttcagcaagaaataccatagcagaacccacacccacgacgaaactctcgccaatcacctctaaaaaacattattttcccttatttctacaccattttactccgttttcttttaaaatcttttattttcaatacctaaatttatacactaaaaaagtttggttttttctccttatttcactgtaaccgagtctattaaaaaaagtggtggtataaccctgaccactgatgttagtggagaaaacgttgaatatgaacgtccattaaagtataaatatgatttttattcattttattaatgtacattgctttatttttgcttttgtaatttttttgggactttttcattttattaatattatgttattgtgtgtacatggtagccaaatttttgtcgtaattggtcaccaaattgtgcctataaggtaaatatttactatcttgatatataatatatatgtaaaataatttgtgttttattgaatatgtatttatatatattgtgtatattatttatgtaaattttgttactgtatctatatattctaagtaatatatatgtatgtgtatatatgtattgtgaatgagaatgagataggagagatttaattagtttagaaataaaatttttaaaattgtgttagtgttagatataatttattatatatgtatgtatatgtgatgtttttttaaaaaattaatgtatataatttagtaattagtaacttgttactttttttataactagtaagtaattaaataattaaaattctaattttgttgtatttcattatattgtaggttgtgagcttaaggttcagaataatttggtgttgatcggattttaacttgctataggtatatacattcaccaactttttgttattataattaattatcaatgcatgcttagtggagtttgaatatcttatatattcattcatagtaaagtagattccgtgatatattgtactgctgtcagatgggtgtaataatatgcatgttagttgagtttgaatatcttaaatattcaaccataatgaagtaggttctgcgaatacatatactgcggtcggatgggtggataaattttataatgttaatgttattttatttgttttgttggttattttaagtatttttgaaaacgtccaattacagttgttattctgccaaaattttggtaaaattaggataaattttactcgaaaagcataaatattgaaggaaaagtacataacacaaataactagttaattactagctggttgtaagaaattaggtgacataatacaaataattatatacacatttatataaactttgcaattataaatgacaaaccaaaaaaatgaatggattttcactttaggaaaagttattccattcccaaatccattccaatcaactaaatactaccctagttagttaattaccacttatgcaacttaataacatgacctaaaataaaacaagaattatagtaatgtataaattaatatgaattaattgtgagaaacctagttagttacaatataaaagtatatgtagtgactagttataattagttactaaatactaaactttttttattagaatttttgttatggataaatcatggatgcgtgaggagagagacacactgcgatttcaagtaggatttgatgcatttttagagtttgcctta

SEQ ID NO: 43723 - DNA, 3134 bp, Cannabis sativa
gatcataagaaaaaatttgactaaaaaattattttagatgataaaacagatatgagtgcattaatatatctatttcaaggaggtgcatggtagaatttttcaaaaatatcattttagaaatatcattttagattttttatatataaagaaatatatataaagaaatatcatttaagattttttatttaaaaaaaatctcttaaaatgatacttcaataaaaaaaaaaaaattatcccgaaaatcccatattgcatgatgggcttgtaaacttttttgttaaagtgagctttctatattgggctctagggagggagcatcgggccgggcccgtaagattagcccaatttgatttccctctcaattcacagttttctttcttcttctccattttctggaacttagacctaattcccctgcaaattcaaacacactactttctgtttctgtttaaactaaattcaataactttccttcttttacaatcctgaatccattgcaaaaacctattattgcttctttttctctcgaaatcacaccataaattcttcttccactgcttcaaatgttgatcagaaaaacattcccaataactactttccatggctacatcaagctcttctcatctcttccttctttggaattggatacccatttacgttccctttgtgaaatccccaattctcaaattcccgaagcattttcactctttaatcgagctgtggagtctcataacacactcccttctccttcaacatgcaattttcttgttcacgcattttcaaggtcagggaattctgatttagcttattatgtttataagaaaatgacccaattttgtatttttccaaattttgtatctttgagttgtttagttggttgttttgttaatgcccaaaaacctaatcttggacttggtgttgttgggttgataattaagcgtggttttagtgttaatactattgttatgagtcttttattaaaggggtttaatagaaatggtgaatttggtaaagctattgaggtttatagaaaaatggttagttatggtttatcaccagatattgtaagttataatattcttataaattccctatgcaaggaagggaagcttaaagaatctatggagttgttagttgagatggagaattcgggttgtgaaccaaattttgttacttactcaattttgatggatggtttttgtaagaatggtcaagtgaatgaggcatttgggttgttgaaagagatggaaaatcttggtttagaagctgatgttgttgtgtatagtactcttataaatgggttatgtagagaaggtgatttcgaaaaaggaaaaaggctctttgatatgatgcttgcaaaggggatttctcctaatgtggttacatatggttgtttgatacaccagctttgtagaattgggaaattgaaagaggcctcagagatgtttaacgacatgatggggcgtggaattaagcctgatgttgtgacttacactggtttgatcgacgggctttgtaagggaggattggttgtgaaggcgaaggaggtttttaagttgatggcacttgagggtgaagagcctaatactgttacttacaatgttatgattaatggattgtgtaaggaagggatggttagtgatgctttacaaacattggatgagatgttggagaagggtttaaggcccgatgtggtttcttacaacacgttattaatggggctttgtagcaatgggaaggttgatgaggcaatgaaacttttcggtgttttatctaaggatgagagctccattgagccagatgttattacgttcaacatgctattgatcggtctttgcaaggaaggtcgtctcgatgatgctatggagatctatagtaaaatggctaagaggggagtggtgggtagcttagtaacttataatactttgataggaggttatctgcagatgggtttagtcaacagagcaatggaattttggaaacatgtcttggagtttggattggttccagactcagttacttatagtgttatgattaatggattttgcaaaatgcatatgcttaatattgcaaaaggacttttttgtaaaatgaaagcttctggtttcagcccttctgagattaactacaatacaataatggcatccttgtgtaaagaagggagtgtggagcaagctaggacattgtttcaagaaatgaagaactcgaatcataaaccgaaccttgtcacttttaacacaataatcgatggaactttaaaatcaggggacataaaatctgccaagggattgctaagtgagatgctaaatatgggatttcaaccagatacactaaccttttccacattgataaatagattctcgaaactcggtcttatggatgaggcgaaaaagattctcgagaggatgatcgcctccaatcttccaccggattcctttgtatttgattctctattaaagggctattactcaagaggtgaaacagaggagattattgagttgcttcatcaaattgcagataagggtgttcttttggacacagaacttacttctactatcttaatgtgcatctgtcattgtacagacaaggttgatatcatggattttctcccgaattttgctcaagaatcatcaaaaggaacaagtatcttaagcaatgacttgttgatgaaacttgatatcttacctaccaacacttgacttgtgttatgaataaacaagttttcatctcaagaaaatctttaattttagccttttgatcatgtaagtgtgtcatatattttagctaatcattttgttaatatcttgtgtttagctctagttttctctctcaatatttttttttattgtaattttcttttctgagtataatttctcaaatctattggatttatgaaaggggttattttacaaatacacaaaaataacaaaaaaaaaagaaaaattataaaattactattgtacgaaattttaaatatttttacgttttttatgattttatttacagtcttatgatgtatttttatgttgtacatttgttaatttgttattgatttttttatttgtatattactttgtgttgttgttttgatattttttggatgatatttttttattatttttatgtagtttttt

SEQ ID NO: 43724 - DNA, 4245 bp, Cannabis sativa
tccgattattatcagctaaaatagggtagattttgctttttgtccagggttttgtctttatgatcgtttgttctcttattttctaattataaagacacattaaccgatggaaatctaatattgcattcaccttccattgagtaaaattttggtgatcatcagactaacatatatttcgaagctgtagctagctaggtactcactgattattctctgttaccttaccattattttctcagtcaagaaaaaaaagtcatcatgttatcttttatttatttatttatttttactttaattttttttttttttttttttttgcgtttacatattgccaagacataaatagttgcacaaaagaaaaattattatatatttaactgtcatgtaaatttatttgtttgtgttacttaatcaggtatataatagattagacacccactctacaattgatcagaagactcaaaaatatattcttttgcaaaacaaaagattaatttatacaaatcatttggtatacaatatgattaatgataatttttttacgacaatattgttaatgatatgaacaaagataagaactagaaactgtaaatgacaatgttgttatgcaatttaaccgttaaaacagaattagtccacgagtttttaaaagctcttcaattccattacagttaatttgcaatttgacagtattttggcacgcccaagttggcttggttcttacaataaatcactaggcctatttattgatgacctgagcagaagtgcaatctggaaacttgtgaccgtaaatggattcaagtaccattctgatcgcctctttcatgatcttttctataggtagagctatatgatgagcggattagaccgactctcttcctgttgctcaaccagcttagtctaacttgattttgattgtttgctgatcactagtcaatgaaattactttctttcaaacattagatttttcaaccatttttgcaaattggatttcttgtaatgagtcatgacatgcatgggagtttaagacttgtcaaatggatttgaagtacattagaaagtctgattaactagctaacatggtcttttacaaggagaggaaatgtgtaaccgtaaatggagataatgatgagttggatatcgttcttgcttgtcacacaaataaccaacttttttttttcgaggaaattacttctcgagaagaacttctcgagaggttttagatatactagtcgtgacgagtatatctaaaatatttgttcataatcacatgtgccaaaatcatatgcaacactaggcgtaaaaaggtgatcaacaacacaagtgcttagtgcatgtctttaataattattaaaaaaacatttgatattgatgtacctcaatttatggtcaaggtttcatgtcatcattcataggtgtctccatttatgttttacgtcaatttaaaagaaaaaaaaaagatcttttatttaagattgtcataaaaaggaaaagaagaaaaagaaaaagatgctcttgtctaatgtatggtgttattataagaacgaggaataaacataatgatggaatcgtatctctgttattataactcgggaacattcttacactacattaatttatttaaatgcatttaattcatatatatatatccataacatatcaatattaattacctataattactttattttaaggagaaaacgtagttgaattgggttgacacgtgtgaggttagtgatgtagaaatgggttgtcaagcacatgttaatgatttatagttttctgtctttgcttttatatattagagggaagaaaataaagagtgtgagaatctagggtacgtgaggtgggcagtgattatctgggaaacccaacacagatttgaatgtgaggattcagtaatagaggtagctttttcatcagctcagcttgttctgttgtttgtattcatatttctatattgatttgggtcccactaaactctttctctcttggcaaaagtgactttgacagctctctttctttctttctttctttctcttggccagaaaacccttctgtcgctctcagtctcacgtgcattgcatagttatatttcaacgcaatactacaatacatatatttaccatgttcttttttatgacaactacatatatattaccatgttatatatatcagtaaaaaaaaacttcatattcgaaaccttttcttcctgtgtttagtaagaattaaagaaattaagagaggtagaaagttcataagaaaagaaaataggaaggattaataaaaagaaaatatattttttaaaaaaattcttatatgaaaactattaagctaattaaaatatatctctcgaactaaaattgaaaattcttccaaatttgtttggtacatgtaaaagtttagtttatatgattttaaattttgtatactaattattagtctaggtaatttagtgattgtatacaatttttgtcccattttattttttctactttgggtggactccacctttatttgcatttatctatttttctcttctatcaaacgcatttattttattttattttttttcacaagttttattttcttccattttttaccacacaaccacaattttttttctatctgttaagtatttagtaaagtgcataataaatatacacattttagaaaatgtattgttactgggcatactcacataaaggcgagaggtcaattactcctaaaaaaattaaaaaaaaatatataaatgtattttgattagttacaacatatttacaattaaaaatgacaaatataaatataatatttgcttttgcatgatggttaagttatcttacacatattatagaggtcaagagtttaaatcctacaaaaaaatatttttacttttaatatttagtttattttttgctcttttcataaaaaataaaaacagactataatttagatttttgccctctaaacttttcaggtcgttaaaaattttctccaaactattaataagattgctaaatttaaaattttttgtccaattttactaatgaaagtctggcatggatgaaaattttagagagcataatttagtacatgttatagttcagggagcatgatttagtaaatattaaagttctgcggacatgatttagtacatcaatcgccacattaacacaattgaataaaattggacaaaattccttaaatctaacaatttcaatagttcaaaaaaaaaatttagcagcttaaaaactcagggccggagtatgatttgatacatctgacaaaaatcctaattaccttaaaaaaaattagaaccccttaattttagttctgggtctgccactaataaaataggtagattaattccataccaaacaacatcaatcataatatgttatgttctaaagcgtcgtataatcatgcatgcaacaaaaaattgtgataatagccaagctatatatatgagtatatatatatatagatataatatattagcagaatcatgataattatcactgctacaaactagggctcgatgaattaccatgtaaaatttacttcatgagaatgtgggtcccaaaattgacatttgaataacttatatatataaatatttcctaaaaacattcaataataatcaatatatatctccaaattcagcaaagatggtcatcatctgtattgtcatgtaatggtgtactgtgtacatatcttgatatcatatatatatataatataaatatatattatatataattccattattataataatgcaacatatgtgggtccaaaaactctatacttgagacttgaaatgtattttaaacaagtgatgacagtactattatctatatataacaacacagcattagtcatcattagtttagcccttctctacatctcttctctctctctctcttaaaagagaataataatgggttttggttgttataattaaatggtttcaatattagggtttcatattgatttatatatatatatacatagtgttttgattgagaagtgagtaagtatagtaagatggctttagaagctttacctaataattcaaatgagcttttcaacttcgttatgatctatgatactatctcagcaactccaatcaataataataatacctatcaaatctcttcacccacaaccacaacaacaacaacaacaaattctactactaataattggttaccaccacctcctcctccttctcaaggcattatta

SEQ ID NO: 43725 - DNA, 2190 bp, Cannabis sativa
aaaaataaaaaataaaaaatcgattgtgatgaaagaaccaactgtattagactttctttgcccaatttatagccatattaccattttttatgagtatatatatcatgaaagtcataaccaatataatcttacatatcataaaatacataatcaatataataattagtttaaactagctcattcagtttttttaaatgtttttattatcatattacttgcatgaaaaatgattaaaacaacacttgttttataatctaaaagatgtcaattttggagaaagtggagatttcatgactagaaaagcagtgatcatcaaaagaaaatgagtttaagcaaaagtatccaaaaagaaaggttacattaagcccagattcagtttgaaaaggaatcaatagtacaataaagctactataaggtggttttaaaatgcacagctatgactggcatttcaaactgtaaaaaagactgaaaaaagaagaagtagatatgtaatgtcactactggatttaattattgttattattaagcaaaatcagtgggcatttttttttctctctcctatacaaatggacttcccataataccagaagtaaaagaagaaaaggacttgagcccaaccacttcatcatcctgccaaagctatatttccagggtaaataaacaaccattgtgcttaatgaagcactaaacatcgaaacggcaaaactatttgtcacctggatttgtgacttaacaaagaaacgaaaagaaaaagactgatgcaatctacctgaaaatgttcagtctgttgcgccttcagttgaagatgatcttcttccatcatatcgctattgaaattaaaaggaaataaaaatcagactttcatggtaatgacaccaattaatgagcaaaaaggttgaaaacactctatacctgttttccgaaagagaatgggacgtatttgtatttgatcatgtgggaaatctgtctcctcatagtcataacaaataataccatccagtagaaaagaagtattggccagaatacaggtacatcaaaggcactgaagaatgtcatcacaaaagcaatgcaaaatgcctttgtaatagagtacctaaacaaaagtaaaacttcagctattgttatcatccaaaggtttgaaagtgaaatcaaaaatgcctcagaagtttcaaattacaaaatgaaaaacaaatatgagtatatgagtatgaacgtgctaagataacagactggtctagtctggttagttgatgataaaaaatgtgttgttagccgtaatgtaacttttaatgaacaagatttttcacacaactagcaagcaattagccctaaacaagctgaacacaatgttacttttaacaaacacatttctatggtttaaaacaatctccaaaacagtggttatttcggataaatgaatagtaagtatggagttcaaaatgaaacatttagggcatgcgatttagttctttctcaaaatggttaaatgaagaatattgtggatatctctggcttaaggatgctaaaatgggccgttggtgaagatcaatataaaaggatatccctttctggttaaatctttacagttggtgaatatacagtgagcaggaagtcaaatttataacatgtagttgtgtcatctacaacagaagtagagtatacagatctgaggttgaagagaatcatgtcggagcttgggttctcacaagaaaacgaaatggtgcactgcaattctcaaagtgcaatccatttctcagagatattaagatttcatctttctccaaatattgtttcaaaagggttgataaacatagtaatattatatactgaaattaacccaatatacatgttaactaactaaagtgatgccactaaacaagttccacaaaaatatttatatcaatctaaagtcaaggtggagagttgtgaaatatttatatgactttaattgccacgtcactttgctaacttgaaaaatcaagaatgttagttgggttactataactaactctcttttcagacccatttctcaagtttgaagcttgaaaaggagtgttacattctcatctgactctataatggattgcctagtgaaactgagctaaccaggtaaatctggtgttctcatagtgtttgtttaaattcatcttattagtctattttctgttggtgtttctctaatctgatttc

SEQ ID NO: 43726 - DNA, 2802 bp, Cannabis sativa
ttttgttttcttttttcttttttcctttgaaaacaagcaatgaaacttcaattattaattgataaataagaagtacaaaagacttgggaagataaattttctgaatttttctatcctgagagatatgaatacttctttcatgttgtgcttatatttcttggccaactctggtgtcttcagtaaattcctttaacaactaattatatatgttacatgtaatcttcaataggtaatgtcccaacttttcctcggactagggtttgggatccttataagcgtcttggtgttagccctgatgcttctgaggaggagatatggggttcacgtaatttcctcttgcagcagtattctggacacgagagaagtgaggaatcaatagaagccgcctttgagaaaatactcatgaccagcttccagcacaggaagaaaactaaaattaatctgaagaccaagttgaaaaagcaagtagaggaatctccgccatgggttaagaacttgttaagttttgtggaacttccccctgttgatgttattttaagaaggttgttcctctttgcatttatggctggttggagtattatgaactcagctgaagctggacctgcttttcaggtttgttgcaacatttgatctgtttcatcttcttctgaatatttgctatgtgaatgcaacttctcttggttttaaatggattaaacaaacacttttaaggtgttgttttttaaaaaatgaaattcttattagaaaggaggagagcgttgcagttcaaatttactgttttaggatccagatttcatttcatatggttgtggctgataatttatcttatatgtgtacttgtacaactgattagtacttattatttgttggaattcttttaaagattatcattaaactctactcctctgtttctcatagatctgaaactcttaatgattctcctaaatgtactttctgctgtcttctttctaaacaatagtaaatttaagtttgagactctttggatccctccaaactttctagcaagatattaaataatgccctgtattccccatagctgattctctatgtttttgccctatatttcaggtggcaatctcattagcggcatgcatatatttccttaatgaaaagacaaagagcttgggaagagctttccttatagggtaagtaatggagacagaagttgcacttcatattatacattttgttatacacgtttatctctcgtgtctagtttttttcccttcaacacaagttcaatggtggttttaccttgcagatttggagctctggtaactggttgggtatgtggctctattttggttcccaatattccatcaattctcttacacccaacatggacactcgaacttgtaacctcactagtagtatatgtctttttatttcttggttgcacctttctcaagtagaagtaaaactttttttcatatcacccggaatatctgtttctccccgaacgccacaaattgaatcaaagctgagctaacactttttttttacttttgctgagttatgaatttccagtttatatattatgaaggaaaagaaatatagatagtagttgcatgttcgtatttgtatacttgtgaattgaaattaagcacatttccatttgtttgcaaatctgcaaatgcatacgccaaatttatttctctgaagagcctttctatacatacaattacatgctatttattttatgaagagtgacagttctattgcatgttgtatctacgaccctagacttttgggtgatacaccaactaaacgaattcatgtgttttaaaagatttatgttgggttgttatttaaagaaagaaatatgacttttttgaacaaaaaaaacatttcatgctataaacaactatattgttttttcaaaatttaaatacgacttcttgataattaacaaaatagacgattcattactattaacaattttttttcctcttttagctgcaacttaaaatcgttcatcattctaaatttcaaataacttttttctttattaagcaaaataagttttttaataataataataatatagcacttattattacaaattgtttccaggggtggaaagttttggtacgtaatagtttgaaactttgtacatgaaaattgaaaagacagatttaactttatatttttttttttttttgaacaaaaggataaaattattcaaaactgaccaaatacaaccaaagcaaggctcagccgaagcaacaaccaccaaagtctcaccagctactaattacattcatgattctatcattagcttttgtatttttacaagcaaagtccattaccctaaacttgaccaacgttttgatatctctacttataacagcagtagaaaaacacatcaaattaaacacagctgtttctatttttccacacccaatacaatatcccagccaagacagcattagtaatctgatgctttaaatcaaacacagttttgattccaatcctagagctctatgatgtccctcagccaactatacaccccaaatcagctgctaatttctctcaacaacaactttgtgaagtggcagttcatgaagagatgattatgagtctccttgtccggttcacaaaccgggcagaggttggattgaataggaataattctttccaatttgtccctggttagaagatgaaaattgcaggcttgccaataaataaacctgcgctttggaatgataagcctatgccaaacagccttggtgtaatcaaccacctgattatcaacaagagaagcatagaaaagtttagccc

SEQ ID NO: 43727 - DNA, 2803 bp, Cannabis sativa
acttaagaagatagttggtattggaggaaactatgttctctaagggacaaattcactcgagaagacattcacaaagcaggggctggtaagagattcaaggctgcctttttatttctttcggtctttacgagagttttttaattttttttttttatgatcatacaagttgtaactatttaagattttctataaagttttataaaattatgaatagtttacaatgcataaaataaaagtttaacagctgcttatacatatgtaagaatttatagtcacgcatgcagtaaaataattaaactttgttttgggtacggtaaatttttttattttttttttaaaagtttacatgtgatcttatacagctacaatgtacatgatcatgaaaaaaaaaattaagctcaaaagtttttccgaatgccgaaatagataagggtctaccgaaacaatactttaaaatgtgtattatagacttaccctaacataatttgttttatgtgattattctcttattaaaaaaattaagttatacattttttattatatttggtaaaaagcatactgaattatttttctggcaagttggatgagatgcatcgcgagatgattatttatttattgttgacacaaattagtaactctacaattgtaaaatttaaaatcccccatttatgcatattaaatttcatatttttgatctaaaatataaaattgagaaacgatttactaatgactaacttatgaatgtataaaaatgatatcaagttacctactactcatttaatattattacatttattaattgctattggatacagaaccttacacacaaaattatcattcgtattacaaacatttaatgtaatttcatttagctaggattgagattttacaatcaattaatccagcaaaatattattctcaacaacataaactaattatatataatagcccatcataatcatcatatatatatatatatatgattaatatggttcaaatgggaatggaagtgaagaacaaggaaatgattccatcttttgtgtaatgatcaaaattagtaccaaccccatcttgctccttttggtatatcatcattgctgtcctaacgaaatctatggcagtttcaataaaagcttgagaaaatggagactcacccactcgagcttcattcatttccttccatgtttcactgattaaattccttatgtgttcacggccattcttttcatcacaaataccattttctttcatatagcattgaatcgatttaggattgtctcctcttttcagttcatcctaacaaagtaaattaccaacaataagtaaactaattaaaagataaatatcatttttaaattttgtattttaaaaataattagtataaaaaatattattgttaatcacaataaaattcgtgagtaaaagtaaaaaatttgtgactaattataaattattatttgtgactaaaagatccgtgactaaaaatattagtcacaaaaagtacaatttgttatactaaatgtgtttttaattacaatacttattgcgactaaaactaatttattaactaacttgtgtctaaatagtatgtttcagtcacaagtaattttttattgtgactaaaagtcatatttaatcacaaaagatttatgttgttatatattaaaaagaaaaaaaagataagagtatatagttactaacttaccgatgaagttcctaaatcatcaacaagtcgagcaatgattcctgagatacgaataaaggtgggatattgaagcaagcagtccatgtcatcttcttttattggattggttataaggcaataaagattgactagaagtaagggttctgcaattgatatccatccatttttaatgtattcttccaagcttggtgtgtatccactatgataccaatttgcctccaacatgtaacatttacataaatccgtccactacacaatcaaaagccactttttttttaagagaatgtaagaattgtatgtattatcattaataaaaaatgaagaaacaattcagtaaccaattagttactaaaacagttcactcagtgttactaactaacaagcctagctaacacacctaacaacttaacaatatcttagattttctaccatactttccgatccaattaattttaataatccaatcgatctattatctattggatattgaatttgatcggttttatccattatagatgtattttagagttaatattttttttttgaatcagatcagacacattcaagatccaatccaaacaaaaacaaaaaaaaaaaaaaaatttaattttaattttcatataaaaatatctatttatgtataataacataaaatctaattactcatccaaactaaatgaaaatactaattactttaattgaatattaaagtattggatttttagacaccccattcaacatccgatcactaaaaaaatagtatctgatctgactcaatcacaattagatatttaatgtttatatagcggttggttatcactataaattatcgatttatgcttactcttacctaatagaattctaactaagcacaccttcgtaaaaaaattcataattacttaatccaaacaaagccttgtaatgtatcctaattatgtgaataataggtaattaaattaacaaatatacaattgttcaaaaaaattaacaaatgtacaaaaggaaaagaaatatatctttatataaaaagtgtctatttaacgttatttgttggtttaacgatttttttttttattattttgaaaattgaaaagttaa

SEQ ID NO: 43728 - DNA, 1584 bp, Cannabis sativa
aaaggttaagataacaacagtaacctttacttcacaatattatttattcttctcatcaaattaaaattttatctaaattttcctacaaaccaatacatcaatataatctattatatttgaaattgtatcttagttatgtgagggtgtgaggataatttgagtacaatacttataaaaagaagtatatttgaattaaattttatttagaagtaaatttagtaaatgtataaaaataaaagctattcttgttctcccaatagtttcatgtttctttgatgtgatgagacttgtttaaaatgtaattagaaaatatccctaaaaaaaagtgtgtaaaaaatggcagtttttttattctaaagatgttatttttctttgttttgtaatcatttgaaaatagttgtggaaataggcaccccataaatacggttctatttaagaaaatgagcatgttttgatatttgaattatttgattgtgtaaagacagtatatttgaccaataattattccaaaatcaaagtttcttattgttattattagaccaccattcacaaggaaattatatagtaatttaaagataaatgatgttgttaatatgatatcatttggaaccagaaagtggcacacatttaaaaacaaataattaacttgaaattggctttataatcacatcactctgacactcacagatcatcttcaacagaacaccagattcaccttgatttcttctactttggcaccaaaattaaattacatatttgccaaaataaaaagcccatctatataaaaagtaatgaagatcaccaaagttagacaaatgacataataatattaattgttaaaagtaaataaaaacacaaactactagttaacaattacattattttatattcttgactctcctttccaaacatgaaaggcatataataataatagtaatactaataatcttcattcatagtctttcaacagaagttgtagcagcataagtagttaaaacatgtctctgtgcagtcatagaaacaagaacaactgcaaaattaaagaaaaagaaaaaaaaaataaaaaacataaacagattaggaaaatagagtatacagtattagttcaatatccaatagaattataaaaaataccattcattaagagctttttcctgttcatcttctccaggctgaaaattcttggtggaagtgtctatggcttgtgctggtggaggctccatctttttcaccacaaaaccacaaaatgggcaagaaattcaggctaactacaatataatatatatgtatttagtattactaaccacgtgattgtattttgtttttatatgaggaccggcctattcatcttttgagtcaccatttaataccttttctatagttaattcttttcgtaattattaaaaaacaaatagaaagaattatgagaaaaggaaaggaaaggtgggcgtatcatatttgatttaatcaaataaatgattcttttctatacagaggctttggaaaaactaataaggtaagtaagtatggaagccggaaggaaaggaagtaatttactttggtatgtacatttttttatttttt

SEQ ID NO: 43729 - DNA, 3540 bp, Cannabis sativa
  modified_base (2003)..(2004): a, c, t, g, unknown or other
aaaagtctgtaaactaaaattaaaaatatcaatattattaaaatcacaattgttattagtactaaatgtatttttagctgtatacaataacaaattttctcagtataacaaattaattgtgactataaaataagttagggacaatttgtggtacaataacttaaatattatattataattacaagtaaatttttattgtaattaaaagtgccaatgagcagcgtacaaaatctatattatgactaaatgatatttaattgttctattttattatatcttgcacagtataatatacatggtacaacaattaataattttttttgagaggaacaattaatacaatttaatattaggtccattaaaataaatatgagacgacttctaaaccttctaaccttctcggtctattgtaaagtacatttacagtcaagaattttgtggccgactaaaaggcctaaccattttcttttctacaaattcctagtatacttttttgttaagttgtctccatatttatattgtgttaaaatttgtattaaatttagtactatagattagacatatataacaataaataaacctttttaattttattattgtaataactaattaattatagacgttaatataattttttcaattctaatattgctactaattattttttaatcaaataattactttatatattaatgatattttttttagatattactattgggcatgactagtgatgctcaacattttttataagtggtgtgtttagcgtattttctaaaagctatttttttaaatcatatagaatttgatacttaattatattaatagcggtatgagactaagcaaggtattagacaccaataaatatattttttttatattaacttgcatcataaaatactttatatatatttcttttaatataactacttaggtcctagatgctaactgaaccacccccctcccaatattaaatcaacaagtcaaacttaacaaaaagctataacaaactaaaataccagattacagaccattccctaactttataactattccctaattttttcattcattgcagggtttgaaacataatcaaagaaaatgaatgaatgcattttattaaagcacttcatatggagaaagtaacatgttattataccaaacaaaagggaccaaaggattatagatgttccctttcatattagcaaaattagcaacaagtcattttcagtgtattaaatccactattactttatcatcatagtgagactgagaccaaaagattcatataaaaataaatttccaaaattacttttaatattgactagacagttacattaatcatatattcaacaatgaatatcaggaatcaaatcaaaaatagcacataagaaactatatatataaataatatataaatatataactatatacattctctattttccaaagttagtgtacgttggaaaaaaaatatcagaatacacattagaaaaataataaaaggagagtttatgtgtgtaacattaactcaaataatctcctcacctcatataaaaaaatcccttacacaagcacaaaaaaataatttgctgcacgcatgaacaaaagggtacaaataaaataaataaaaactagtcaaacataaatgttcataataattaaaaggataatttgcagctacactatttatacatttagatttggtaggattataatcttgtagactgaaattttgagagtaaaattctccaaatttcacatttgttttgatttccactatttcattcactttgatttataaagctataaaggatgcttgaggacatagacacacttttagcattttttaattagtgcttaccattagaataaaaaagaaagacacaaaaaaattgtcataccttagtattatttatatctttttcttttttatttttttattattattttatcataaagtaagaaaatttatttgtttaatatatattaaataataatannatattattttaataatttttattatattattttagaacaaaaagtgccaaatgataaccaaaaaaaaaaataatctcttctcctaaaaaacaaatctcatgaaaccactcctaaaagcctttaatagtcaaaccaacaatctctttgtatacggtcgttggcgataggtttgaatttcctatggtttgctttgtcagaagctcgagcaaaaaattgggcaagagtttcgaagagaaatcgctcaaatgatacatggctattgacgatcttaatcgtcgtaatcgactcaatcgcacctttgggccaaatagaatgggttgtcaaccattattatttgtttaaatttgattttagttttgtttattattttttttttgttgatttgggtttgaaaaataggaaatgatggtggtagtggtggttttagtgatggtaagtggttgtttcgatggtggtgtgtggtggtttcagtggatatggtggtggtgaggtgataatggtggttgtgttgtgatggtagtgacatgataatggtgattggttgtaatggatggttttatggaattaaaatgtggaacttattttgccaagattttaatttaccaataacaagtatgtttgtttatattcattataatctaatatcctaaaataaataaaattcataaaccaataattaaacacataaaatgaatagaatcctcacattagttgcaacagaaattaatgactcgttctattcaaggagtgttcattaactggatttggacccaaccgatctaatctaattatttattagattttagattttgttatctgatccaatccaatcgaattgagtcatgtgatctgatccgatcaaattgatgtattgaattagatcagtttcaaccattagatacattaactggttttctattgaattggattaaatccattcaatattctattttaattagctaccattcaagttgattttattaaaaagaaaattatataaaaacataatttaaaacctaataatctaacatacataataaacattaatttagtccaacttaattctcatgaatctataataaaactaccaaaaaattaaacttattcaatacacattaataattttattagcgttgagaaagacgagaattaatattttagatctacaattttttttttctttaatctcatgtattaaatatatactaaatcaattaatataattttttaaataaaataatatattaaatatataaaatttgatcggatgtttcatccaacaaccaatccgttccgattgaattttcaaaatttacattcgatccaatctaatatgattagatatccgattctattagatcaatcaattataattggatcggatgactttttgtacactcctacgttcaatcacgctaaccctcgattgccgttctatagcagggtactattgttaaaatgataaatctggattgcttccttaaatccgatacacgacaattctttacgattttctacaaagatttgagtagtacc

SEQ ID NO: 43730 - DNA, 6403 bp, Cannabis sativa
ttcttcttcttttcttgtatttgcacattatattcatcaaggttttcttgttattgccaagggaataccaactttggagctgttacagtgggccagtaaagaaaataaaaaggaaactatgctcttaaaaatttgacctttagtctatatgttatcttatttaattattacactaaaattaatattatgcctataaatataattttttattacaaatttatatcctaactaattccacctcgcttctatatagctccttctgtgactagggtgagttgtaagttttcatgaggctatttgattagtacattacccgcattttcttattatcgagtaataaagctaagaggggaccccttgttatttcggtgtgtgtttctctctaagcccacattatttgtgtatttagattttaagagaatttatgtttaaatagctaccacaccatgattatattttgagtaggaaatttttgtaattttattataatatctgttgatacagattcccttatatttttcatctcaatctctgtataattctgattgtttgtatttgtgtgttgatatagattccctaactgccttttagaaaagaagaagaacatttttttttttgaaaaggtaagtggctgctgttgattgttaaggttagaagataagctgatttctcttgggctggttgattgtttgggcgtgtgacaaaatgagtcatggtttgactcattcttggctttgaccattgggcctgaaataatatatcataaatagtattatgaacgcataataaagtataaaattgaaaaatactatttttacataatgtattaattttgtttctttgaagtgtgttggacaaaaacaaaagctgcagattttggtttaaaattccaacagtggtatcagagctaattaatttccgcaaaaaaagattcaaattaatacgtttaagaagcaagtcgaaaatatcgaaaattaaggacagtaagaaattgatcttcaagaatacccacaatatctatcttactaataaatgttaaaaaaataatttttattaaatgtggacagtagtaggtagtgttgtaagttcgtgcgtgtcgtgtttgttcggctcgtatttatttgtacttttcaaaaaacgggtcgtgtcatgtcgtgtcatgctatacttttaaatgtgggtagtattttcgtgccgtgctttgctcgtgtcagctcatatttcttaaacaagccaacctattttcatattcgggcttaaattcgtactttactttttttttctacaattactaaattatatatattttaaaactttagttatatttatataatttttgaataatattttacaaataatcatataaaaaattataatttaaatatttacttataaatactcaattttttatatcatactctataaataaattaatatataatattagtttttttttttttttttatcttttaataattttattttatagaattataagatttaatattatatttaagttttattattatttcaactaatttataattgataagttataaggttttttaatatgccgtgacgtgtttttttgacttattgtgtgttgtgctttttggattagtttattcgtgcttacatgtcgtgtctttcattcttctcgtgtcgtgtcgtgtttaaggatatattttttgtaccgtgtcgtgtccaaccccgtatttttttgtctaattgtgctcgtaccttttaagctcgtgtacccgtatttacagtactaacaataaaagtgagaatgttgttattaatctctttagattaattattgctaagatgtgatttattaatatttgattaaatacctcttgatgttaaatagtatttgtttttctttattttgatggattttacaatatgatgattacataggttaaagcgacttatacataattgttttttttttttttgtttatttgaatggaatttattttcactaaacaagagctaattgccaatgacacgattatcacatagtattcgaaattagaataaattgatagaaaaatgtaatcgaataaatgaaaaattatcaaaatcaatatttgtaatatgttgttcactaaaattatttgaaaatagaataataattatttactaaattagaatgctttttttttttttaataatactaaattagaatgcttagattgactaaattatgctttaagttaaactatagtatataattattattttgtaagacatattttaaaggacaaaattatttttatatatttaatattaaaaaataaaataaaaataaataaaagttattactaacattccttaaaataattagtaggggaagtatttcatttattttattccttatataatcaagttttggataagtatatatatatatatatttttttatttcttatttaatcaatttctctattttttaaattttaataaaataagtaaataaatgtaagaaaataactatttattgttaatttccattactcaataataaatataccattaaaagagacatctttcttttaaatagacgaccaacataacattgagagtctagtctagacaatctcacaagaaaatacacaactcaattagtaaaccatttaacacaatgtaaaccaaacattagttaaaaatcccaataaatatttacaatcttcaaccactaaaccaaaaccaaaaaaacattattctcaaaattaaccaaacatattattttcattaagaaaatcctaccattaaaacctcttccatttaatattaaataatataaatattatctcacagcataataaataaccgccttttattccgtggcatatgcttctccgtcctcgaacacgaaacgctgcgtttctctttcaggagtaagattacacaaattaaattaaattaaaaataaataaataaataaactatcttagatttttttgtaattaaaaattaaaaattaataataaaataagagaagagaactgtgagagaggtgtttgtcgataatcgtaacagaaaaaaacaatggagacgttacagagccgagtggaatcgtggatcaaagagcagaaagccaagatcctcaaggtttcttggggatcactccagtggaggatgaagtggccttggaacggtgtcgccaacggccaccagaggaagaagctccagcaagagtacgagcgtcgccggaagcaacttcacgatctctgcatcgccgttaaggccgattccgtttccgatttgcaggacatcctttgttgcatggtcctctctgagtgcgtttataaggtaccaatctgttactctttactttcttgttattctggtaatgacagcgaaagcgatggtggaaattaggttaattttggttagagattgaatttattgtttttgattttgttgcgattgtagagaccttcgactgagttagttagagccgtgaacaaatttaaggctgactttggaggtcaagttgtttctcttgagcgcgttcaaccttcttctgatcatgttcctcacaggttttgtgtttatgttatgcatttttttcccatttcaagctctgggatttgattgttgatttggttaaatttatggttttagtttcacaaaatgtctcactcaacttagattcttaatttcttatgtagccaattttgataagtggtgcattttcagttattagaattttttacagactttgctcatgcttttgatagatatgataatatttagttttaggtgttagttttcatccacactgagtaatagcaaatcattcaaacaacataatcagttggctatgagatccatttagagagtaacatactactactactagtttgctcaattgaggtgcatgttagaaagttccacaatgtgtggaaaatagaatgtataagatccaagagctactcctttcaattccaattagttttgagatggaaatccatgcatcttacaattctaacatgttatcagcgcaaagcaaccaaaaatccaaaaagaaaaaaagtagagccaaaaatagttacttgagattcggggatagtgagccaaaaagaaccaccaaaaatttaaaaaatttgatctaaaaagtagagccattaggatagtgagctaaaaaagagccgcttgtgatcgagctgtctaagatagtgagcaaaagataactaccaccttgaggggagatggaaccccgtgcacctttccaaattctaaagttttcatccacattgagtaatagcaaatcattcaaactacatagtcaattgctcaaatcaacattcaaaatcacattttattaatgacatcaattgcaaaataacaaacataaatcttaagcttggcacctattctccaatggccatcaaatctgttcgcgaaaaacaggaaacgcgtgactagaacaagaaatgcaagagagaagctcagggtgagcaacccttaccaaaccttaccttatgacactaagggtcaaaatgggaatgtttgggctcataatattaatggattatgatttaatgtgccaatctataatcatttgagtgctaccttatgtctcaaatgtaattagtaattgataaccatctcattatggttattagcaagtaatggacacttcaattaatggctgtcaatatagaattatgttttgtgattgtattagtacatacaagattcgaacattactaattaacttttccttggtccaggtatttgttggcagaagcgggtgatacattgtttgcctcctttgttggaactaagcagtataagtgagtgtcgtatgagaatttattgatttgctttcgtttattattttattgggaaaaaattgtgatttttaaatttttgagttttctgaagggatgtcatgactgatgcaaatatattgcaaggcgcaatatttcatgaggatgctatggaggatgttgatggaattgaaactaacaagtctgatcagagtgaaagtcggaagggcaatggggaaaatttgtggaatcctctagagtcaaaatctaagcaactgaataataaatctaaacctaaacctaaacctaaacctgctgctcatcgggttagatttcaatatgcttttaagtttattactttgacatgcttaagtcatgtatgctttgtgtatcaaccataagtttatctattggctcttcttcccacctatatccatgtatgcttagtactcttataaactggtggtgggtttgtggctaataataatttaatacttcttgtatttgtacattattttcatcagggtttccttgctcgtgcaaagggaataccagctttggagttgtataggctggcacagaagaagaaaaggaaacttgtattatgtggtcattcactgggaggagcagtaagttttcatgtggttattttatttgaacattagccatattctcttgttattgagtaaaacttacatcttttgctctctggtttgtctttgtaggtagcagcactagccacccttgctattttaagggttattgcagcttcatcttcattaaaagagaatgaaaatgttcaagtcaaatgcattacattttcccagccccctgttggaaatgctgctttgagagagtaggtcacctttgatatttcattaaactgtctttcttattaataaatgccaaaagtctcccttcttcttcttttaccaaacagtggtgtttattttgtcttttgttttcttaaatacagttatgttcatagaaaggggtggcagcattattttaagagttattgcattccggaagatttagtaccacgcatcttatctcctgcttattttcaccattataatacacagcttacttcggtacctcttgataccaaagatagtaaagtgtccacattaaaacgtgaggaatccactgataaagctaaagataatgaaggtgaacagttggttctgggccttggacctgtgcaaaattctgtttggagactttcaaagcttgttcctttggatagtgtacgacgacatcttaataaatacagaggaataaaagttggttcagttgaagctacatcagattctgctacaacagcttcagtagaagatgtagtagaagctcaatctcttgaaattgaagaaggttctgatggcatttctcttaaacctatttctgacactacaccggatcttgctaagcttcctaaaaaaagcactactaaaagtgaggatggtaggaactgggggggcgttccttacttaccttcatatgtaccatttggggaggtatgtaaatgaactgaatcccacatttttttttcttcttgattttatgagcatgcatgctttcctgataatagtcttaagagtatttgaccttgtatc

SEQ ID NO: 43731 - DNA, 1612 bp, Cannabis sativa
aaaaaaaaaaagttagttaaatcttaaattaataaagccccaatacccaggcttaagacccgacgcggtaaggaaggggcattctattcctacctccttcggtacacccaagctggtttccttctcttcccctttgaaacatctcctctgctaaactcagctttctcaaattcacacaaaaaccctaaattatatctctctgcctcggtccccttctccatttgggtcctctgcccagcccactctgcaacttctctaccatttatcgctatcaggttttttcattttaggtactccttattttcaatgttatgctccgactagatttttgtaagctaagtacgtatgaaatactggttggcattatctataggaatacaaaatcaattcatcctcttatatgtaaatcaaacaacttaaacacaatctactcctgcttattccttcctccttttgtgggattgtctgcagattttgtaatacttatgaatggcgtggagggtgcttcatagaaaggtctgttcttctttagaatctttacccaaaacattttcatttataaaattattttcaaatttatatgataaaagttgatcatttatgatactgtttgtcactattaatattgaaacatggccttatttgcccaacactaatcttcattcaacccttaatctgaacttgtatttcctatccttagggaagtcatgctactctttctagagctctaacttcaacgctattaaagcaagcagtgctgccaatttcttcttctgcctctgggagatgtgtaccaggtacatttaattctctattttcacatatgttcttcagtgtctactccaattccaatctataaaattcatatttgcttttacatattgtaagagatttgaaatgtataaagatgagtaatttgtttctcaacatttgcttaccagagacctctttcaacccagactctggttactatcaagtgttggctaaagaaccccaactaaggtgagttctcatgttttcttgtctctttgttgaacactacaatcgtcaggaggcataactttgaagccctaacctgactggtcttttttagtttgttgagtcatgcctaattatcagtacgatgaccccaagtatttggaagctgtattttagattttgataaagtctgttcttttgactctttgagatgtctaaaggtggaaaattgaacacatattgtctggctttataaataaaaaattgtgtcggggaacctactgggatttagcaccaaatttgtactatggtacttggtagaaagctgatatgtgtccatgtataagcaagaaaacattatgaggaaggagggaggatgagggtggactaaggaaatttttcacttttttgaattgacaaatttgacattcttgtaaattttaaatgtgaaggaaacattttaattctgattctttcttttattgacatttgattctgcactgcctaggtgctatcatgtaagcacaatccttagtgcaagaatgaaaagtgaagggcttttaggtttgaagactcccaaaagagagaagtttgtaaaaaaggaaaataaaagccaacctcctgttgaagctcc

SEQ ID NO: 43732 - DNA, 2210 bp, Cannabis sativa
gtacacctattttctagggtgcactttagaattttttaaaatcaaatatactacaatttgaaatagagtaagtctaaaaaaaagtacatcccaaagagtatttcagtacactccttatttatttttgcatttaaaattatttttggtatattatttttataattatatatttaaaataaatttaaaatattttataatacaaaaataaaaattaaatatttttaattatttttttttatatacgcagtaatcgttcaaacttttatctctttttcttattttttcttacatgattaacacaatttttaaattgtatatagatacttctaaataattacaattattacccaaaaaaaaactttgattccataaatgtgcatagatttttccattattttataagtaagaagtatatttacattttaaaatgattatttttgtgtctgacaatcttgtccctcatcattagctcaatgaatagtagctagcttccttacacacgtggcaccacattcacacatttacggatcacatccactctcggattttcaacctccatagatttccataccttttaactaagccactcacctcacccaaacccaatccaatcttattctgccacgtggatctccccacaggaagcatagtacagtgttagtagcgaatcatttactcattgatctcctttctgtgacgtctctatcgttgtaatttaatttagtctctgtgttctggtccaatcttggttcctcattcgctctctctctccttttaaactcatacaaaccacaaagacaaaactctcaagatatcaaataccatataaagagaaagacccaaatttttgcttctttctaaactctatactctatacccttttggatatacaaggatttcccaagaggtttttttttgcttttattatatatactcagttgggtttaacttcagttgaaagttcatacctttttcatagtttttgtgtgtttttttgggttttttttttccctctcatctgggattcttaaaatttgtcaatttgtaacttttttatattttcttctttggaggaaagcattaagaagtaagtctagtttgatttattctattgcagatgtttcttatttctgaacacaattccataattggtatatgaacattattatattacttattttatttaaataataaagtaacttgtttgactaaattaaacaattggttttcatggattaagctgtttttataaatatatatatatatattaatttctgttctttttatatttgttgaaatgtcactcgctgttccttaacttagtttatgtataagacaaaggctttaatttatggttaaagcactactttttttttttattattatattgagttactttaatatttcttttgcagacactttgttttctggtcagtcatgaataacattcctgattggaattttgattgtgatctccctgtgaatggccaaaagaatcctaatgggtctgtagtttgtactcttttcttctccaaaattactcatacgttgaatttgtgaatctctgaaatgaaacattgcttaaaattgcagggctgaccatgacttagtagagcttctatggagaaatgggcaagtagttttacaaagccagacacacagaaaagcaagtgttggagctaatgaatcaagacaagttcaaaaacatgaccaacaagctataaggaatggtgggccatatgggaattcaatgaatatggttcaagatgatgatgcagtgccatggattcattaccctcttgaagatgcatttgagaaagatttttgttcaaattttttctctgaactatcttcatgtgatccaattgaaattgataaaccaatcagacatgttgatgaagagaggttattgtcaaagtttggtggttctgatacaactcatgttccctcaaactcccaacaccaaaaccaccaaaaactcaagccttcctctaatggtgtggtgccttgtcctgaaaatcataacatgcctccaccaaggcacaattacagcaactcatcagttcatcaaaaacaaaatctggggtccttaggaaaagtggtcaatttctctcaattctcagctatgggcaagtgtgatatgaggccacaacaacaacaacaggcagtgaaagaacccggaaaccgaggagaggtcagagagtgttcag

SEQ ID NO: 43733 - DNA, 1785 bp, Cannabis sativa
gagctattcttgaaatctctagctgttccccgccgatacaagttaatggcccttgaactagtgcgtttgacacgctcatggattcaagctaagctacatatgctcagtgatctcggggtttcttactgtttggagtttgaaatttcagggtggaggctcaactcaagtcaagtcaagtgtagttaacaaaagaaaatgagaaaagtaatattttgtatactaacacaaaacacatacacatatatagtttagagtaagtaagttagcaatttttttcagcttgtagatgctgttgttggaataaagcattgtattattgcatgcaattattatttggtggcccctcatcaactcaactcaacaaaggttcttttttgtttttgtttttattgagcattgtgttgaaaatcatatagctcacattaatcatcttctcttactcaaaccagaaatcatgtaaccaataaaaacacttatttcatatatatatatatatatattagaattataatttcttttatctgaataatatttttagctcaacaagtaatattaatatactatacataataaattgtgtaggatttaaagaaatacaaataagacattgcaaaaccataattcatgacttttccttggatttttgctgtagtcatctaaaaaactttaagtggaaggcatgatatttaagcatgaatataagagctcgaaaatatagtattcaataaacctcaaattaaattcataaatataatttttaaaataaacttatctattaattcacatgtatataaatatttttacattaaataaaatctcttaattaacatctacacacgatattatatgttagaatatttttttgaggtctgcgacttagagtctaggggacatgtgacttagagtcttcttgacttgttggcctagactattgagggacggtaactagaaagcaacttggcgggatccaatatttgcctgagagtcctcccatgtcaacttgggactgggctaagaacccatgtcaacttgggagctggactagggacccatgtcaacttggacgttgggttagagactcatcttgaagttgactactatgactataggctcgtgggagttcaagaatatttttcttgttgccacatgtcaagaatgatgtccatgccaccaagactagtttctcggtaaacactatttattttcttatcaaagtctcttgtaagctacttgcttttcgtgattaataaaatcttgaggtaaacgtagttttattatcatcgagatataaagagtgaactactataaattgtagtgttctttctttagttcttattttttttagttgttgctatcacttatcagacgatacaaaattggtcaattttcaacatcaatacttgtgtatttaagtatattattataaaattgttaaactgtatatcaaattgtataaaagggctaaactacatatggactaattaacaaaatgagattgaattatgaaactcattgttattgttattcacattttcggatggtgacatgtgtatttccaaagtccttgtgggtatccggttgtgtttttttgaacctttacttctttgggtgagagtgagtcctctttctgggaccaaaaaggtccgagtcaagagagggttatgattgaacccagagacgtagtccgattctgtttagggccaagatgcaaaatgaccctaaatctaacaattaagttaataaatgtccattttttaaaaaaattaacaaaatgtccttttagtt

SEQ ID NO: 43734 - DNA, 1853 bp, Cannabis sativa
acgcttgatatcttttatttttgcagatttaaaataaaaaaagattagaaaaatatcatagaaattgataattgggagataatcatattaggtcataacccatagaaacaattgaagtcgaagccctagtttttattaacggttaattttcttaaattgtttctcctttcactgttttttttttattttctagttttaatcatattcttaatttttatttaaccaaatagaagtaaaagtttagttttaacgtataacgtgggatcgacctcactcttagtgagtctattacttgtaaacgatacgtgcacttgcatgtgcaaaatatcacaacagttggcacgccagcgcaaggagcgcgttaggcgaggtgagtgtgcggacgcaaggagcgccacaaggagcgaggagcgggggggtggccgcggggagctcaacccgcaactagactcctccttgcgtggggttgtttgcttgtgtggggttccattgtgcacggtgagccctctttttttcttttaacacacctttgaagtgtgttttaggattttttttttattctatttaatctagagataccgaaattgacacttagtgaatttagaggtctgctaatattattatttgaaagagtgcaagagatgaaaaaacgtaaaagagaggctataatttatttctatgcaaattaccttatataaagaaaaaaataaaataaaatactattgttatccaacataaaattattattttcctgatattcagccaatatataaggagaaaattgatattcgccctattaagacttctaattgaaccttatgaatgaattcatctttcctatttcttaaaaagaaaaaaaaatacagtcataacgctaaaaaagggttctaaatcatacataacaaagcagctaggcaaaagaatccgtgctcttctatctccatcacagcatatttccatctcctcatggtattgtcggaaacacttgctgcaatctacccctgacaagtctggcgtgcactgcacgaatccgtacatcatctttgaacccaaactgctcaggttctgtttccccgtggcgaacttcttgctctgctcgtgagaaccggccgcttggattgccaacgtggagatgaaggtttccagaaacagtttgagcttatcatcgttactatgatttctcgatctaacatcaaacctgatcagagctaagctcaaaatgtcaaagattagttggtcaaagtagcgcaacatgcacttgtcgtaccagattaaggcctccttattggcgggtcatagacttggtaaacgtgtggaagcactggcgatgcactgctggcatacgaggctagccacgtctccacggcagagaaataggctgaacaatacaccgtgtagtccacgcccaaaggtggcgtagttgaaggcgtttcttcctaaggcagctttggagaagaagaaatttagagtgtataggatatgtaaaactcagctcaaatgagactgaggcagagtattcaatttatagcaatattggatacatggtataacaacactagccataggtaatacaactagtgtcacaatacaattgcataaatcaaaatagaaagatattctagttctgtattggcagctggtgtaatggtatggcagaggaaatattcattgtgatattctgtgccaatgatgaggtggaatacaattgatgacctgtgctgacactttgctattcctttacactccccctcaaactgaagggtgaagtacgtattcccagtttgtgttggtattatatttatccaggatcttagatctatttgcaagtatgttgatttaacaacctaatattg

SEQ ID NO: 43735 - DNA, 6213 bp, Cannabis sativa
  modified_base (2619)..(2620): a, c, t, g, unknown or other
  modified_base (2832)..(2835): a, c, t, g, unknown or other
aatagcctcaactgaagactcgtggaacaaaacaaaactttcctccataatacttaggctaattagtatttttgtcttgaattctgacatataccaaatcatgctctctgaatttatttagccgttaaaaattcctactgaactattgagattgttggattttaagacatttttccagtttcgtcaattttactaattctgtgattgttcatgtactaaatcatactccttagactttgatatctaccaaatcatgcccctcgaactttaacatgtaccaaatcaagcctaacttttatccatgttaaactttccttactaaaattaaaaaagaaaaaatttaaatccaacaatctcaataatttaagagtgatttttaatggccttaaaagtttatgaccataattcgatacaagttgaagtttagaaagccgaatcatatgatttatcaccatagttgtgtagtatataaaagtaaaatctttttttaattgagtaatgttataattagttaccatagtcgtgtagtatataaaagtaaaatcctttttcaattgagtaatgttatgattagttagccatatttttctaaacattattacacccacaacaatataacagaaaatgctaaacacccctaatgcattatcctatttctctttttaatcctttgattaattaattcacatcatctttattagtttattaatttgacataaggatgagggtgcagaattcaaactaaacagagaaagtccacaatatatcaccatcaccatcaccatcttattttaatcttgtcaaatgatgattaggtctataatttagaaggaatttagtgatattttacttaatctacattagacatatagaccacctcctcacacttaagctttccatatcatctaatctaaccaagtccattaagtttttttcctatattaatggccaagacagagatactagtaacaactgtagcccacagaataaatgtaaaaaattaaaggcactcaagataagatggctgcaccatcatcagatttcattgtcttgaaaaaaattcttttggagagaaaaaaaaaatagtcctacacaaaatccaaccccctttcccatgacttgttttttcaattttttcttttcttttcttttctttcacataaaacgaaattcagtaatcgtcaaataagaaactcaactcagtaaaccagagggcgaatacaatcagatagataccagaagaagtgaagaagtagctgtagtagcatccaataatgttgcctctaaatgtacatctttcgttatgctttgcagcattacaggtgaagcttcttttgttttggtttagctaatactccaggaggtgtttttagtgggattccaccagcacatacagtggtttcccatgcaatctctcccgaccctgaaaacagaacaagtacgaaaaattagactcattttttagctgcatagcaaaaactaaactgacaaatcataacactaggcttcttctttcttgataactaacctgtaaatccggcaactcgataacacatgcacattccacaacttcagctccaacgcgttctgcattatagttcagcacaaagttgagagaatttttcagccaaatgtacaagctatgtaagttgcaggaggtgccaaacaagaatttgaggcataaaagaatgttttgtgtaggatatactatacataaacatcacacaaaacctgtggtgtgacaagtgatattgccattcaggttaatagcggcataagtacctaaagttttgagtttgtaagtggcataaacccaatgatttttttttagtagcataagtacccaatatttgtaaaactgtaatttttctctattttcgtcagtacagacttcattttaaatttattaaataaaatttggaattaactggtattacatattttcgtccaaggcagtttataaacattgagtacttatgccgctaaaaaaaattattgaatttatgtcgcttacaaatccaaaactataagtacttatgccactatttacccttgccattcactttcaagaattacattacatactacttttcacatatataatgaaggaactgttctgtataagaaaatgttatatgaaattacccaataaattcattgcagcgcaaagtgtgcctccggtggcaattagatcatcaactaccaaagcatgttcgccaggtttaacagctccaacatgcatctcaagacgatcccttccatattccaaagtatactcttcaaagatgacatcacctgccacgacaaaagattttgaactagcattagaggaaaactttcagtggcatgttgttgccacccacaagatgtagaaattaccaggcaacttccttggtttcctcagtggaacaaactttgctccaattgccaatgcaatgggaggaccaaaaatgaaaccccgagcttctattcctgagaaaacaaaacaaatgttatatttcaaagcactatttcggtaattctaaggtggtgtttgtattgggagtttgggttcttaggaatcaaaatgtataatcaaacctatgcttagtatgattttaggtggcgtttggttggagnnaatgaaatggaatggaaaggaaaccatctccattccattcctttgtttagttgcatattaaagtgttgaaatatcattccaatagaatggtctttccaccattttggtgaaatgacaattctattttgatatgaaaggaaagaccattccaatgcatgatgaaaggaaagaccattcctagttcaattctcatttctatattttcattcctnnnnaccaaacgccaccttagtgttagatcaaatctatgggtctcaattttaagtttatttttgaggtaatctcaaactatttatggggtgtttggcatgagacaagacaaagtatttgtatttccaagtagagtctaatttttaaattaaaatagtgcttggatttcatattccccccaagtttattccttccagctctactttctctaactcaaactcacatagcaaacacttcattaggtgacgtttggttggatgaaataaaaacatagctaaaatacaaatgacattccaatatttaaaaatgaaaccaaacaaataaatggaacaaaaattatttctttttcatttcattacctccaatcaaacgccaccttaaacacttaagtttgaaattcccttattctcaaactaaagccgaccatttaaaattcttataccaaaatctggttagtgttcaagaatacagtaaacaaatgtcaaaaatcatgttgtgttcaacaaacagcaacataacgacaatccttagagaatgttttctattaaagaaaaaaaaaagttgttgtggagaaacggaaagaaaaagttgaagtttgaggctatggggtcatatcattcgaatagtttgggttgaattttgcaatttagactaaatgtcctattttcatattcaactccacaagtccataaaactgacagaatcttcttatgatagataaaatgttttgaaaattaagttgtgaacatgcagaggagatatatcaatttcaaagaaagttaagtttaaatgttttatttcttgccaaactttaaataagctgcatttgatactaataaatcagacaaaatttattaaagtacagaataaagcctacaatacatggaaattgagagagagagagagagagagagagagagagagaataggtttcaaacactatacatatgacatgaccaatatatatataaatatccaaatcaaatacagcacacaattaactagcgatgtaacatcaaataaaatgtgctgcaaaatgagaaaaaaacctcaattccttatctttttcatgcatggatataattttcaagagaaaaatccaaaattatttaaaaagttctcatatacaggaggacagcatatatccacctcagcacacatatagacataccataaatatagtacacacatcatgttaagacaaagcacataggaaatcttaagccaaatcatttcatatacaaaataaagcaaggcccagcaataataataccacaatgcaatttcagttcccctcagtgtctacttgcaagtgtactaagtctaaataattgcaacaagttaacattgtgacaagaaaacatttcatcaacttcctaactactatgccctacctccgatcttcatcgagatgcctaaagaggaaggacgtgtggccactacaaacacttgtttctctaaattattcattccacaatgtaatgaatgaatcatacttgaagttttagtctttttacgaggggctaaaacattggagttgaatgaagccaaatccacaaaaaaacaggcaaaggacagattgaaatcaaaggataacactggactcaaataagtcatcaagaactccaatgcacacaaacacaaagatgataaaacaagggtatgaaaatattatgaagccgaaacaattcggcccaagttaaaatggcatccaaaggggcccacatttttcaaagtgggcctctccatcaccaactaccatctttgcaaattggatccaagcacatgcttaggggggagagagagagagagagaggaggcatcaaatatgagccgctaaaaatgaaaacttcaaagggagtcattagtggcataacccactaataaaatccatagtcaaacaaaaaatcactcccaaaacccagtcacttccattccattatgtctcgtaaaagcattcaaaaagacaaccagaaacttatgcagtacaagaagttttttttattttattttattttatttttaacatcattcaggcctactttactcgtaagcaaaggaccccaccaccttcaaaactaatcactcagataaaagcttcttctaaagctatagatcacacatttaacctcaagtttaactctttttccttttttcttttgttccttctctttcacaaggagaaaaaaaaaatgagagaactttctttttacctgcaaccacagatatgtttttgcctttgtatctctcaacaaataaatcaattgtgtccttaaaggcttttgggtcaagtagtaaagttgttatgtcttgaaacataatacctgcacattccacagccgttaagacaaaaacaaaaaatgagaacttgattcgaaaaagaatataaccaagaaaaaatctttaaaagcaaacataccctttgtccagtaggaaatgaaaaaaaaaaaaaaagaaaaaggaatgatttttaaccatcaagctcactgctttttcttacgaaatgtaaaatccactttaatctaagtcaaatgctttggttttcaacaattgcaagtcccaacttttttctctttcattttttttatgcagcgataaacaaaagaaaatcctcaaaaaaaaaaaaaaagagagagacagaaacaaaccaggtttagggaaatttgggacgacacgaatcttagttttgatgccatggattcgaggatcttcatctttgtaagccgacattgtgtgtttatatccagagagagagagagagagagagagagagagaaagaaagacacccccaagtaaaacaagaaaaacgccttcactactctcactgctctcttcctttatattaattttgttttttgaaaaaggaaaaaattaaaaaaaaaaaaaaaaagagagaaaatctttttgaaactcccttgtctgttgtctctctctcttgctctctgtgcttgttcacgtttctcccaccagtaatcaccagtacagacgttatagctatttgtactcacagcagagtgacaaaacagaggtagagagagaaagatagcgaggagagaggagagagagagaaagagatggtatttatagagagaaaggaagagtatgtctggttgtgaaagaaggactgaagaagagggctctctgcacaagaatatgagaaagattttcgagatataagaaacagagggttggtcgtaaaaggttaaaaacggcaaaaccaaataaatgagggtgcttcccagacaaagtcttacctatctttacacgacacgtgtatatttcatttctttcagttttttttatcccgaataattgattttttgttgttgttttacaaactcacccgtcaccatgtacaaaacaaacatttattaaagatatt

SEQ ID NO: 43736 - DNA, 3259 bp, Cannabis sativa
catgtcaaagttttgggagaaaaattattaattagtttttattttatatgcatatataataaactgttttcttataaattattttaaaattttataagatattttaaataattataacgtggaccggtataatattcatgagagcattttttaagaggtgatattgtttttagttacataaaaccattatctattactaatgatgattaaaagaaacatttccctacactatattgtatggtatagtggataatttagaagaagcatttttaaatttagatttaaaaagtagggatgaaaaggagacacgtaatcacaaaatttggcggttgaaaagaaaattggttactctctcttctccttctcccacagacacctgaagttgaagtttgttctctcagtctcagaacaaccgaaaagctttaaaaatggcgataagagcagctccaatggctagcggaagcttattaagctccgacccaccattcttccaacgcatcatcaacaatcgtcactgctttctctccccccgtaaccccacccactccactcccaaacctttcctcttcatccactttgaacccaccggctttgcccttggagttcgtcccacctctcgccgccattctaagctcttgtccactctccctaaagctgccgattcaactcaaccctcttctgtctcatcaccctccgccgataaaaccattattcccgacgaccaattctccgtcgccaaagtatttaatttgttctgtcctttttattttaaatataatataattcatgggtacagaagattaaattgtattgttgcttgcaggtttcatttggtgtaataggtctaagtcttggagtttcactcttggggtatattctttttctttctttcttttttttttgttatgtgtaatgattatatataaattataatgttttactgcacaatataaatatatataggtatggttttggagcatatttcaatattcttccaggatcagaatggtctgccatcatgctcacatatgggttccctcttgcaattattggcatggctctcaaggtaggagcttcatgattttctttgattgttagctttgttaatccactcattatgtcaatttgttattagctactatttgtgaatatcaattgagattagaaatcagcaggattttgctttcatataacgaattaaactcaataattaactatgttaggatatgccaataaattgaagatagaaaaggaaagtaaaaaaaagaaaggaatgaactgagaaagagatatatttttgtttggaatggcctgtttaggccaaaaaacagtaatggcttttaactttgtgttgcagtacgcagaactcaaaccagtgccatgcgtgacttattcagatgctctacaattgagggaaacatcagctactccaattcttaaacaggtgcttttgttgaagtctttgtaaacttagttgacaataatttataatttacaataataattctgcatattttctggattatttgctttttgtttgaaaattttcaacttcactgtttagttcccttttctaagtaaactagtcctttgaggtctgttttacccaaattccctgtactggcctttgtcaattgttttcagttgtatttatgtagaggatgcagtgtaaacagtcaaaggctctagtttagtctattggtcaattcatagaatagattagctctttgatcattggaaaatcttcatgaatttatctattagaactgggtccatgcaaagcagatgtatttttggtggttggtgatgcaaattaaagttttctataaaaatggagaataagtaaataaggaccttattcttgtgggctgcttaaaactatactattctcgagtatacgggtccatcacttatcatttgcttttcttgatttataatatgtgtatcttaatctaaaaatgaataataatttcatttccttaaaactcatcgtccatttggtgaatagcagaacaaaattcaattgacatgtttctggcatataccttgttatactgtattattgattgcttcttcagcttctcatacataagttatgctctgtgtatttagtgccattactaatagactgacctacaaaatctttttcttcatggaagatgtttcttacacagtggattatttttcctatgaattaggtcaggaatgatgtaatcagatatcgctatggggatgagcagcatttggaggaggcattgaaacggatattccagtatggtctggtatgttttccagtattctgatgctctttcttaggttggtaggaaataatttggactgcctgatgtgtattaatctagcaaagagtgaaagccatatttagaagataagtaaaagataattggattggacaagcaaaaattgaattattcttgcattatcaatactttaagacaccagtgcctttcttctggtatgaatatttctaactataaaaattgtggaactccctgattggctaattgacagagtggaaattgtttgagttggtccacatttaatagtaatgcatgaacaagaaaaatagtccataaattacttttctaatatataagtgatagcgaatgtgagtttaggaaaagcattcggtcatctttcaactttgtattcctattatgtggtagctgctttttgaatttctatttgtaatacttaatatacacgcatccttaaaaatatagatttagatgttattagtttcgttgaagaaaaaaaaatgtaaataaggaaaaaaaattaatgtatataaatgaaaagtaaatacaagatattactaaatattggatgcaatgaaagaattgggaatacatgaaatgaaagaaaggaaacaagtaaatcaatgctgattgtggttctctggatgctgatgacaattgttaccagctttctccactccacaacgtaaagaaatggcattctgcttctaaataatgtaagttaagctcgtttgttttgtctcctatggcccggtgaggagtctttctcaccaggaggaagtggtggcaatggtggaaaaggatgaaaaggcatgccgggagcaacaacccaactccccccagtttcaggtacttgaccaaattgctttataatggacagaggaattccatatgaaacaggtgagccagagagaaatttctcctgtggttgcccaacatgacaaacaccaagtgataatgagaaccctggtggaaaatcatca

SEQ ID NO: 43737 - DNA, 1359 bp, Cannabis sativa
aactagattcaccatgttgtatcttgtatggtaattctgatattgcactactataactgtatatgattgaatcaaaaggataattactagtatttttctttgctttcagtaagattgtatcatcaaagagcatttttcttttgtttttgggtatatatgtgtgtataggaaagtaatcatgtcatgcacctaaagtaagtgataagacaacgattgtgactactgctaggaattttaacacgattgttctttgttcacctcagcggccttgtacttctttggctaatgaactagagaagcaatgtaaagttgggttgagttgggttgggcatcaacttgtaaaacataaaaaagaaagagaaaagataggaaaaggagtatgatagaataaaagtggagaatcccaagctttactatgtgcaatagtatgatgacgtaagtattgtccctaggtgcaccaagcaatcaacccccactgagtggggtcagtatgttgagatgagttgaactgaagaacaaaaaaacaagtcatatttctcacttcttccacattctaatatgcatactttttatctctctctctctttctctctctctctattagtttcttctctcattcacttttgaacttattataacccttcatggtcatcactcatcagtcataaccatcccatgcagctcccaccttgacccctccatgtaataaattgagattttttaggaaactaaacagaaagaaaaatgatttccctagaagaagtaattgatgatcataatagacagcaaactgaagaattattacttacagatgttgttaatctcgatgaaactggtgaagacgaggactacaacaacggcaatcatcatcccggggagtggctgaatttgagtcttaatagtactagtagtagcagtagcagtagcaatattaatactatagctggagactcagatcagctacaacaaccaagacagtctgctccttctggcaaggtattttcttgtaacttctgcatgagaaagttttacagctcccaggcattagggggccaccaaaacgcccacaaaagagagagaggtgcagccagaagatatcagtactctcacaggtcgatgatgtccatgatgagcttgatgcccttcaacacctctactacttctatgatcaggtcactcggcgttcacccccattcgttagtccacaagcggggctgcaacagtaggcttggaacttcagttgcagccagatttgatgaagaagctactcctggccttggaatggtttggacttctccatttccgcttgatgatgccatggatttgatatggccaggaagcttccggatggatcatcaa

SEQ ID NO: 43738 - DNA, 4366 bp, Cannabis sativa
gctggaggtatttcgatccttaaattatagtgcatatataatttattaattccgcactttattcataatcatgtatgtttcagtttatattatattctaacataaatatatataatatatattaaaagaatttagatatgcaatgcaagtagacaatataattgtttgaactagtcttccggtcttcgttcaacaaaggcatccagaattctcaatatcagtagtgtccaaattttctagagtggttctcctactcctacgtgaaaaaattactttattattattattaaatcgcgtgcttcgtactgcatcccaatacttattattacatattaattacatgtcagggatgacaacaatcactacaagatataagttgttcttaatttataatattttcaaggcatggttcttgacagtatacgcaaagataaacaaaaccaattattagaaaatatgtaaataaaacgtaagtttggaatttggatggttgccttttgcttgcttgcaaaatcagagattgatcacaatctagaacatgtaaattcatgtaaagggctcgtgattctaggaattaaactacataaaactaactaaatattccacttaggtactgtggcagttaatatagcatctacttagtgagtaaacgttgacttacactattacaaggacctaaaatagaaaagcaggcgacccctccttaccatataatgatcacaaatcgccaaatttgaaacttaagtaagtgggaaatgcatatgcagctgttggttttaggctccgtgttctcatactgcctactatagctagttagtcctcattttccacttgcagatgcagtctaaaaataaaaaccacattcacatgagttgaaatcatacagagagattaattttcatattgacaaactctcaacctgatgagtttcttcaaaatgactaatgtaaattcaatcccattatgcagttttttcttccttctttttcttagccaaggtggagtactctcccagtcattgcagaagcaagaacagtcagtgcttctgaggctaaaacagcagtggggagaccttccttatatgagtcaatggattccatcatcaacaaactctatttctcactgctcttggcctggtatcacctgcacctctaactctgtcactgctctgtatctttatgatgcaaacatcaccactccagttccttcttttgtctgtgaccttaacaacctcacagacattaatcttggctacaactacattcccggggagtttccaaaagctctgttcaactgttcaaagcttgaatctttatacctctccgacaactacttcgtgggaaccattcctagtgacatcagccgaatggttcagctccgaaatctttctctcgccggtaataacttctccggcaacatcccggcggctatcgggcagcttaaagaattgagaagactcgaactaggggccaacttattcaatggctctttatcgacggaatttggtagcttgtctaatcttgaaattctgtggttgtccaatattcaaactctctctccctcaaagctgccttccaactatacccaattgaagaaattgaaaacattgtggattactaactccaatttgatgggggaaatacctgaaagtattggagatttgacagcgttggagtctttggatttgtcccagaataacatgagtgggaaaatcccagatggaatattcaagttgaagaacttaagtgagctttatcttcacaggaacagactttccggggagattcctcaggtggttgaagctctagagttgaggttaattgacgtttcacagaacaatttaacagggagaataccagaagacttttccaaactaagcaagctcaccggtttggctttatttatgaatcaattatccggaacaatcccagaaggcataggccgattgcctaatttggtggattttagtgtttataccaacaatttgtcaggcgttttgcctcctgatttgggcaagtattcaaagctcagaacgtttgaggtttcttccaataggcttgaaggcaaattgcctgaacatgtttgttctgggggtgtattgaccggagtcgtggcttatgacaacaatcttagtggccaactgccggagggactaggatcgtgcagttctttgactatgatcaaggtttcgaacaacaaactttcagggaatattcctagtggcctatgggaatccttaaacttgactcacttgatgttgggcaacaactcattcaccggtgtgcttcctcagaaattggcctcgaatctttctctgctcgaaatcaatgacaacaaattttcaggtaacattccgattggttcatcttcctggagaaaacttgtggtttttaaggccagtaataaccgtttcacaggatccattccttatgaattaaccactctttcacttttgacaactctttcccttgatcagaaccaactcacaggagatcttccatcacatattcaatcatggaagtccctaaacattcttaatctccgtgaaaacaaactttctgggcaaattccatctgacctttctttcttgcctactctcacctctttagacctttcagataatcaactttctggccaaattccatttcaacttggtcttttaaaactcacttatctcaatctcgcatccaataagttgactggaactatcccacatgcattagagaacggtgcgtatgctgatagcttcttggacaatcctggtctctgtacaagttccaactatttaaaactcaagctctgtagctccttccccagaaaacaaaacaaaatttcaacaccatatcttgctttgacaataacactagcaacagctgtcttcttgttagttgtgtcctttttattcttcataatcaaaggccgttggagcaaaaatggacttgattcgaaatggaagctgacctcattccagagactgtctttcacagaatcaaagatcctgtctggattgaaagaccataatctgattggaagtggaggctccggtaaggtctacagtgtccctgtgaatcgtgaaggtgatgttgtcgccgtaaaaagaatatggaacgacaagaaagttgaccacaagctcgaacaagaatttcttgcggaagttgaaatattgagtttaattagacattccaacatagtgaaactcatgtgttgtatctcaagtgagagttcaaaacttctagtctatgagtacatggaaaaccgaagcctagaccgatggctacacggcaaaaacaatcaacgcgttgtctcaaactcagccaacggttccgtccatggtgtcgttttggattggcccaagaggctacaaatagcagttggcgctgcacacggcctctgctatatgcaccatgattgtgtgccgccagttattcacagagacattaaatcaagcaacattttattggattcggaattcaacccgaaaattgcagactttggcttagccaagttgttggtcaggcaaggagagtttgccacaatgtcttccgtggctggttctttcggctacatggctccaggtaaatcttattaacaaagctacaatttctctattaattatgtttaataaaattaacatttaattttcaaacttgcagagtacgctcatacagtaagagtcaatgaaaagattgatgtttatagtttcggtgtggttctcttggaactggcaacgggaagagaggcgaacaacggcggtggtgacgagcacagctccctcgccgaatgggcatggcgtcacgctcaagaagacaagcctattgcggaagctttggatcctgaagtaaaagagccatgtaatgttgaagaaatgagttgggtcttcaaggtcgggatcatatgtacggagactctgccttcccggaggccttccatgaaagaagttgtacaactcttgcttagatgtagccgtccagtgatggatttagatgaaaagttctccatgaccgaatgcaatgctgctccgctcttgaagaactcgaagcgtgagaatgttttagaagaagatgatgacactacttttgcgagcatggtatgaatatgatgatgtatactatacgtagttttgttgtcttagtacaaaataaagaccttagtcctaatggattaaaggtttaaggtttagaagcagttttttcagtagagcagagttaattaaccacttattcagtcttaaatagatagtgttatgaaactctttatgtatatattttcttacacttgagttagagtagtcatgaaataaaataaaatgatgagaacaagtgtttgccgaagaatcactcaccctccgctattacattaatttttt

SEQ ID NO: 43739 - DNA, 3001 bp, Cannabis sativa
gtatggatacgatttgatctttttgttttcttcatatccaaattgtagttttgttgattgttgtggcattattgacttaagtcgttgatattgctatgtatgttgtccgtctagtagctcagttttatattttgattccgtttgcttgtgctgggatttgggttttgaagttaattgattaggatgtgggtgaatttataaaattacctttatttttgttgttactacgttttaattgattatttttgctctcttgatttgataccataggcttcgccatagaggtcctgattggagtggcttgcattgtcatgggaattgttatcttgctcatcaacgtttagctattgtagaccccacttctggagatcagccactttacaatgaagataagactgttgtcgtcacggtactactagctctttttacctcttcgaactattgtgtgtaggtttatgtttactaacgttaatatcaacttattaagaaggtttttattaatattggtaaagttgaattaacacatacagattgtctcatgtatttttccttttgtacatgtcattgttcagattgggttactttccgtggaagtgtttttatttatttaataatgtgttattttactaatatatcaacttgacacctttctcctgtgtgattgttgaaattgcggtcataaggttaatggagaaatatataaccataaggaattgagacagaagctgaagtcacaccagtttcgcactggcagtgactgtgaagtcattgcgcatcttgtaagtgactaagaatatatttcaagattgatttgtgcttggtgaacaaccatttattataactatgattttaatgctttattccccttttcatatttcttcttttggtacttctatactttcctttttagtgcatcacttatgaaaatatgtcattgccattggcagtatgaagaatatggggaggattttgtgcatatgttggatggcatgttctcctttgtcctccttgacactcgagacaatagctatatagcagctcgggatgctgttggtattaccccactttacatgggttggggtcttgatggtatgtaaatttatccccgtatgtgtaatgtactgtctggtcctgataataatagtttaagactttgtttcttgaatacgagctgtataagagatgttaggaagtgtaaaaactgtaccgcttcataatcacaataacatatactctgtattctttgattcagaatttgagagtacctttgattttcagttcatctattatttgctcttgcgtagttttattttttactgtttgcgaatttatgatttcatttttattttagaagttagtgagatgataaaatgaagaacatgtttattacttaatcatctgcagcatcagtttggtttgcttcagaaatgaaggctttgagtgatgactgtgaaaggtttatgtcgttccttcctgggcatatatactctagcaagcaaggtatgatatatcatgcttatgcatattttaagctctctattattaagtgaatggaacaataaataaagataagatcagatctgatcaaatcaaatcaaatagtatctcattcttgtactataaaaaactcaagaaatctacaaggtggtttcaaaacttaagcgcccgccacgtatctctgtttggaacaaatttatttgctaactttatcggttgatgaatgttatcggttgctaacttaaaacctattcttacatcataatctttttcggttgatgaatgttatgttttccatcttatgaattcatcatgtatttgcaggagcaatgagaagatggtacaacccaccatggttttcagagcaaataccttcaactccctatgatccaatggtccttcggaaggcttttgagaaggtaagctccaattttttttttactattttgttttttatgtatttatatttccactactcgtgttcggtaacttgcagccagtaaaacataatttcctatgatctagaggacctcagagttgtgttctctaagtttttgagattcatgggaattaaagccctaaaaagattacagatcatttacaggccactgactattatcttactagtataatatactgacataaaagccccttttgaaaaagaaaaagtcccttaattattaatgtataaataatatgtttggcaagactgataacatgtgcattggatatgaatgttttatgcttgttcatttcctacttatacttcagaagtggtcgacagattctgctaattcgatgcttacttgttgccaggacgagttgcaaaaatgggccaataatttatgtgggttttattattgttattgtctacgatgagtatacttgataagactgtggtctaagctagctacagaaatttataggacatagctcatccgtcattaatgttgatacatccccaaatagctaaaaaagacatttagtaacatctacacaacttaaattagaaatctcccaagagcgcaagagtcattagattgttgatcaattagcaaactacgaattactgtaatattattttatgaatgataatgatattgaatgcattctgttcatcttgaaatctttcaggctgttctaaaaagactcatgacagatgtaccatttggtgtacttttgtctggaggcctggactcatcacttgtggcagctgtggcttctcgctttttggctgaatcagaggttgcttgtcaatggggatctcagttgcacaccttctgcgttggtttgaaggtcataacaactatttactgtatgacagcatgcgtctacttacattttatcccattattaatttttcttttagaagatttttttccccattgctgtaatttgactttatttaaatttcaatatgcaatgatctttttctgaaagaagaaaaaaaaaccgtaaaaagtaaagcaaaatttggataatcccgtatctgtcttgtttttat

SEQ ID NO: 43740 - DNA, 1196 bp, Cannabis sativa
tctctcttcgtccttctctcttcttcctttttaatattatcaaatcctctcaaaagaaattctttgatatcacaatgcttatttaaattatgaagctgaacaaaagaagtatccctccacacaaatttggctctagaacactctaagagggcatgagtgaccgattcaattttggcagaacataatgaacacatagggttgtcaataacattcttcttatgaagatttaaagaagataggagaacatgattgaaagctttccaaacaaaatacttaattcttgatggaattttcagagtccaactcgtgctccaccatttttcaaagaaaatagggttagatggggagggatagggagaaaaggatgaagatttggccaggtggtaagtcaatcacagtaaaaatgccagaaggatgtcacccccaaaagagacaatcatccatagagggatcaactaggacatgaagaatagcacttacagtatcattggagaaataagaagtaagtttctttacatcccaataatcactatcatcaatgaaataagaaactgaatgaacaaggggaagggcattatgcttatactgaagagaaccaacagcagggacccaaggagaactatttgttgagataaacttaccattttctactttctaaatcaaccctttcaaaagcaagtctcttccccataaaagacttcttcaagttaaagaggaacaatgaactgaataaaatcattattcttgaaatattcagcctattagaaataattttagctgacaactttataaagtgtagaagataaattataataggcttataatctttaatctcaatagctttcttctttttaaggatcaaaactatagtagtattgttaatcaataataaataaataaatttttataaaggttgtcaatgtaaaatcatttatattccatatacagtattttaggtaattttgactttatttctcccaagtttcttcacagagtttcttttacaacaaacggggaaaagtaaagaatctgttagatgtacaacaaattccttaaatagcacaacaatttccatccatacatatatggggtttatttatttttatactttaaattattattattattattttttttatttttacaaaaatttccataaatatatatagataaatatagaaagatctatgttttca

SEQ ID NO: 43741 - DNA, 1552 bp, Cannabis sativa
ctctcttctctttcctcttacgctatctccgatcggattttcattctcagatttgtgttaatttgaaaagcagcgaaaatgcacgggaatcagttgcttctcgaggagcctataaggatggcttcgattttggagccttctaagcctgtaagtgattttgttgctttctctttggttatacttgttttgatcagctactgcgtttgatttgtgagaaaaagcgggaggaaaagagcgagggaatttgaaaaagaaaatgagtgacgtgtggaatatgtgacgctttgtttgaattttgttttgtgaaattgttgtgttgatttttcgtggaaaatgaccgatcaaggcagttggttgaggatttagaatttttggtttgcttttcatttactactgattttgctctcgtcaggctttgaattttaagaaaatattgttgatctgtttctctttttctgtgaactgaagttaaatccaattgtcaattagtgaagtccacgacaacaaccaggcactttgattttgtcgtgtatatatgtatcagtgtttatatattttgggagaattgaagcaattattggctcataaatttggaaatgtcttgcgtttgacttgacaagttgagtttagtgtgtagcttacttgattttgaagtgtcagtgaatattttcgctacaattcatgaaaaagagttgcagctcatgatttttatctgatatggtctggattattaaccctgcagactgtttatccttcgatgacgaagattgttgggacacttggtccgaaatcgcgttctgtcgagatcatttctgattgcctgaatgccggaatgtgtggtactaatcacttttttttttctcatttgtccttatcagctttttaaaaatttaacgttatagtgggtagatatttctatctgagatttgagtaatttttactgacaattttttactttctgtttttcttttccttttttagtggcaaggttcgatttttcatggggtgatattgacttccatcaagagacattggacaatttgaggaaggcagtcaagagtaccgataagctctgtgctgtatgccctttttcattcttacatccttgcgatctgtaaataaactctgaatttcttttttcagtttcctgctattagcggtttttgtatgattaatacttttgggtgcttctattttttgctcagtgggtcttaattaggttttttgtttttatttttggctaatttttttgccctttgaaatattacaaatcacgtcccctaaatttttaaggttaaaaatgcctatgaagtattgaaattgttaaatttaaagacttttgtctgattttttgtaataaaaataaacttcatgagacataatttagtatatataaaagttcgatggacatgattgggtagatattaaagtctgatgatttattacataaaccatcattaaaatagtaaaattgaataaaattagacaaaaattttaaatctaaattgaagagaaattttgaagggcaaaaaatcttaattagatattattt

SEQ ID NO: 43742 - DNA, 3519 bp, Cannabis sativa
  modified_base (3221)..(3227): a, c, t, g, unknown or other
tagcctacattttttcatacttaatcgtgctcgtgccaattttgtgcaatatcaaaaaatctgatccgtatttacaatactgctaaataacaaatgacagaaattatataattgtatttttttttttgggaataaacacttaataattattgaattaaaccaattgataaatattttttactatactaaatttatgattaatttataaaagaaaaaaaaattgtttataaaaataaaaaatactaaatgagattgacatttttgatactaacctaaccttttgtcccataaaagaataaaaaataaagaataaagaactataactcgtcattataggagtcttcttcttcttcttcattagaattcccactagtgttcccataaacctgtcttataacaggattacacacctcttcaacctctttcaacttcacatcatattcttccttctcagcactttgattctcatccaaccattcaagagcctctttcagagtattctcaatcttttccttatcctctgaactaatcttaccaccaagcttgtcattgtcattaacagtgtttttcatgttgtaaacgtaggtctcaagtttgtttctggagtcaatcttttctttcatcatcttatcttcttcagcaaattcttcagcctccttcaccatcctttctatatcttcttggcttaaacgacctttctcatctgtaatggttatggattcaaccttctttgctgctttgtcctcagctttaacatgtaaaatcccattcacatcaacctcaaaagttacttcaatttgagggactcctctgcaacaagaaaattaataaaaaaaaagaaaaaacattataaaactttgattatatgaatacatagatcacattgccactataataccaacattaacatccaaatcaattagtgtaattacgtatcgatttatatttaacaaaatttagggttgaggttactatgatttgaacacggaccttaaaattatttaaagtttttacaaaaatactaaattttgagtaaaagtttacaattttacggtcacatgaatgtctttttataaaagaaccgtaaaacaacaaaacagaacaactaaaaacaacagtgaaaacttaacacaatatatacacagtatttttgaaaaaaaatacaatattttttaaaaaaattccatcacgcagtaaaaatagtaaaaaagttgaaactttcagtacgtagtgtaaaaagccctaaattatttctccaaatatcaacataggtgtattttgtggtcctttggattttgggtcaaggatagtatttttaaaatcactaaaattatatttttttttggggagcctagattgagtgggcgctaggcgcaaaccaggtcttatgtgctacatattactaattttattctaatctttatattactaatttgaagagaaaagttactaatttttatttttagttagttaccttggagcaggtggaatgccagagagatcaaatctgccaagctcatgacaatcttttaccaaggatctttcaccttcaaatactctgatggtaactgtgctctgtttgtctgagtaagttgtgaatatttgagattttttggcagggaaaactgagttcctaggaatcaattttgtcataaccccaccagctgtttcaattcccaaacttagtggagtaacatcaatcacaaccacatctgaaaacatcaaacatcaaacaacaaataaatattatatcttagcataaaaatactcacaacaaaaatcccaaaaagaaaagtttaattacctttagttttatctcctccttcaccactgattatggcaccctgaactgcagcaccataggccacagcctcatcaggattaacacccttgtttggttctttcccatcaaagaattccttcaacaattgttgaaccttaggaattctagtactccctccaacaagcacaatctcatgaatatcagttttcttaaggcctgcatcttttaaagcctttttcactggccccattgtcttcttaaacagatccatattaagttcctcaaatctagcccttgttaatggctctgagaaatcaataccatcgaaaagggattcgatttcgagcctcacttggtgctgattactcaaagctctcttagctctttcacattcttttctaagtttcccaagagccttgctgttgttacttatgtctttgttatactttttcttgatcaatttgatgaaatagtccatgactctgtgatcaaaatcttctccaccaagatgtgtatctccacttgtagccaaaacttcaaagacaccattatcaatggtcaagatactgacatcaaaagtaccaccaccaagatcaaacaccaaaatattctcttctcctcctttcttatctaaaccataggcaaaagctgcagcagtgggctcgttgattattctagccacattgagcccagctatggtgcctgcatcctttgttgcttgtctctgagcatcattgaaatatgctacacatatacacaaacacatatatgattaaataatccatatgcacacacacacatacatatgtatactcttaaactaatttataattacctggaacagtgatgacagcatgggtaatttccttgcccaaatattgctctgccgtctctttcatctttcccaacaccatagcgctaatttcctcaggactaaacacctttgtttcacctttcactttcacttcaatatatggtttaccaccattgttgactactttataaggtaaaaatttgatatctttctctacttctgggtcatcatctgtttaagaaaaaaaaaaaaaacaagtaaaaacccaattcatatatcactctgttcaacacaaaaacataataatgaaaaaaagttggtaatctttgttttatctaaatacacgttaaagtattattaatacttatcgtactttctattttgaaatcgtaggtacgcttcgaatataatcattgaaattttaagggaattactttatatatactgtttttttaactttttttttcaaatgtaatatttgagtttctaaagtggttgcaacgctagttgcaatagaggtttctatatgattttttttgttgtaaattaggttgcaccgctaattccaatagggatttctatgtagaattctgttaaaatgcaaaaaaaaaaaaaactgttttnnnnnnnaaaaataaaaaaacccctaaattttatctctacgatcaattatcttccattatatcaaatctaaattcaaatttatatatttaattacacatagcttagagtagtttaatatgaacatcaaataactttttatagtcacataaacgaccatgaattacattatgcgaccataaattatcattatattcgcaaaacaaccataaatttagataacttgtttttcaagaaaacaaaacataagatagcaagtaaataatagtaataatagaaaacttactttctgccaataagg

SEQ ID NO: 43743 - DNA, 2330 bp, Cannabis sativa
aattaatatttttaaacggttgtaatggtgtgtaaatagagttacttttcacataattgtgtgttatgtttgtgtgtgtgtgtgtgttcatatcattactttgtaaatgtaaatatatatatatgtgtgtgtgtgcctatagttatttttgtatagcactaattcgatatatttccttatttcgattttcctaataaacatatgaggtaagatcatcctaaaacagtaacaattgaaatgtgattaatttttttttaatgtaccctacaatgtcaaatgtgtctaaattaagtttgcatttctcagcgaagagaatcaacttaatcttgggtaattcctatgcgtgcatgccatgtttagatctaaaataaagtatccacttacagctattaattagtaacaatagaaatcggccagcttctgtttttcttctaattatactaaatttaattattattttttacaaaatgttttgaacttttaacttaatcacaggtggtcaattatagctgctcagctgccaggaaggactgataatgatatcaagaactattggaacacaaagctcaaaaagaaactcatgggtttggcacctcaaatttctcagagaaaagttccactagtaccatttcctaattcttctcatgagatccttactacttccatttataatattgaacctctacttcctataccgtcactttataggcctttttcttcaggcttagaagatcaaaagttaaataggatgttgtcttcctcttatccaaaaatcccacctagtgctactacttcatttaattttcaaactcaaatgccagagaagtatttggttgctaatgctactaaaactacaaataatgataatgatactgatagtagccctatctcattctcatataactgtatccctgtgaaggataacaatattctttctttcggaagtaatcaaggaagaagctgtagtagttcatctgatgggagctgcaacaagctgattagctatggtggctgtaaactcaagcaagaggaactacaaatggcttttcatcatcaacaaccatataacattaatatgggtaattttaataatgtttttcaagaacagatgataatcaactatgacgataataatctgacctgggctgctcaaaagccaaatgggtattttggagagagctcattagagaaatattcatgcggtcttgatcaagatcatgatgttaagcagctaattagtagtagtattaataataataataataataataataattttattaattttgatgaaaaaaagacacaggacaaggtcatgtacttctactaaatatatttatgtacatatatattattaatattatttttcattttgagctgagatatgactgactgcaagtgaaatcagaaagatttgatggggtaagggggcatggtcgtgcggtggggcaaaaaaagagattcagtcataaaaggaaaagagactttatttgaggagttgatgtggtttatttatttatttatttttttttggatgaaaagagacttttatgttgtgcatatttctttttcttttcacaaccttgcggtaataataataatattattaaggataaatagcggcataactaccaaaagttttaagtttgtaagttacataatcttaatgtttatttttagcagcataagtaccccatgtttgtaaaattataatttttttctaattttgtcagtacaaactatgttattttcttaaatagatcacatataagatccaaattttagatcattgggtctagatataaatatatagtatcatttactttcaaatgcttctttaagaaattcaaaagagagtctgtactcacaaaattagaggaaaattacagttttacaaacattgggtacttatgccactaaaaataaacattaattttatgcctcttataaacttaaaactttgagtacttatgtcactatttaccctatggttaatattaatacttcagggcaaacctagaatcgtggccccaatatgttgtcagccgaactagatagaaaaataattataataataagagagttatctataattgtattattaattatatattgttttaagaacaagaatcttatgcccaaacgaaaccaacaaatgcaactctaataatattatagtttatacagcttttttgatattttataatctatatataaactaatataaatatgtatatatggatattttttaataggtattacccatactaaacaaatttaactataaatattaattttaaaaatattaaatcatcaaattttgatctaat

SEQ ID NO: 43744 - DNA, 1493 bp, Cannabis sativa
tttaacggctaaaaaaattcagagcatgatttgttatatgttaaagttcgggaagaaaaattactaattaactaaaaatatatatatattatacaaacaagaatatagtgaaattactcgaatcctcactccaataatgaaaaaaaaggtagaatttctctacaattttgttacattaataaatcaataaattacataatttacaaaagaaaaaaaatgactaagatggtcattgtgattattattttctttcactttcttgtttgtacttttgtagtgtacctccgcttaacgaagcccaaaaaaaaaaaaaaaaaaaagtccgatggcatcctttcctcatcaccgtttcttcgaacccgggacgactgtgtggataactgtcccactcaatttgccatctccatagcattcgtcgaagctttattagttttaataaagccaactcaagtgagttaagaatgggttggctttattattaatattaattattcaccaaatggttttctccgccaatattccttgaagcaacggcctagaatcggaccagagatggaggtggcaatacctttgaaagtcgtcgagattgaggaaccgactagtggagttggccgacgactcagatcgggaaatgtatcggagaatatcttcgaagagtgactcttcgcaagggatggcgagtgggccatggtggctgaagccgtaaacttcctcggcttggtgaagaagcttcttgaaaactgggtggttcaagtaggaagcccgaaccacaaatctcctgcaactgctgcccacacacaccgccacgtgtcctgccggaacatcggacggtgtcttgttgttggctgatattctcgccttgttccgccacctccgtagcatttgcctcagccggacaatgtgacggattttgctgcattttacgaatccggtagtcgtcattaagtaatttcaaagatagaaatcagaggttaaaataaaatgtttagagttgatcgatgagtttgactattaattattgagttgatgagactgagtgggaaatgaaattttgggggattggacaaattggaaggtggctggtttttatagacaccattattacaaagtgcccttagttttccacataattaccaactcatgtctcttctcctatttttcaaccaattttttaagggcatttgttacttagacaccttaaagtgaaggaagttttatttccaaacaacgaaaatctattatacttatgtgaagacaggaagataatttgagtataatatttatgaaaagagatatatttaaattaaattttatttgaatataaattagattaatatataataagaaaaagtattttttaacttctcctttaaagtgtgtaatactacataaaagtggtattataattaattaataattttttatatttattaaattaaaatatgtttgatttaatgttaaattgctctaataataatgtcactttttatact

SEQ ID NO: 43745 - DNA, 3299 bp, Cannabis sativa
gtgtgtaagtgttatttgtgtaattttttttatttagagtgtatatttatttatttggtcaattaaaaatatttttgtaatattttttttttttttgttaaaactaaaatattttttaaaaactaatctctatactttatagtgattttatataatatttattacaataaaaaaaaatgaaggtatttttttatatattctgtaggtgatgctctcatcctcatcatcatggtcactactctcgctcacttggacaaaatcacactaatttcaattcaaattccaatggctctccgtctctgtaatcccaatccgcttagctactgtcatttccctccaatttcacacataccgactaccgccacaaccagattctcagtccggggctccatttccaaccacaatgatcctcgcaaggtattctattatttctcctaatttctcttttttgtttggttgccaagaaaatagtaaaagaaagatacatatattgaataattaggttaattattatcgcaagttttgtgtccttttcaagctgtgcagctagtactggaagtgaaagagaagcttgagaaagatcatcattatcttccggttggtgaaaatggaagagatgatgaagatatgattttctggttccttaaagacaggaaattttctgtcgaagaaaccgtgtccaaactgtccaaagctattgtatcctctccactaatgcctaattttatctgaataaatataactaaaaatgtcatatttttctctagttcattcacttgaaatagtgctaacaatgaattgatatgaaaaattaaagttttgagttatatgtaatgggattttttattggaagtttatgttgtgagttttccatcatcaactaaaagaaatggcgtcaagaatttggagtgtctgaattgactgaagattctgtgaaaagaatggctgagactggaaaaggattcgtacatgactttctagatgtcaatgatagacctgtgctcgttgtggtggcatccaagcatattccgtctgtaagttttacagttaaattacatgctttcattttcgcctttgaatgtttcgggtttatgaaaaattgtccagtgcttgatgatgtgcctgtgctgtatagtccatttggttgttaataagatgcattagttcttttaagttattaagagttagtcccacattgataatgtatgaaaataaattgtgatatgtaagatgaatgggctacttctcttattgtcaattggttttgtatcacagccacttgtgatctgttgtgagcctaaattgccacctgttcatatttctccttgtgaggagagtgtattaagagttagtctaagatgaatgggttactcatcccattctttagagttaaaaagtacttttgtggttagagaaaaatcaccatattgatttgcaacctcttatcttattggtgctcatctcaatctatttttggcattcttggaaatttttattgtagctaataatatataaaaatgtgttgcaggagcacgatacagttgagaatgagaggctctgtgtgtttttggttgaaaaagcattgagtaaattaccaccagggagagaagacatacttggcatacttgatcttaggggcttcggtacagagaatgcagaaataagattcttaacatttttggtacttcatagacatacatggctgcttgccctctttcgagttttatgttggaagaaagaattagtatatttggttttccaccctaacattgtttatgtatcatctgtatttactataaattatatagatataattccacaatgtgttatcgtagtgatattgtagttgagatgatactttcagttttttctttcgtaagcatgaaagtatgctcacattcaaactaattttgattgctgttttgatctctacacttgcagtttgatgtattctactattattatcctaaacgactgggtcaagttctcttcgtggatgctccctttgtgttccaaccaatctggcagcttacaaagcccttactcaaatcatactcatctctggtatgtagtgcatgttatcgctcattaaacatagtttagatatatcctgagttgcatttgtactcttttccaagatcgattggtaaaattgttaggagggtgtatctatcttatagctaggcctggctttctaagctttcaaaagaaaaaacttgcttacttgcaaattgcaaattacaaattacttgaccgtgtcctctcgatttcaccattagcaagaaggatatcatttgtggattatttacgagtctaatgcccttgatttagattctaatctttgatactatttttttgctgtagtgtgcttagacgctacattaaatcatattcttggtgtgaaacctggtttatttgttctatttcaaatttaattctgtactttaatttgaaatgaagtaacttgattcatttgtaggcgagattttgttctgtggagactgtgcgaaaggagtatttcaaagaagacacattgccggctaacttcagagctgagtaacattactatatcacatggtataatagcattgaatatttgaaatatttgtttcagatggaccaaaatttgcataatctcagtggagtaatcaaactagagagtaatactcagtagtcattgaacaaactattgtagatatacaggagaatctacatatcctggagttggagaaaaattgacccacatttatatttcagaatgaaaataaaagtattcataagtactcatattttctgacaggaccatcagaaaacaacaccaagtgcatttatttttgatgacttttaattgtgatgacaacaccaagatgagcatcataataggttaaaaattgaaaagagaggtagcacagggcaatcggtatttatgtacctgtacattgtaatggtgttggagactggaatgatatatattatttgctagattataacttttatactttctgagttttaaattagttaaaaagatgatgtcatttctctaaaaataaaagaagaaaaaaaagaaattgatgaatccaacttagttaatggacgaatttaaactatttaaaagaaaattaataaaacagctagtgtaagttgagttccacaattaaaattttgctgtggataaagtcatctctaatctatctttcttcttttttgaatgataattcaacttttattagataaccatatcagtcactaaaataggtaacaaaacagttagaacggaatccaaattgaaattacaatca

SEQ ID NO: 43746 - DNA, 1860 bp, Cannabis sativa
cagacattgtaagtctttctactgctaaatcaatttgttctttactcgctaaccatggagacacaacaacaagcattgaggatttgttgagtacttataaagacaagttgaactcaaatgttgtgcttcaaatcttgatgaactatgggcagttgggtcgaatcaagaccttggaattcttttcctgggctggaatacaaatgggttttcagtttaatgattgcgtgattgagtacatggctgatttcttaggtaggaggaaactgtttgatgatatgaagtgtcttctgctgaccgtggtttctcatagtggtcgagtttcttgccggactttttcaatttgtattaggtatttaggtagacaggggaggattagtgaagccctttgcttatttgaagaaatggagtcaaaatttaggtgcaaacctgataatcttgtatacaataatatgctttatgtgctatgtaagaagaattcatctgagcagttaattgatcttgcaattacaattttccggagaattgaattgcctgatacttattcgtatagtaatgttgtggttggtttatgtaagttcgatagaattgagactgcccttgaagtgtttggtgaaatgggtagaaccggtttggttcctactcgatctgcagtgaatgttcttattggtaagttatgttcgttgagtgctaaagaaggggcaatagaaaaggttagagtggctaataatcgtaggccttacacaatcctagttccaaatgtggttgtaaggagtggatctatacagcctgcagttaaggttttttgggcagttcacggtttgggtttgatacctagctcgtttgtcacagtcgagctcctttcggagctttgtcgactgggtaaaatggaccaggctcttgatatattaaaagttgttgaggacatgaagctgagttgtttggatgaaagttactctattgtgatgaatgctatgtgtaatcatcgttgtgtggaggaagctagccatttgtttgggaggatgctctcctctggaaagaagcctaagctgtcagtttacaactctattattagcatgctatgcaagatagggagtttggatgatgctgaaagggtctataaaattatgaacagaaacagatgtctccccaataatataacctattctgcattgatccatgcctacgttgaggctgaaaattgtgaagctgcttatgacttgttgatggaaatgttgggtttgggttggtctccacattttcacacatatgatatagtctctagacttttgtcacaagctgggaagatggatatgtgttgtaagttagagaggaagttggaaagccaagctttgcagaaactctgtaaaataggtcggttagaggatgcttatgagaagctcaagtccatgcttgacaaaggtctttgcccaccagggtatgtgagggaaacttttgaacaagcctttagaaaacatgacaagctgaacatggctcaagagttactagatagagctgaccagacacagaaatctgatgaaaagaaatttgaaatgtttagtaattaaatacgtttccttttgttaataacagtgtctcatggttcctcatctctcattggctccttttaatctatgcatctgctatctattgtttgtgtatatatatacattgtacatactaaaggagacatgtcctttgatgcatgtgtatacataaacataatataaatgatgacttttcccttggtcaaaaaatttgtatgagaatcaggttgttattgcaatgaattgaaaggtggagtgaattaaacacaattgtggttcttctcagcaaaagtgcagattttatatccatcgttat

SEQ ID NO: 43747 - DNA, 3018 bp, Cannabis sativa
aattaattaaataggaaaaagataaaagttgttaagacaaaagacacgtctcttgtcttaatttagacatatgcactgtgtctacgcccagtattgtaaggtgtccctattggttttatatttttagattaattaattaatttaaaaataaatatttaaatttgaaaagtagttgagatattctcttaagtggttaagagattccctaaatcgttatcgaatataaatatctgtaacataatttagttatattacttattcaaataattaattatgatttaatataaaaatttgaatttaaataattcattaaacaaacctttattggatttattttatataatgtataaaaagttctattttgtttttgaaacaatagatttgtacgtaatttttttgaaagcctaaaaaagttttattagtaaatctttttctctttatcactaaaagatacttcttgctcattggttgagatataatcaagaacttcgtatcactattatcctactagcccacactattctttgtgtgtggtgaaatgtctagaagatcaaagtgtgagtttttgtcattatcgttccgagaatacaatatatgaaaagacttgaggatgccctgatagacttcgagaggtacatattcttttcatatatttacttttatatatatatatatacatatggtgaccttgggcatatggtacaatgataataagaaacaactctttcgctgtgtacctgatttagtaccataaaactaacacgcctatcttcgctgctaaggctgcatccaacttcttgttcttctccaaaaagcactttatagtggcttcaagatcaggtaagaagttataacagggttcaaagttatttattttctagcacacaaaaaccccgtcctcataacgcttcgcgcagtgttgagaggtaaccggagaaggaagttggatggtcttcttagccgaggatggagtcgcttcacgtaaacgaagctccttcagctccatcgacatattgggaaaaaataaaaattaacctgataaagctctttttaagcttagacaatcatgacttaaggctctcattctccagttggactttgcataagtctgcctcttttagaaggaaagcttgtttagccgccaacagttgggtctaagcttgattaattaagtcttgactctccttcattgacttctccgtatcagttgtcaacttctggtcttcctccctcaatgtcttctgggtcaggacatcgtccttcagggtctccacctcctcctttgcccacttcaatttggcttgtatctccaaaagcccatctaaggtagcagctgcatgaccttggtcaattaggttcttggacagtcgaccaacctaatcagaatacacacaatatgatagtaagcttgagtgattgagaaataaagaagcatatgatagtgaagacaattcaactcactgaagccaacaccaagcttaaattttgggcctgatagattttattggaggatgcgcaagccacacatctcttagcaagaagttggactagatcagatactaaattgttgacaatatcaaaggcaaatggagcaagggaagagccaaggaaattggagaaccataccatcatagggtccaagttcaagttatgcacctgtgtagagtactctccctggagggctccatcttggttctcatccaactgcctttttaagattttagccttcgcactccatttggtttgctcttctataggaaaattatgcctggtgagtcagagttgcgtgtgagccttgtctgggtggactggagataaggggatggaatgctcccctgagaaataagtcgcctctgaagggatcctagagctggatgtatcttgggatggcgtcctagaagaccaggacctctgggacgaatccaaattattcgaagagtgctccttttgcttacccttctgacctctggatgggactatttcactctccttaagcatgattatctttgggtcattttgacctattcctgctggacctcttggagtcacaagtacccccgggacttcagcagccaagacagcttcgccccttttaggatcaacatcaaccatgtctaacaatgcaaaagtatcatccatttgaggacctacaaatcaaaagaaaaataaaccccataagtatcaaatgaaaaagcaacacaacaccaacaacaagttagtcaagttaaatagatgttattagaaggaaccaattctaccatggcgttctgattcctcttggacaaattgatatataaaattactggagtcatcattgcctaagtagctatctgacgagaggaacaaactggagatgatgtaggaagagtgatcctagaggataggaactggaaggcctgatcccatccgagacctacctagaaaatccctaatatacaaaaaatacgagaatattcccagacaaaaggtacataagttagggataaaggagacttatgaacacaagataaactggcactaggagttcctgcattcagcataggaaatgggaagcgaggtcgaggggcttcaagacccttatctgctccctcatttgccttccgtttggtagctctttgagcctaggctattaggcccttcgcgtccttcattctacgaaaggtacaacacctttatcttagacatcgggacaaacaaccttcaagaggttcgagtccttaacactataagaatcttttaggagaccaaccctttggtaatttgtggttgtccatacaaatatgtgtgctctgcataggcatgccatcacattacaaatccttcgggaggaaactaaagagttggaataattgcaagtcctaaatcacaaaattgtgagttgagacttggggggtaaaggctatatatatatatattttaccaaaatatgtagcaagtgaataataggtcatttgtccacaggattaacataagcacatggatgtttaatataataagtgtttagtattttcctcaagg

SEQ ID NO: 43748 - DNA, 4861 bp, Cannabis sativa
ttctgcgacgtctacggcggcggccgtgacggattcgagttcaattgaggttgattctgtgacggaggctgagttgaaggagaatggattcaggagtacgagacggaccaagttgatatgcaccatcggtcccaacacgtgtgggttcgaggagctggaggctttagcggtcggtggcatgaatgtggccaggatcaatatgtgccacggcacgcaccagtggcaccggaacgtgatcaaacgtgtgaggaggcttaacgaggagaagggttacgccgtcgctattatgatggatactgaagggagtgaaattcacatgggagatcttggtggagctccttcggccaaagctgaggtaaaattgtctgctttttggcattgttgaatgtatgtttaatgattaaggagacaagaaaaatgctttgaattttcgcttattcatgttgttatttgcttatgagctatcaaaaatactaatataattagctcttcatttgttggaatgagattgagaaaagaaaaagacaatctttattaacatgcctcacaaaaactttccaattgataattattttatgtaggactggtaaaacttctcattttgtctttgtttagactacaaaaaaataagattgagaaaagaaaaagacagtctttattaacatgcctcacaaaacctttccaattgataattattttatgtaggactgtaaaacttctcattttgtctttgtttagactacaaaaaaaataacttgtaacaatttttgaaatttgtagtgattctggttgagagattagaattggatgtagagtaacatttcttgtattaacctcttcaggtgaaagtgttttctagtggccatagttgtaatcatttactctttgtatgtaggatggtgaaatctggacctttagtgttagaacttacgaatctggtcaaccagaacacaccatcaatgtcaactatgatggttttgcggaaggttattatgtctaaattctcttatactttttgaaagttgaaagttgtggaaggttagttttcacgtagaaagaactaatgtcaagtgtcttgtcctgttatgtcatttgcaatgctgcagacgtgaaagttggcgatgaacttgttgtggatggtggtatggtaaggtttgaagtgattgagaagattggtccagatgttaagtgcaaatgtactgatcccggactattgctgcctcgggctaatttgactttctggagagatgggagtgtggtacgggaacgcaatgcaatgctccccacaatttcttcgaaggtcagttaattttttcttgcttcctctataaatttcatcttttcaacaaacttaaaatatattatttcgacacctagaacaatgcaaagtttagccttgttatgctttgtatgaattatgccatttatgattgctactaatgcattttcctttttgaatgtcaattatctatcttattgctcgtgggaacatgataagtattgagcaccaataggcattggccggtggctatcttacaagttgaattttaaaagcattttttgaagatgtatatcatgaaatattattagaatgcatatcttaaaagcatttgttgtgaatttcatgattttattttggtaatggcatagttatagtccataaatttctacttgatagattctgagcttaactcacaatagattggtcttaatcctctttcatgagttgcatcattttactactcgagtaaccactgcatttttctacacctagacctcaatacatgaatgttgcataagcagtgcagatttctttcacccttttaatggtaaggagttctctttgattttcctttttgtggaccggtgcatttgggttgatatatatatatatatatatacatatgtatgtttttatatatactaacactcaattgttcatgtatttagaattgtggtaatggaatagctatagtccataaatttatacttgataggttctgagcttaactcacaatagattggtcttcatcccctgtcatgagttgcatcaatttactactcgagtaaccgctgcatatttgtacatttagacctcaatacatgaatgttgcataagcagtgcagatttctttcaccctttaaatgataaggggttctctgtgatttacctttttgtggaccagtgcatatgggttcatatatgtttatatatatgtatatatactaactctcagttattcatgtatttaggattggttggacattgattttgggattgcagaaggtgttgagtttattgccatatcatttgtcaagtccgctgatgtgatcactcatcttaagagctaccttgccgcaaggtctcgtgataggtaattttctctcttagccaaaaagaatggaaatggaacatccatccctcccctttcccccttcttattcctgttaggcaaatttcactatgaggctgttttgaagtatgggagttttgaggtgggaatgagaatgtaggaactttctcatgttcttaccaaatttgaattttaaaataatctaaaaaatgacaaataaagatttttatttaagaaagatttgtaaagccttttgtaccaatattttagtttgaaatttgttcaaaaaaaaatattttagtttgaaatgagaaatgtaataatattaaaaataaaataaaagataactctcttttttaaaacttaaatttgattttagaatttaataattgtattttttattttattttgctgagtattcgtttcatgagtaagttcatttatgaataaaaatctgaaaaaaaaaaatatttgtaatctcttaaaatcacatttgctctttctgtctttcagtatactatatccataaaatatattgttataatttatattaattttatgaaaatattaaaaattaacaaattcatactcatgctattcgtaactaaaaacataaagtgacattcttaggaatcagatataagattccaatggacaacaaaactttcgctaaacacagttaatactagtttccaaactatcatatttgcctcctcaactttctcattattatgaaatatttaattgcttctacgaaacgacgcctatatgtctcttgtatctaagtttctttagttgacaacttctcttatgcttctttctacacgtatatgtgcagttcttctctatgttccttcattgtttccatcatgatacaaactttgaaagtaatggacttgtgcttttttgatgcagtgatattggtgtcattgcaaaaatagagagtatcgactcattgaagaacttggaagaaattattctagcatcggatggagctatggtagcaaggggagatcttggtgctcagataccattggaacaggttccctcagtccagcaaaatattgtgcaactttgcaggcagctaaataagcctgtcattgtggcctctcagttacttgaatctatgattgaataccctacacccactagggctgaagtcgctgatgtttctgaagcagtaagacagcgagcagatgctctgatgctctccggtgagtcagccatgggccagtacccaatgaaggcattggctgttctcagaagtgttagcgtgagaattgagaagtggtggagggatgagaaacagtacgatcctatggaactcccagacattggttcttcacattcggacaacatctcagaggagatttgcagttctgctgctaagatgggtaagtacttgttagtcatatcttcttatcgctaattctagttcagtggccatctattatttgcttattattatgctctatgcttggatatatttcttgtatttcttgaaaacagggcaaggcttgcatgaaattaaccctcggacaattttcatgtgaaatttattaaaattaatctaaaatggaatttatagaatacacctatttgaatgttttaatgttactaatagaaaaatcatcactttccagtccactaaatgtttattttctggttgtgtaagttgtctacttgtcattttgaatctctttacttggaactgtatacagtgtggagatgcttattttaagtgtaaattcccaagcttattgcgtattcacaaagttattatgctattattgggttgtgaatgttctttgttctatggttgatcttatattgatttgaattgtatgatttgtatgatttggcagctaataatttaggggtggatgcccttttcgtctacacaaagacagggcacatggcatcactcctgtcacgttgccgacctgattgcccaatatttgctttcacttccacaacatctttacgcaggcgtctgaatttgcaatggggtctcataccctttcgcctgagcttctccgacgacatggaaagtaatctgaacaagaccttctctttgctcaaagcccggaatttgatcaaatctggcgatcttgtaattgctgtttctgacatgttgcagtccattcaggtcatgtatgtaccttaagagctatcaaaactgctttaatccaaaatattggtttgaacagtttggtagatggtggaaagatatggagaattttaacctattagagtagtcatttttccttatcggtccaccgttggatttctgcttccattatctagattacatgtcaactacatcgatggtggattttttctgatttgtcatgaaattgttcagtgtgaatgccccattagatgttttgacatctggcttggcaaatgatgcattagtgtcttctattttgatgttagttaaaacagtttagttttgtgtattctattgtaatatgatttgaactaaaactttctttatatgaaaa

SEQ ID NO: 43749 - DNA, 3761 bp, Cannabis sativa
taaaattagataaaagtccttataaatctaacaatcttaatagttcagggaaatttttaacggcaaaaaaagttcaaggatataatttaatacatgtcaaaattaatgggaaaaaattgctaattagcctttgccttacatatacaaggaactaaactaattacacttcttctttttttcccaaaactatgtatttagttcattttctggtactaaacgtattttcactggaatttgtgaagtattattgctcttttcttcacccactggactaatatgattttatatatttatatccatacttactatagtaaatatatatacatattttatattaacaatagttttaaattattaattttaaaaaataataaaagaaatatatattaatttacttttcctattactataaaatttatattttttaaaatagaatatatataaccttatgaacggttacattttttataatcactataattattacatttttttacctgtaataaataaattagtaataagtaaagaaaataagattaaattaattaaaatatttaatagatattttttagtaattagtatttatttataaataattttatttttatatttaagtctctacaataatttttttttaaaagtcaaatcatttgactataatatttgcaataaaaaccttatttttaaacaaaaatgagacttttatcccttctaaaatatataattaatttttttgaaaaataattaattaaaatacaaacaaatataaatattaaaacaacaaaaaaaaaaaattcatttgaaaaaaaaaaatattatttaaggagttgaatgatgttgcagtaaaaataaaaatacaaggatgctgctatacaaaacaaagctaatttataattactttagctaaggcggtaatctcaatcacagtctcaatcttttgagtctctgcaagttatattgagcccctacatgcctagtttgctctctcacatatttttaaatttctctcttaagtattaatagcggacaggtctaaaagagaaataacttcttcttcttcttcttcttcttcttcttcttcttctttgaataattagtattttttttctccttaagctttcgacactacctaatcttgcctcctaaaatatgcggcttgttaaaatttctccctaaaatatagcagttcgtaatcatgtccttcagttagattctgtttcttttattattaaataattagtatttttacccttgaattttgactaatactaaattctgtctcattttattagaaaaaaattataaatttctatgaattctgaaaaaataaaaattattaaaaaattggataaattattaaattaaaaaaaaataagttaacttaaagaaacctaacttattcctaaaaaacattttcaaacttcatttatttacaaaaacatattttaaaaaataaaaaaaaaattatttatatttatataaataattaaaaaaaatattttaatcaaactaagattttatgaagaaaaaatctagtttatttatatttacaaattcatattttaaaaaatacggataaattattaaaaatctaataaaaatagaaaattatttaaaaaaataaaaaattaaactaaaaaaatagggcttttcatttttacacttcaaaacagttttttttttcttttcttttttgcatttatacggaattttacatagaaacctctattgcatctagcagagcaaactaaattgcaaccaaaaatcgtatagcaacccatatagaaaccaccggagaactactttagaaacccaaaccgtaaatttaaaaaaaatagtatatggagtaattctccaaaaaaatattatgtttacttaaacatctaaatattcaagataaaaaaaacttaaacttattcacgtaaaaattaattcttagactaattgaattttcaatatacttttaaatctaaatgatttttttaataaaaataattattttttaaaatcgcttaattagttttaaaatttaagtttcatttttgttatctcttgaaaaattgaaagaaatgggcattaatttttttgtagatacggaaaaggctataacatctcaacattattttgggggccttattcaaagacttgtgtgtcactatctctgcccaatggggtcctcttaatggggtcctcacaccctcaccacctatggggtcctcacaagggggcctacgcctccatcatctcggcccaaagcgggtctcactctcccaccatcgtcttggagcaaaaaagaaagtcccctcaccactctccttggtacctcctcaccttggaccaaaaagggaagtctcctcaccactctccttggtacatcctcaccttggaccaaaaaggaaagtatcctcaccactctccttagtacctcctcaccttggaccaaggaggtggatcttcacacctccatcatctcagaacaaatgggggttctcgtctcctcatgtcatctcggcctaaaggggggctcacgcctccatcatctcggcccaaagggggcctcacgctcccatcacctcaacccaataaaggggcctcaactcgacacgtgtctctcatgactcaccaacatgacttggaagacacattcgacttttatcattttttagatatttattttgaaatgtgatttttgtattttaaacttaacctgaccatagttacgggaaggtgtttctgtggttaagagattttaaactctagatgaaaacatatataagggaagtgaagtgacttgtaaagggaccccgattttgattctcacgaaatcattttcttgagctcccattctctcattctaaaaactcacttaagaattgaattcttggagaacataattctggagaactctcctcaagcattgagatcaataacattctaagtggactagcctgttaccgccgaaagagggtccactataaaatcctcgtgttcatctttgtcaaattttctttcacaaactggtttactttgattaactcttacttgtgttcatcttgctcatttacgatcttcttgaatccattgacaaaaaattaatttttaattttcttaatcattcaaaataatttttttaagatctaaattactttttttaaaattatcaaaaaaaaaaaaaatgttgaatctttcttatttttatttggaaagagtacgatttgatagttgtcaaagttgctaatttacaaggacatgttagcatttaaattacaaaatggaaccaaacctaataaacagaaggactaaatttctgtaaatgtaaaaaattttggtgggagatattaacaagtcgtatattttaagggatataatatggtagtgtcataattttagggttaaaaatgttgattattattattttttggtaatgtttatatttatgggatttgttgattcagtagtgttcgtaattttttacgtgctaattagcaaaaaaacaaaatatgtgttcgaatattgctgggattttttagttttttttctacttaatttttaatctaaaacttaaattgtcacttagatgcatttaaaatatgttgtttgtgaattatgattttattttttttaatctagatttgtcttacctattttttttttaaagactaataatatattttttttttgaataaatcagggaatttattaaataataaactcgttcaaaataatataacgcacttcagaggagcaatcctccaactgaa

SEQ ID NO: 43750 - DNA, 3162 bp, Cannabis sativa
atgttcagttcttctctgggtatttttctctctgtctgttatattgtttctgtctataaaaaccttttcttctgtgctatggcgagttctagtcatagttcaccttgtcatcttgccttgaatgacgaggaagatcttattcatgattttggtggggtttctttgggaaatggcccttcttttgagtcttattgtctagttgttaagatttttactcaaaaaactctcaaacctgactggttaatcaaagctatgagggaggcttggacattacactatcttgttaatttcactgaatatcattctgggctcttccttgctcacttcgaatgtgatggagataggcacagggttatcgaaggccaaccttggcatttcgatcactgacttatggttttcgctaaccctgaggggcttgatctctttcattctgatcagcttagatttgttccttcctggatgcaaattctttatattccttttggctttcgatctcctaatcttgctagttttgttgctgatgatgttggtgatctcattgagatcaacaaaactactctgcttgaaatttttggtcctttccttcaaatctgtatcttgcttgatgtttctaagcctattcgaagggggatgcatgtgttttctagaaatctaggtagaactaagtggcttctgttcaaatacaagggtcttcaaaaatattattatttctgcgagaggtttgatcatactttttctaagtgtggttcattccttcaacgatgtgatgagggatgtgttcctcctgtcctgccttgtaaggagaacgttatagctcctctgaaatcgcattttaagagagatcatttcgacctggctgattctactccttttgacgaaatgaatctaaggtctttgaggcagaatcaggacctccatgatgctgtcaaccagtttctacctcagtagaattcatcccttcctccaggtaatgccatgactttggctcctactgctagccagacagttttctcgcctccttcttcttcccaggaagttgaggcttctgcttgtcagttcagtggatttcagagccttttgtgtgctgtctctcaagttactatgaatgagcctcctactattatccatacttataaagaaaggggattcagacccctgtttcctttattcctcatattcctcctagagctctttccattggtggaggttcagctactaagaggtcttttactagacaggatgtggctgttggtacgtctattcggagcatgctgaaacgggctcgggctaatggtagtgatggtttggtttcgtctaatgaatctgatcaagttgtactggcggggttgcttaatgagttttatatgctggaatgctcggggtttggggagcccccgagcattccataatctctccctccctgtgaagtagcataaaccttattttctttttgttatggaaactaagctaggggttggttcaagttttagtttttagtctaggttgtcttttcacaatgttttggagattcctagaagaggtttaggagggggtttgctacttttttagactgctgctgttgatgtacatattaataatttctcctttaatcatgtggactgctttgtaactatgaatgataatattaatactaaatggcatgtttcttgttttatggctctccttatgcttcggataaacttaatacttggactcttttgcatcggttgtatgatattgcccctaatatgccttggtttattttggtgatattaatgattatctcacttttaatgatagatctagtacttctaatcctcctatgtatgctatgactaatttttagaatgctactaaaattagagattttaagccaataagtttttgttctactatttataaggtcgtttctaaagttttagctaatagattaaaaaatgtgcttaatgatataatttctcataatcaaagtgctttcattaagaatatgattattttttataatgtttttattgctaatgaaatggttgatgcaattaatcataggaagtcaggtaagcttggttgggtagctcttaagttagatatggaaaaggcgtttgatcgtgttgagtgggggttcgttaaggctattatgcagcatctccatatttctgttaggttcattagtctaattcttagctgtatttcctctgtttcttttcgtcttcttattaatggctcccttactgataagttttcttctactagaggcattaggcagggagatcctttgtctccctacaatctttcttcttgtttttgaagctttatcagctgctattagattacaggttcataataacctttttcaggggatatcgatttgccgctcagctcccactatttcccaccttctttttgctgatgacagccttcttttttccacaactactgcccacttgtgcattgctattagaaacgcccttgaaatgtatcataaagccactggccaacttgttactttttccaagtccttgactcttttttctccaaacacccgtacttctgaggctgacttctttcgtggtactttaggcctgcagaataagcctttcattagtaaatacttaggtgtcccccagtgttttggtagatcgaaaaaagatcactttactttctttctgcagaaggctagctctaggatgagcacttggagtaaccatttgttctctaagggaggtaaggaaatggttcttaatgcggtagttcaagctatcccctcatacgccatgtcttgtttcagaatccctatatctatttgtaaaaagatagaaagtcttatggataggatccatttcaggaacgtagaatgtaagagaaattcaaatgttataactccattacgtcagttttaatggggttctttaggtaataaggggaaagtccactagaaagcttgggagaaactctgtcaatctaaattttctagtggattgggttttcggtcttttgtgcatcataatcaagcttgctaaacaagcctggcgtgtattttctatgcctgattcacttcttgttagacttttaaaggccaaatactttaagcaaacctctttcattgagcctcataagggtcattgaccttctttcacttggcgtagttgttgggattttatgccc

SEQ ID NO: 43751 - DNA, 2051 bp, Cannabis sativa
cacctaacttgccaaaaaaggactttacaaattctaagttcaattaaatgatctttgaactaaatatccaaatattctccaccactatcagttcacaatatcattactgtcttacctaatggtttgagccaacactataagttcttgaaacttcttaaacattttttatttcttatgcatttggtaaacatgaccatatctagagaaatagtcagtgaaagtgacaaaatactcatatccactcaaggcttatacatttagaggtccacaaatatctgaatgaaccatgaccatatctagagaaatagtcagtgaaagtgacaaaaactcacaaccactcaaggcttatacatttagaggtccacaaacatctgaattaaccatccctagtggtgctttggccgctctccctttgcaaagaaaggtcatttggtcattttgtcttctagacatgactcacacacaggtccacccttggttcgtctatgtagtctatcatagcctacatgaccaagtcgtaagtgtcacagaaatatttcgtaatcattatcgatctttttccttttattggtttctaggcttagctccactaaaaatttcattattaattgcaatgagtgcattaggtcgtagaatataaagttcactttccaaaatagcaacacacaatcgaaatccattacaagaaatttttaacttaaaactaaaaaaaatgtcaatatataatgttgtgattgtaaactggaaacataaattaattttctactaaaattttgaataaaaaaattatccaaaaataaaaatttataaccaaatttaaggtaagcttttcatctagcttggactgacactgaatcaccatttccaacttttagcttcaacttattggatttgaagcactccccagtttcaagcagctggaataaagagcaaatatggttagtagatcagaatcaacaacccaaatggatttatcattctttaaaacacacaattcaaagacaaaagtacaagcattataaccttcattttatgagcaagaagtctgggacatttagatttaaaatgtcccttctcaccacaatgtatacatttaggaggtatctttaaaatctttctactaggtaacattaaagaacctgtgcttaaatgttgccctattattcttattgctggttcaatctgtcgatcatgagtagctagagaaataaaagaacttcccctaattttttcaactgatcatgatggtgtagcattattggaggtttctttcttagcaattttagctttctctttgtcaaatgatgttgcattgctggagaatgacttccttgctgttgacaatctcttttcataagcttgtagtttagttttgagcttgtccatatccgacgggttccaattgttgatcatgaaggataaaaaaaatttgtgatactcgaaagataaactattaagaatgaactaaacttgttgttcttttgaaagcaaaattctcagcaatgaagctttatggagttttgactttaccaagagtaaatgtgatgttattccttgacctggggacatcttcactctttcaagttcatttgcaaaaatgttcacgtagataggattaggatgatgattatgagccatctcaaggactacaagcatcaataaacaacaattaatcacatggttcaatataaattcttacacataatttggaaaatatttatcaagtattgaagatatgtgaaaaaatacaatgaaaacaaaacatatcaaatattatcaaacttttttaactaatgatatacagtaactcggtaagcgaaaatgaaagtatcatttgttaatagagtagttatctcatctaaaatgggcacattttagcaaccttttattctatcaaaataggaattcaacgttgtcccggtaaatgagagtcaaggttatttctattttatgagcttcaaccatcgtctaataaatgtaacctgttgaccttagatttggccaactgacagcaaaatcgaatgtaataccgatgcttgctacgtgttaca

SEQ ID NO: 43752 - DNA, 2013 bp, Cannabis sativa
ttaaaaatcactaaccaaacgtgacttgtgttttaaaaacttcaaaaattattttttgttctcatttctaaaaacaattttttaaaacaaaaaacagaaaatattaccaaacatgctcccagatacctttttatttgaactaaccacaaaaggctttttttttggtgaactataatttttttttttttttaacttgaaagagaggagattccaacttttatgagaaaatgtggaagtgtgaaaccataaaatgttttgggaatatatatgagcgtgaaatccgtcttagggaattaaatcaagaaaaataatatatagcttatacaaaaaagacgaataaattttgatttgagagaaagggctagtcatgattagataataatagtttggccatgtataatgatacatatatatattttgcagcaataattatatatattaaaaataatatagagattatattggtacagtggatatgaacatttacaatagagttcaactgttaatttattttaacaatttaccgtgtttaaattaaaatttaaaaattaattataatcaactactatttcaataaacaaagttacaacaaccaataaaaataataaaataaaatattaaaaacactgaattaatagtgttatccgctataaagtatttgttgtgtacccattatagtcgttctcatacatacatatatatatccacttaagaaggcagaatttagaaatagagagactaataaaagaagaaaatgtggtgtggttgctggatgtcacttttaaaaatcttctttggaatgtggtccgaagggtctagatatgtctttttagcatgggtccctcctcattactatggttgacactgccaacctcaaccccctttgcatgcgtgacatatttaagttgcagttagaataaatatctagctacttactccttactagtgtagcttactactgctactgatactcatactgcgtttctttcacgggctcttcaaaagtagaaagcatctcatatttcaacaatactttattaccaccaactccactccacttgccttcctttagcagagaaaaaatcaatgctgcatatacgagtgagtcttcctgtgtcaattaatcaattctggcgttatggcattttccatttacttacattacatgtgctttggtcatgtccttatctgttgctatatacatatatatatatgatgatgaacatgatgattaagtactatagggtccatatagagttatcagaaaaaaagaaaaaaaaagaaaaagaaataaacagaggtttacttgacaaccttatatttgcctaaaatgttttcttagcattcttgtgttgtgttcagtaacgttccaagtgctttaatgtttctgaatgattttaagtgcatttaccttattaggttgccactgccaaaggccaatgtgtgttaaaacacggtctagcggtataattagcggtcaggaggttgggaaataagttagagagtctaagattcgaattttagaggtctaattattgaagttcttaacatttctattagcactaattatagatatagttgtaaatacgtgtctgttgtgctagtccaatttatattttttgtgctttttaaaatacggattgtatcgtatcgggctgtaaagaaatatgggccatctaataattttatagggttaggcacaatctgcaagtccagtaatttcgaaccgtactcagatattcgtgtgtccatttctcttaaatatactaacatgtgtttttatatggacttaaatttgtgttttatatttttttaacatttttattagaatttgataagctataactactaaatatatgtatattttatattttaaattacttttatatattttttaaaaatcataattataattgataaataaatatttattattgttcttattattaaattattagattttttattttaactttcgagataatatattcatatttacatgttctgttcgtg

SEQ ID NO: 43753 - DNA, 4365 bp, Cannabis sativa
acacgtgaataatgatttgacactcaataattaagtacctacaaaaattttaaaaatataatttaagtattattactattaaaaattaaatttaagtattaatcgagagttaaaacttaaatatttacaacctaaattacctttttctttttttgtcatattcttcactaagtgtaagttattccctttgattaggcatggctccttactttcttccaactcttttgtatacttactcttttgacaatgacaaagtttgtacaattgtaatattattttacaattatctttttcttaattaatttatttaaatgtaagtgttgcttgaattcatttaattctttacacatttttctacgaatgtgaagtatttattgtcaaattttatgttcatatttttgcatttggtatgagaatagtaatgtaaaatagaagattgttgcttcatatgaaaattatacaaaaactcactagcgtaaattactctatatcaataataataattctttttcttttaaaaaatgctggataataagcaaaatattgaaataatctctcctttttctcaaataatcttatatcactatacaagattaaacttttttatttctcagcaaaaaaaaaaaaaagattaaacctttttattactttattttacaatattaaattactgacataagtcaattgtatacgtcatgtacatacattatacattaacatgagactgaaagccaatccaattaccaaatttgtgtaaaaagcttggcaatggacaaaaaaggacttattcatctgtaaataacataacatgtcactctttgcttaagaaaaagtgtacatatatcactcttcaagtaaattcttaagcctcaaacttaccgttcttctcgacgaactgcattgggattagacatcatgtccatcatcattttctcaggtgagtcctcccaatttgtaaatgttttcaagtcaatctacacaagaaagagacaattattaacaatatcatcaaataataaagatttcactttaacaatgcaagctaagctacctttcgtctttgctcagtgaaaagctcctctctctttttcaacttatcttgtctttccttaattctgcctccaccaagtccccaaacttccacttcggaaatcggagcttcgaacggtaggaaaccctgaaattgttgcaattatgttaaaaacattaatctgatcttgttaacaacattcaaaatcaactcagcattaggaatgttattatatacctgttctgggaagagggagccatgttggtaagtcttgtcaactgcatgatggcgaacagtgattcgagcaaaatcttcatcgatgaaaattctctcatttccagctgttcctccaaacccaatacccacaggctttggatgtggttcatatccagtagcatgtaagtggctatagacaaagttcttctccttacctgttatatatacattatatttagttcataacattttgacttggcaaaaacaacaactcctgtcatctgataacataccagtagatgagtaggcgtggaagaccggttgtatagcatatatgcttcctgaacttccataaaacgtatccttattttcaaatccctgatgtgtaagtacacctataatgcatttcttttcggtatcattaccctcagaggcccctcccaaatgagaagatatcaacataatcaaaggaccttgataaccttcaacattagaccagagtcgattcagccctcttccatgaagagatgacctaccaagtaaattataagttaaaaacaggaacaacagaatcagcaacattttaaaacatggcatcaccaatgttggaaaacatagcaagtgcccaatataaccaaaacaagaaaaaaaaacttcagaagcgaaaatgacaaacctataaagaaggttttcatctgctccctctgcctccatgttgcttaaaaaacatattctagataattcttcacttattgtgtttctcatggtaagggatattgcccatgctattccacgtgctaaaagatgggaaacacatacattggatgtggatgtctctcctaattctgatgattgtgaggattccgaattatcctgctgcagttacaaagattaagcaattagaaacctatctttggtggccaacataaaatttcagggaaaagcatcatcagaatacgagacaacaaaagtaaacaaaacaaaaaaactaattatcataaatcagtatgtacaagatcctgcatgcagcttcaattgaataaaaaaaatgctatacctcttgagtgactgagctcagaattcttgcatggacaaattgtgaaaagcaatcagggaggcttgataaagttgacaagatccaactaataaaatttccaacaggaagttgaacttccaggcccaaaaggtcgcaatcccatatgttcaaactgctactaacttcagaagaagatgttagaactgatttcaccagatgattgatatcaggaaggcatagaattgcttttgcttttgaagatctcaaattatgagaatcccataacatggtccaacataaccaaaaaaacaaaaagacatcagtgggcagaagaaaaccactgatcttacaatccgcatcatcagattcgaactccaagttcaaaggaagaccagctttctttgcagttgcaaaaaatactctcaacaagttattgagtgacattgaggaagacattctagcagagcacttgttataacctttaacaaactctacccagctcactccttctttttcaggcataaaaaacaggtctaccattgctgacccgaaatgatccaacaaatccggaaaagcatcaggtattgacggtccttcagagatgggatctttgtaagtcaaactgaagcttttctgaaaatataaccaaaaatactttagactacatttgttgttttatgattaaggttgtaaacagaattaagtactgcattattttcagtcctatcctttgtttggtaagagcattgtgctaatatagatgtaatggttaaatcaacttaaagtaaatatcatattttatcaacaaacaaaatctaaacggtaaattaattgaaagcaatgactagaacttttaattttctcatcatcaacaacttacatatatcacaacagacaatttcatcaaatacttcatgaacataataagttcttggctcattggacctcaagacaaaaacaatttcattcataattagaaaataaaaacaatttattatcatttattatgatccagcattcccaaacgaatctttaaaacattgttatggaatagtactactcagcaagttgaaactcaaatatttatgttcaaattcatataactccaattcggtagcagaatctaagaacttagctcgattaatcataaatcaggaagttagggttttgaattacctcaagagactggaggggaattgcatgagaattgggatcggcgagggtggagaaagtggtgtgaagagaagggagagcaccagaagaggcagcaatggactctgcctcccgttgttggatcgagacgctctccgtggagtttgacgcgcccatcgtcgcctccgccgccgatgatagttcctattcttcgattccggcgatatacagaaatcttgttatcttttctagaaaaggaaagattgcttttttaagatattttattctatcactatcataagagtttatttaagagagaagacaaaatatattatttattattataatgatgtgaagaaacgacgacgtttcgtttctactgaactgacaacaaacacagaataatatcacatgaaagaaactatcagtaagtagagagataagataataaaagtaaaaaccatacagttaacggagtaaacggaattgagaacaatttgacggagttcttttattttatctttttttgcttgaagaagagtgtgtttacaggtgtaagtatgtatatagtggtatgtatatctataccattaccaccaataggtgtatgtatatataggtttataatcctttaaaaaaaaaaatatagtggtattaattgtgtaattaattttaaaaaaagataaaaaaaaattaatttagttttatatatttttaaatctcttattaatttttagtttgattatcctttaaaaatataattttgggaaattctataatacaccccttaaaatagatatattaatgtacacttatctatcttagcacctaaattttttctcatagtcatgtacgttataattatttaagacatcctgtaaaattttaaaaaatttggaaaatttaacacgccgaaaattacattcaaaca

SEQ ID NO: 43754 - DNA, 3002 bp, Cannabis sativa
caatctcctatatatatatacacaaatagtaattaacccaaaagacagttttaaaaatacaaaagaaataattgcagtaataattttcacaatatattgttaccatttgtatcctccaacttcaaaaaaagaactagcatgtttttcctttgactttgaaagcaaactaaacgatttaactttcatcgaatagtgagatggtggaacatttctcatacatcttgaaatttctacaaaatcaataacacaagacaaatattacaaaaagaaataacttaactaacacaatatgatttaaatgtgaagaaaatatgtatatatgtaccagtatccatgagtgtaactgatcgataagaggaaaaagtattatttgagaggattttgtataaatagaagaagaagagattgtactatatatatgtatgggtgattatttaatggttacatttttattgtaacgttacatttttgtataaatagaagaagagattgtgctatatatatatagtccgattttattacttagagatggatcgctttccctttcagaagttgaagtgtcatgtttcaagaaccaatgaaaatttatatctcgtgctataatattaatttcttgaagtatcgttcctttccaaaaaaaaaaaaaaaactataataattatggagcaataataatatcatcagcttatattttcaagataacaataactgagttgtctctcctagttgagtattttcgttataaggggtgacacatagatttaaaatttgaatattttttaaggaaagtatatttttgagttttttttacaaggctgtcaatgaaaaacacaaacttttaacgtaataaattctatattgtaataaattctatatttttgaatattttcgttaaccaagagtctatatataatgtaataaattctagaatatatattaatgaataataataataataataaatataaatgacaaaaaaaaatttaatgtggttttatagttaattcttcatactttacaagtgcatcttatttataaaattttacaaagtgtatatagaatacaagatataatttgtgaattatcttctttctttttgaaattggccatccttttttcctaggtgatgtccctatttataggagttttagggtgacagatattcccttgggatcttatctttgtagccgcacatgaaacatgaacagttcccacgtttcatatttacatcacttgggataataataaataactgttataactcctcttgtatctttatctataaacggttatgctgactacacttctttgtctcgcaatacaaacaatcctcttaggatgctttattctgaagataacttcttgcgtctaagtatactatgggaagtacttctcacgtcctacaaatgtttgattaaaaaagcgaaagcgagacactatcatagtgtgacaactccgagatgaattatattggatgtagttctcttagtctttcaacataatcacgagtatgtgagccaataagttgcaagctcttagagaattcattatcaaccatttctaacatattccgaaatagaccttctacgttgattgttcatattgctggtcatacaaaacggtagttattactcatggctcgtccttatctctaaaaaaatgagttcaaatatttctatcaattgtattttccaaggcaagttaatcaaacataattattttttttataacacaagctggtttattttctaacttctttacacgtgtctcaactatattgcttgctcgaagtatgtgtataacaaattattataataatatttatgaattaaatttgttaagcataaattaatttaataaaataataaaaaagtaataatacttttgattaaaaaactattaaaaatatttagcaaaatagtagagagctttttatatttaaagagctccttatctatttctatttattgtatagttggagctcatattattttgaataaaaagtatgtttagaaagcaaggttggagatgctctaactttacgacgtattatatattcttcttaacattttaatatattttctaacaattggctaatatgattaaagtaaatgttgatggggctatatttgaagcaaattattcttttagattcagtttcgtcgctagggatagtgcaggacaaatcattgaagctatctcaaagtctctactagggcaagctcacctgaagttgttgaggcaagtggaataaaagaggctctcagctggataaagggcaaaaattggtaatttatttctcttgaaaccgactgtccagtgactgtacaaggcatcgaaaataatatgcagatgccatctacatttgggttgttggtttgggattgtaaacaactcctagttgagttgagaaatgttaagttaaattttgtcaaacgttcttctaacaaggcagtgcattttcttgcgtgtagtgcttgttactcgacagttcatatttttcatcatcataattcccctatagaattgttagacattgtaatgactgattctttgctttaataaaatgtcatatttctattaaaaataaataaaaaataatgataatgagctttttaatttttcaaattgtgtttaaaaaatatttatatttttttgagaaattatttcatatactattttaatttttttaaaaaaatttgcggtttggattgttcagatagtttctatatgtgggttaatatgtgaattttgattgtgatttaatttgctctgttaattgttatgggatttttaagtgaatttttgttaaaatgcaaaaaataaataaataaaaaaactattttaaagtctatttttttcttaatttataatacaattatacaattattgaaattgctttcgaatatattaacaagtgctacaaaacaaatatataaaattgttataaaataatataaagtagattagaagaaagaagaagaagatgaagagagaaagag

SEQ ID NO: 43755 - DNA, 1803 bp, Cannabis sativa
  modified_base (33)..(40): a, c, t, g, unknown or other
taattactaccctagtaattaccctacctagtnnnnnnnnagttacttccaaacacactcttaaaataataaaaataataaaataaatggtactgtttcccttaataaatcgtacttgtttgtttggtattgcagcttggctttaaatgggtgagcacgttggctgcagaaatgtagcagaaaatatcaattaaataatttatatttgacaattttctatttggggagaaaaaaaagtaaaaaactgcggacacgtcagcctaagatatatggtaagtcgtataaattggaacgagattggtgtcaatgtttctacgcatccgctctctttttccactttgtcttgctcaaacttaaatccctctctttcaaaatcccagtaatatggttgcctttctttttctgtgccagccaaatgatgccttaaattgtccgtaaaattctccgacgtccacgtacgataattactaacaattatcactcgtgattcttttccttctcctcctcgtgaccaaataatcactcaaaaagtacaattgcagggttagccttcctggattatttgaatactttattttatttcatatcttttgtctacaacactctgctataaatcccgaaattaaagatgagaagaaaattttaactactttatttagcaagtcctttttataattattaaaattttgaaaggggacatgttaacacaggtacatatacatctataatatatatatgagtcggagacagaaattcattgtttaattaatcggtgaggacgatgtcttttgcggcggcgaatgggattgggagagtggatcagaacgacgagagagatcatgacatggtgtcttcctcctccgatggtgatgaggaggagtttgagttgcaggatattagggatcggattaaatcatcacgagggagtcgattcaatctgattgcaaacgagttcggactggcttctgcaattaagaaattcagccgcgaaaatgtcatgaatggcattagagacctttccaatggcgtcgttatccatccagataacaggtactccgtactaatcatagatcctctatatatttctttggatgtttaccaactttataatccatgtcaccaatatacctatactactatttttgaaacatagaaaactgaaattttataacccaactctactatcatcccataaaagaaaatatggcacacaaaagtacatagttttttttttcttttagaatataaaaaaaaatccaaaagaaaaaaaaaagtgaaaaaaaattataataatgtgaagcggaggtgaccgcagttcccgcatagtctatacacgtgactatttctgaatgggcattccgcagtcaaatatataatatatttttcgccagctatttttttattattataatatgtatcatcatatatgtggttatgtggtacttggtaataggagacggactcgtccgtgttttaaaattgtaatcgctccaactattaggtttttttttttttttttttttgaaacagccgactatggtttaactaatgataatctttgatgatataaaaataaaaatgaaattaaaatattacctcacactcatctcatctcattaagatttacttgtttcaatcaaacaccaccttgtaattgaacagccacatttcaggacctcatatttatgtaaaaatctatgtttgagtgatgtgctcacggtttcgaagcaaatccaaattcgatttaataatacattagtatattaaaaaagttatactttacaaaaacacctacagttaatt

SEQ ID NO: 43756 - DNA, 2556 bp, Cannabis sativa
tcaaaatggtgacttattttttctgttttgggtgtttcagaatggttatgtacagattgtttttggtaatatgcttccctcacatcacaatttattcatttggcaggcattttcccgattataactgagttcaccaggcctcatttatcagccttaaggccatatagactcggattcaaggttttatatactctcacatatcttctcttttattttcttagccatgagaggtagttactacaggggtcagatctcaggcctatagttcataatcaccataaggttaaagatttgattcttctgggactatcttcatcccaaagattgttgttttcagctataggataagtgaaaattatatgtttatatgtgttcctttttccttttctagcattgctaatagaaattaatcaaactagctatatcatctgtttatttgttttcaaatatcatttcacagagactaaaatttttccagaagcttgtgctatacgagccaatttaacaccggaatttatagcgactaaaaatttgagttccatgttcttctttgtcaacgtcaaaaatcatttgttcttcaaccttatacatacgtttctatttgcagtttgaggtagaacatcagcttcataaacgtagaacaaccaaattgacaactagaatatgtgcgagttacaacccaacaccgaaatctcctttcagaagacaagagtcacatccccaaaatgtagatcttcctgaaatactaaccaagaaaaagaagaaaccataccctattcctttaaagaagatcaagcaagctgctaggcaaaacaaaaagctagcagataagggaattgagaatcccctcgaacctccaaagaatggactgcttgttcctgatcttatacctgatgcttatgcattactagatgcctggaagcttttaattaaaggtgttgcacaactttggcatgtaattcctgtgtatgcttgcaggtaattatccttcagtatcaccccatataacttttagattaaagctgatatatataatagagtatctaattgctttagttatttgcagtgagtgctccgaggttcatgtcgctgagagtggtcaccacatccagaactgccttggtccaaccagtgcaaaacgccgaagcttccactcatggatcaagggatccatcaatgacattcttattcccatagagtcatatcatctctacgacccttttggtcggcgcattaagcatgaaaatcgatttcagtttgacaggattccagccattgtggagctatgcatccaagctggtgtggatataccagaatacccatcacggcgaagaacaacaccaattcgcatgattgggaggaaagtaattgaccgtggtggatttgttgatccacctaagctatcaagctctacaaatccatcttcacttgttgatctcgatacgtacggggctactatgcgaattccacctccattatcatcggaaatacctagaattgcacaggaaacaatggatgcatatgaagctgttcgatttggagttactaagttgatgaagaaatacactgtcaagggttgtggatattgctcagaggttcatgtgggaccttggggtcacaatgctaagctatgtggggaattcaagcatcaatggagggatgggaagcatgggtggcaggatgcaactgtggatgaagttttccctccaaattatgtgtggcatgttaaagatcccaaaggccctcccttgaggagtgcacttaagagattctatggtaaggcccctgctgtggttgaactgtgcttgcagggtggtgcaaagattcctgagaggtacaaacccatgatgaggcttgacattgtagtccctgaaagtgatgagtcgggcttagttgcctgatcattaggtaaatgtcagttaaaacttaatttatgcatgtacagttattgtttgaagcttgttatttcaggcgacttgacatctaaagttaagatggtatgtagatgaactacttagctgagactcttgttgtatcagaaatggctctttgtgaccagcatattggtcatggtgcaacaaaaaaagctagtcttggtcccaacttagctcatttggaatatcaacttctagcttatgtgtggatttgcacacatttaaggttcgctcaaatcgtcaaaaaataactaaagggaaaagccattagaaagagttcacttgggaagagcactgtaatatcctacgttagtctcaatgactactagtgtcgttaatcattttatatagtttttaattttaaataaaacataatttattttataatattttttttttaaaaaaaaacaaattaattaaaattatttgaaccaataaaaatgttttctgtatgtaaatgtaatattgatataactgcttttggatgtttgactttggaaaaatatgattagtctgaagatggaagtgaatggaaatggaattgaaaataaaaatgaagaaaaaaataaaaccttttctatgttaacggtgcaagattcaacaacgttagcacttaactttg

SEQ ID NO: 43757 - DNA, 1167 bp, Cannabis sativa
  modified_base (41)..(64): a, c, t, g, unknown or other
tagtacataaacaatcattgaaacaataaaattgaatgaannnnnnnnnnnnnnnnnnnnnnnnacaatctcaatagtttatgggaatgtttaacggtaaaaaaaatttaagaaacataatttagtatatgtcaaaattcaagaaaaaaaattacgcttaactaaatctctgattattattacttataataatttcgcgcataatgaaagaaataaaactaataataaaacgaaactttatgcacgtgggatggttgagaaaggagtcattagtctttcagataaggccttcctctctttctcttctcttcctctttcattgaatcacaaaacagaacaatcttatccaaacaaagtctactcagcccgccaaccaccgtgtgatgtccccacatacaaaccttgtgttttttttattcccttcataaataataaaaagcaataattatttatttttataaatggttggtcacttgggtgggtcaaacaacataaggaggttctcatcaaatatttttaataaagaaatataaaaccacagagaataaataaacaaaatgaaagttgaagcaaattgcgttatacaactaaaagtgggttgtctccattccatggatagtggcacctcacggcacgctgtcctttgccaatttttattctcatccatccctattgctattagtaccataacccattctccaatcaatccattgtttatagtttctaataaaaccaaacattgattctaaccctctcattaaataattcccatttatttcatccacctctgacctctcttatgtataacctcaatcatttattaatatttattttattaagtagtggtaggttgtgtttaaaattgtgaatgtaattgagtagtatttatttactataaatattcatttatttatttatttttaaaagagaagtgctaaattattatgcctaaaatagagggtggttatttaatttatgctggaattgacacagatttgactattatttataaagaaagaaaagaaaatcatgtcgtttttaagtctctaaattttcttaacaactaaattgggaaagtatacatctctgtgagtggattaccaaaaaaaaatcatatatatagaatagattgttaaaatttaatttgagaaatggccggtagcagaa

SEQ ID NO: 43758 - DNA, 2419 bp, Cannabis sativa
aaggttaagaattttatttggaaagtagggaatttcttgcctctaatctttctcgtcatgctttgaatactactacaatttgtcttattggtttccaaaataatgaaactattgtccatgctctttggttttgtcgtttgccaaaggagattcgacaaggatggagtctaaagggtttggaagctttgaaggcaacctaaagcttttacgaattgttgattgagtatacatctaattttacgttttgttggagaatttggcattggcaaaatacatttcttcatgatcataaattactttcagataatatggtgagtcaatggtctatgagctttctttggcactataaggaggctcaatattgttctgatcatgctcatgtggtaagtagtagcggtgttgttaggtcgtctaatggtgtcccctgaggatgagttagctttgggtgatgtgattttgtttgtcaatgttggtatccaatcagagctttggtaagtaagtcttggggcagttgtctcataccagttgggtgtcgcaatgtactcgaccgcaaacccaatcctatcttcgaggctcatgtggctaaggcggctgccttactataaggtttgctcttatgtcttcatttggttatacaaaccttatggtattctctgattatctctgtttattgcaaggcatttcaagtaatgaaaagatgccttatgagtttggtacgattgtgagtgatattatctgtgtttggacacttttctctactatttctttgttcagttgaatcaaaccaataattgcattgctcattttttagttaggcgtactctttcattggatgaacctataatttggtggtcgggtcttcctcctgttttctctttttaagtttttgtattaatctttaagtaatatgcgatataaatacttaagtttaatttttgatggtatatttttaaaaattttgtaagtacttaatcgttaagtgtcaaaaaatgaccatatgacaatcctgattggttcatgtcattaaattttttatttttattaaaaaattcatttaaatatactaataagaaattgatacgtagatattgacttagcacttaacgaccaggtacttacgaaagttcaagaagtataactgtaatatttttactataaaaaaattacgtatatattaaattgcaactataaattaaagttaaatatttacatcacaaattactcataatattttgatccacttgccttttgtgcctttttattaaaatatttcttttattctaaaaaaaagcctaaaagaaaatgcattgactctttcaaaacgatgtcgtaataagtgaaaagaaacacacacaagaagaaggaggtcaccgcctccgtgatttgagtttctaaaaagatttgagacaactttgatagactctaatatgaccgcgtctgagttgtcattaaagtccccgcaattagcgttaatgtcaaaggctattctcgtaatttcagttttattaaaggttattctcgtaatttcattactcataattaaacgtttaagtattttcttcttaattaagtttaaataaataaaaaatcacttaggacaaagaaaatccttttgacggtacaagtaagcgaaaatttagaagactcagaaaaaaaataaaaataaaaataaaaataaaaactaaaataaactcttctcttcaaacaaacaagcaagaacagaaccgaatctgcttagcctcaactctttagagagagagagagaaacagagaaagaggcttaatcttcgttcttcaacaaaaattttgtttgttgaagggtttaagcttctcatttcttcttattattcatcgttaattttttatataatttttttgaatttttttgggtgtaattttagtcctggaaggagttcggaagcttttggttactgaatttgaaagatcttttgttattggaagtagatccgggaaggcaatccgagaatctgatcggaaaaatctcgtttccttgtggaaaaaaatatggtattattttgatttgatattgatatgtattgtattgtatttttctttttgtttgtagtttcgtttttgaagatttgtgttgtggaaatgcttgcgattggttaataggttgttgttgttgatgtaagttttctgtgttgatgaagcggcagtggattgttgttgtggtagtaatggtgttgctgtaatttgttttgttttgtttgtttttatgttctgattcatattcagatttatttgaatttatgaaaaattgtgaactgtggagtagtttgtcttttactatttgactgagaatggagttttggaactttagaaatggcattgacaagatagtgaaattgtttagtttgataatgatttgggattttagattttgtttttgacgttt

SEQ ID NO: 43759 - DNA, 1833 bp, Cannabis sativa
tatatatatatatacattattaaaaatacacaggataccaaatcttatttaaatagaacaaaggcacccgttattatcttaacaataagattgttatgggtatcaaaagtacctaaaattaactttatgacatgatcatgtcttataattagttaacaattctttataatatattctagaattactcatctacaatttttcaacttcttttttttttatttacagtttgagtttttcttgtaattttttatgggttactatatgaattttagttgcgatttaagttgttttgttagttgtaatttaagttgttatgtggatttctgtaaaaacatatactatatacaaaaactattttaaaatgtaaaaaaagaaaaaaacaaaactcctatattctaaaagtcaataaatgaaatttaatattgaattgcactatattacccctcataaggtgctaagcacccactataaatgcccttaagcatttctctaacaatatattctgaaagtcaacaaatggcacatctgaccaagcacaagctataaacatagaatgaaggaaaactcgagcaacatggcaaagaataacaaaccctatttccttttttcttgggctccaaaaagaagggtgattctctcttcataggccagcttaactcaaagcaagcaggggacctaaacatacgttgcaaatcagaattaggaaagagagtgagacaaagcaggggacctaaacatacattggaaatcagaattagaagagagagaagaccaaaaatattcattgaagtcatcataattccgccacgcagaatgtgcaactttcccattattgtttcttttagcttcctgtggttcaccgaagtaaaaatgaagaagaaattactgaaacagtaacttggtaacaaatgaaaatatgcaaataaaaacatataacatcaaacagctaggtagtattgtatgtttgaattgataatggaataattttgaaaaaataatgatttcatacactgtacagttagacaaaagtaatatcaagaatacacaagtaacgaaaagatacttgaatctatatagcctcttaccaatgccattatcttatatatcggacaaatgactttgtcaaggaacgaaacagaagcagttacacagatggcaccaggaattgctgctccatgatccaaaatcgcctccaattctattgccatctatagaacaaaatattgttcttatttcttagtaatgctaaaaaactgaagtacatgtgagagatgagattctcatagaccaaacaaacgaaaccacaaaccaaatataaagcaccacgaaaagaagtatttctaaatgagtggttaaagtatattcacaaagccactaaatgcctttaccactgaagccaaagtataaaactattattaggatttgtttatttgtctttggtagttaattagttacagttaattctgttattactgtatctatattttctttcctttcttgttctgtttcggttgtatccgttagtttctttaactaactttctgatttaatgttaagttagttgtagcaatgtcctatataaagtcctgtactccatctgttcttttatcaattcattcagatcaataaaatcttttcttttcttttttgtaatatggtatcagagcaggaaagatagtctttcctgtccgatccttcccttctagctgcgtcgtgttcttcaccttctccgacgaagctgtgtcttcttccgttgcactcttcttcctttctcaagatttcaatcgattttctcctcgtttgattgtttgacatgtctaccaataatcaatc

SEQ ID NO: 43760 - DNA, 2411 bp, Cannabis sativa
catccctctgcaccttcgaacccaatagcgcataagaccccgccgttgtgttcagcgcgtccttagtcgatatattgtccttgagcagcaccggtactccatggagctcacccagcgacgacctcccgtcgcgccacctagcttccttcctcgcctcgccagccttgtccgcctgacaccgcgcatccgggttgacttcaagtacatcgtggagttggatcgagccttgagatccggtcaatgtaatagtcaactagctgctgggaagtcagtcttccgtcggcaaaggcgcgttggatatcagcaatggtggcctctttgatcgagaaatttgagccattaaatctgttgacgaagcttaagagtagtaagatcaacggcgaggagagtagttttgttgaaaggttggcccgcattttctcttaaccatattccaaaagccaaactttctataatatatttggtaagtattggaaatagtgacaccaatgcatgtgtttatctattcaagtggccaaaccactaaggctaacttagtggtgagggagggatgggaaaaaatgggaggtcatgggttcgaactcaggacccttaagttattaagctaatgtatgattgtaaaaataccattacgctacactcaaaaaaaaaaaatctattcaagtggccaattttatgtcctaattaattgtgtttgaaaaaggtaagctttacatgatttaataattgtgttagatctatacttgtttttctttttattttaacattgccaagcatttgatattgaacaaattgaccactataaagttataaacttcttcattgcatttacattggtcccattcgcacgattggaggtggccttcgaaccatggtagcttgttcaaaagcataagcgatttcaatcaacttaggctcagtacctttcaatccaccaaaacatatcccaaatggcattttactgcttaattcatacccagccgggactgaaattgcaggataacctccaatagccagtacagtcgaagctccccagcctagtgtcaccatagcatccaactcattctccttcatcaatttctcaaatccattttctgacagtttcttcatggtgtccattgctttgaacacatcttctccaataccatttgtcatctccgctgcaattaactgctcttgtccatatttcgtcatcaattcctgagattcggcaagagaaaccttgtcaaaataatgaagcaaaaaaaatgatgcgatgatatgcttaccagttcagggttctctaagttgaaagcaatgatatctgcaagggatttcactggagagtttactaagtcgtggagatatttattcaactcgaccttgaactctgttgttaaagcaattccttcgccgctctggttagcgtcattaatgatatcaatattttctatctccaaatgatcaattacggttgcacctccttgccttgagtttccagatcagagtcagatcattaagaatttcgagtactaataagtgaaaaagttttcatgtttgttttagttcacaccttaatgtcttaaggtgacactcgaaggttgaaatagcagaagacccattataaatgtccaaaaatggattccttacaactccaagtctctttcctttgagccctttttcctttagaaattgtttgtaaccacctagaggaatgaattttgcagcagcatttgttgcttcatgatctcttggatcatatcccacaattgcatcaagcacataaaccgcatctgacactgtcctgcatatgggcctaaatatacagtagaaacttggaccattcattaacttttgcatggccaagtattttaacaggttcttctcaatatatacaagtaaagttacccgattgtgtcctgacgtggggacacagggacaacgccggcccggctggtgagaccaacggtgggtttgataccgacgacggaattgtgattagctgggcagattatggaagcatcagtctcggttcccagtgacactgccaccatgcttgctgcaactgatatagctgatccactgcttgatccacacggatcccctaactcaacgtaagggttctgcatatatattgtacacacaaacttcccacttcattattttagacttaagatctattagttgaaagaaaagatttatgtgttttattcagaagaattaaatggtcgatggtaatgaagctaacaaaatagactttctctaactgaagtgaatcaaattctctattaaattcgcaatattaagatggatgatgagaacccagcttagttttctctcaattgtatttctataactctcactaggttttgaagagccctagacaatcagactatcataatatcatcaattcaataaatgggaaaactagt

SEQ ID NO: 43761 - DNA, 5924 bp, Cannabis sativa
  modified_base (4604)..(4606): a, c, t, g, unknown or other
attaaagattcgaaattcgaattacaccttttgaaaaaattatgcttgactttttatgagactcttatagtgattagaagtgttatatatatatttttttttaattttatcctcacttattttttatttttggccccaccttagctccaccattgacaaccatacttgatgcacaataccaacaacaaatatttgagtataagattttctaatctagatacaatagactcgtgtaaacatgcatgcaagtttactcttaagtaaaacattttgagatgaccgagtcatgtgtcataagcatgattttgattttaatcacctaataatttagcaattaaactttatcttcttttaatttagtgggaaacttattatattgttgtttgtgggtggtggagatttctttttccaccaaaaaaaaaaaaggaattttaggagtcttctccttcaatatggactcgaattcctaagagaataaattatatttttttgttttttttttaaaaaagaaatacaagaagaaagaaacctctgtatgtgttcaatacacaaatgacattttggattgagattgaatgccctcatatgcatgtgtatgccttgagtaaagagcaataaacatgtgctgctgattctgaacattgaaagagcatttaatagaaagcaagagttggtattatttaatgcattcaacactttgaaaatctaatataggaggaggccacaccctgctctttcattcaatgacctttacctataaatactgatcaccattaattcttcttccttaaaaaaaataaacaaataaaaaaataactcaaatctcaatagcaaatagacagcatagcatagaataacctcacataacatgtattttaatttactcaatcccagacacatttgtgttacttactatactaaacactacttaaaattctattatttcttgggataaatagcaagataagtacctaaaattttaagtttgtaagcggcataaacttaatatttatttttagtggcataaatacccaatgttagtaaaactgtaattttcctccagttttgtcaatacagattccgttttgaatttaataaaggaacatttgaaagtaactgatactatatattcctgtttaaacccaataatctagaaactagaccttatatgtagcctatttaagaaaatagcagagtttctactgacgaaattagagaaaagttacagttttacaaatattgggtactaataccgctaaaaataaatattgagattatgccacctacaaacttgaaactttaggtacatatgccactatttacccctatttcttgcatatattttaattttatgtaaaggtcgaatactatttgatggtgtaatattaatattagtataattaagtatcgagtcttatatagtttaatttaataattattataaaaaattgctagccatttatagactctacctataatcaatagtacctaataacaataatcaataactcgactcattttttgcttatagttatgtaaactttatttttgttcactaaaatgaagagaatgcctgggttaacttgctcgagaattattagttaacataactttataactgtattttaataaaagtttactcatataatcttatgttaggaatcatttgcataaaaaagaaggtataagcatttaatattttaaattttatatactaaaatattttatttttattttttgagtcaaaaatacctaatgttacaattctcttacacccgttactatcacttccgttaatttataaatatggacacgtagaaaatttagatgcattacgtttatttattttaaaatttaatattcttaatataaaaaattaaatgctatttgttttttttaaaaaaaagagaaagatgtaatactacattaccatagctgagtgaaccagtgcagtatatgaaacatgattatcgaattgaaatgtcaataccatgtaaaaattgttatgagaactaatttttttttaaacaaatagcatatagtttttaatattaaaaatattaaattttaaaataaaaaaaaataaatgtaatgcatttagctcctttacgtgttcatatttatgagttaatggaaatagtagtaacatgtgtaagagaattgtaacattgagtatttttacctctaaatataaaaataaaatatttaagtgtataaaatctgaaacattaagtatttatgccgtaatttacctaaaaaaaaatattacaattctatgttaccacaaacttatgctaagtatcaatgggtgaaatccataatatcacacactaatttagtattatgaaacctcaatacttaaaaattagcattttagtgaaaaaaaaaaaaaaaacaacaaacaatagaagaaaagaaagagcattaactccataaaaggtatatgattggtgatatacaaagctaaaatctaggatgtgggaagaagaatgggcccctcttttgaaaggttaccctattggtactttatttacctgcctataatggatttgcatatggacccccaaaggcattaaatttgtgagctagtggtgttgataatgggggaaatcaaagaagaaaaataaagagaatggcaaacaaaagatgagaaaagagttagtttctgtttattgttggccttttgtttcttatcaagattccatacttatctgttctccaatattatcatttaaattttattacataagacaaaattcaaatgctggctgaccacaagcttctaagattttaacaacagatgttcaaaagtgggactatggtatttttagcccttttctttgtttcttctgtttttgcattacaaagatactataactgtacaattttatttcttcttcttttctaaattgaagaataagaagaaacaagcaatttctctttgtatataatgctagcaactgtaattaaaataataattgacccatccattgaattgaagggttattttatcattattacaattctttccatgtgctcacatttaaatatttaatataaagaaatccatagctcatggcatagaagtttacctgctcagtaatctaaaagaaagaaatgctactatatatatgtatgtatattatagctcatacacacatgtatacacactgatttattattattaattctctagctttgagtataatttaaaaaaagggaatcaagaatatccatggcccatacagagagtgccatcatgtgaaacaaggaataaaaaattattttactcttctaatttttttcctttcatttattgttcaagatgacatttttatgatacaaagctttattgaaattgctggcacattaaattggtgtgccttaaaagcttcttcaaggggatcatattaggaccaccataaggtgagagtgagagagacaggcattgctaaccatttatttatttttttaaaatgaagtaagaaaaaggaagaaaaaattgaatgggcttagacacctgtgtttgtttgtgtcctagagaaccatatgggtcactggtaaactctctaaaaagaataacatgaaataaataactaagttataaactattgaagttatcaaagactttggtcggctatgcttaaaaagattacaaagattctttcttcaattgacctcattagtcaaagagcaagcaacccttgtggcttgccttatgtggtgcacgcttgtttggtgttttgatcaaacatctattatctaattggtatttttttgcaaatgggcaattaaataatcacttaaactttatctctagggtctataaacaagtatgaaaataacaaaatttctcaaagagtgagagagagaagcaaagctcaatctttcttatgaccttgacagataagataaattcatggtttcagagttcaatggtggtaaaaaacactccacatgaaagtttccaagaaaagagctaagcaaatcatgaagcaaataaataaacttagtagtttaagtgcataaagagttaaaagtttttaagtatcctaatgctaaaaaccaccatgagggtacatgacattccttggaactcttgtgacgactaatgaaaacttcatgatggagcaattactttcttcacccgtgatgataataacttcacaatcacatatccacaaaactataggtcccactttctggactcacattctattattatcattatacaatgtgaaaatgggcactctactattagttagctgtgctaattgtctccaatgatcaatatcattttcattggctttatgatccaaatccaaagggtgattttcatagaaggaaaaaattagctccacaacaactactaaaatattttctttgtggaaattattccataatcgtcaaacacacctttgataaaattctacttaaaagaatgaaagaactaaaatctttctccactatctatgatttttacagctgttcagtcacaaccaccatgcactaatataatacatttatataaagtttccttgcttctttcttaccagcatgcactaatacattttggtgttttccttaatatatatatatatatnnntatatatatatatatctatgtgtgtgtgtgcatgaatttcctgttgcagctctagctcaggaataggctacaaatagtgattgttatatttagtttttccatataaactgataaatgttaagacacatataaaaaagaaccttctaacaacgaaaaatggtttacaaagtcttctcagatatggataaaagttggatgacagaagaaaaagaagcccacaattaacagttaccataaacataaaaaggccaccaaattcaagcagttcttaagtagaaaatagcctgataagaaatgctttgatccaacaaatttcagcaaagaaccttgataaaggtcacccagaaaggaaacaaaaaaaaacagtacccagcttcacttatttctacaagtagttttctctttacctactaaactcaatgataaaggatggctaagtatatgtatatatacataaatccgcttttaaacaaaaaaagttgatggatcatgccttcttcactcaagtgaccaatttcagctacatgttatcatgcacaccttttgtatcctaaaaagaaaaaaagtgccataaaccttctttcttaaagctactatgtctttgaaaagtttcaaagtgaagtccaacactacaaaaacatggtcaaagtaaaacttgacatgctcagaactgataggagatgaacaatatgacagaaaatataatcaagtagatgaattatgtgaagattgatatgcaaagtacacatactttgggtttaatctttattgatgtacttcattatatcacatactactatttgtaaagtaccaccttttcatagaggaaaaaaaaagcaattaaatcttgggagctaaagaaagaaagggtggatcataccaactaataatggttttgacaattaacatttatctcgttacctctgcaaaaatttcattcacatctaggcggtaagttctctttcccaaacaagaaatcccacaattacctgaaacaagacataattttcaagctttatctcagttatcacctaaaagcacaaatcttttggggatgttgtcttttaagacattacagtcttttaagatcataaaacagcctgcagcatacaattctcggattggcttctcgaatgctatttatgtctgcaacaagagaagcaaatctgaatggaatagtagtgctagacaatctacctatcttgagcatatgcacaaagggtaatataattaagcttaaatatttcattagtttgcaataattttaagtaccttattaaaaccatcagatataatctaatttacagtttcattattt

SEQ ID NO: 43762 - DNA, 1531 bp, Cannabis sativa
cattaactttttcatcattgtacactaattgagctagggttgttttacctattccccccattcctacaagaggaataatattgttaccattgttattctcatcatcattaagcaacttgtctattaaaattttcttctctacatcgcggccacacacttttgaaacatcaacgaacgatgtagtaatagtattattcgaacgataactttcatactcaatcgcagttctaaaagtgtacctttccttttcatttgaaattctatcgagtttttcattcaatttctctatctttaaacctactcgacgatgcaatccatgtcgatgaacatgatttcgatgtagacaaggaagggtaaaaaaacataccttatcaaaaagcttaagattagagcgaagagcaatagcggtgttccactcatacatagttgtttcaatctcataagacacaacttttagcttatccaaccaacgtttcacacttgcatcgacgatttgccttttatcagcatcaacaagcaccatttgaatgtcttcgagattgttgcttaggttttcgactttctcctcaacaccactcctcaccaaactccattgttggtctatttgtcgattagtgaaggaagccaattgctctaacactaaggaaacaagaacttctgccatttaataatgagaatgaagaagaagaaaagggtgatcacaattgaaatatatcataacactttgatgagtgagtgttacacaaatttataatggtattgaaaaaataagacaaaatgtataataaataaaataatatgtggtaaacttattacacaacggatttaattgtagctcccaagtactctatactcaattcataatattactaattaaatgtaacaattaaatattgacaacattttcacagctttcaaaaactttctttctcttggcttcttgtgatttttattaaataattactcccatgatgctttcatcgtaccattaataaaaaactaagataaggtttttattttttgagattaagatttttatatttttcataaaaacctgcagattgtttaagactatagtttgatgtttataatattgtttatttagaattttgagaagaattaaattcataatattcaattattatattaaagtgcaacggtaacaagtttcctagtaaagtcaaaatacacatgactggactaaaacattacattgattctattactttttgttatgcaaattacaaagctactttttctcctatgccttttttgagtctggttgatgtttggcgcccctcttcacagaattggattaagttgaattgtaatgttaaagtgagggtggagcacatgtccagtacagttatcacgataggccatcaaggtgaagtgatttaggtgacaatagctaaattagacttttgtgatgctctttgtagaaatttatcacgagaggcgactacttgttgcttgacgcttgatacgacaaaaacaaaagtgtacaaatttattattgtagaaagtgatt

SEQ ID NO: 43763 - DNA, 1293 bp, Cannabis sativa
  modified_base (103)..(108): a, c, t, g, unknown or other
aatttttaacggcaaaaaaagttatgatttggtacatgtcaaagttcaaggaaaaaaattactaattaacttattttttaattagtatatttaaattaatttnnnnnnaaaaaataaaaatttaattacctaaactaattgcgtgttatcactttgttattgatttgatgcttgtaattctaaaaatataatttaagaataattaccttttaaattaaatttaagtagtatttatttgtaactaaaaattaaaataaaatatttatgaaacaaattacatatgtatacaaacatagagagtaaaagaaagaaaagtaaggagagtttttgggttaaaatcaaagaaaaagccaaaaaaaaaatgaagtgggatgggaatggaaatgggacccaagtcagatatgtaggtaatggttgagaatgtgttgtgtggcattgtcaagtgtaaatcaataaacaataaccccacattgctttttcaagtttgtggccatggattgattgtgagtttcatttcagctaaccgaagttgacaaaacccatctcatttattatgtcttttgcatccaaaatccacacacatatgacatttttacacacacacacactcaaaaatctccttctcgaatctcctactactactactactacaactactagtagtactaaagggaaaaagaaaaagggcctcaaacactcaaaaaattatataaagatttgatttttatttatcatcatcaccaattcagagttttggtgacctgggttttcttcaatttgtcgttttgatgttgtggctttaaagctctttatttttagtatcccttggattggattattatggaggtgtttttatggggttatgagttagagagatgagattattagaaggtggtaatattaattatgcgaacactttgtgacgcctgtgaaagcgccgccgcaatcgtgttttgcgctgctgacgaggctgccctttgccgttcctgcgatgaaaaggtttttgttttttttttttttgaaaagtttgaatttttatcatttattcatttcattcatcaaaatctaaagaacccctttttataaaagaaaattatttttggaagtgaattttgtttaattgaatcttcccatcatatatttgtttcttagttttatttagtctcagcaaattattgttaaagtttcagtctttagctctttttttgtgtgttgtgttaatttctttgatgcccttttaattaaagctggtttgaatctaataatttggggtcaatttttgtaggtacacat

SEQ ID NO: 43764 - DNA, 2329 bp, Cannabis sativa
tccatgaatcaaacccctcaactcatacttgtgaataatagctgaaggtccttccgcacaaagaatgaaaagataaggagacaatggatcaccctgacagatacccctagtaggaagaataggaccaacttctctactaccatgtaccatcgtgtacttagcagatgaaacacatttaaggatcaaacgaacccaaaccgaatcaaacccaagcttaaaaaacatggcctctagaaaacgccactcgatacagtcatatgccttactcatgtccagctttagtgtcataaagccttctttccctttccgtttacgcttcaaataatgcaaaacttcgaaggaaaccattatgttgtctgttataaggcggccaggaacaaacacactatgtgcttcagaaatgatagaatccataaacgacttcatgcgattggtcatcaccttagttatgatcttgtaaattacattgcataaagcaataggccgcaggtctgtgatcaagttagggttcttctttttagggatgagaacgatatgagcattcccacgagtatcctcaaagtcgccagttctaaagaaactacacaccgactcaactacctccttctttacaataggccaacacttttgaaagaaggcaggtgtcatgccatctggccccggacttttatctgggtgcatttgaaacaccgccaccttgacctccttctcagaaaccagttttaacaattcctaatttttctccattgaaaccatcgtaggaacttcactaacaacttcattaagttccacatcggatacagtaaaaagagatgaataatactcaaagattatacctgataaagcattctcccagtctactaactgcccttgttcattttttagatgttgaatgttgttgttttgtttcctgtttgaagccgcaacatgaaagtatcggctattttgatcaccatttttcaaccagaattgctttgaacgctgtttccaaaaaacctcacgttgatcaagaacttcaaataatttctttttagcctcccggtattgctgtagagagaaaggatctctcttatttttcaaagaatggaacactgccttgcaactacggatccgcaccttgaagttgcttatgagttcctttccctaattagataaatgcaccgcacaggaactgatttttccaaccaaaccagtcgagcaaacattgttccaattttcctggacaatctcataacagttaggctccttaagccaggcattttcgaacctaaaccggggctgatagactacttcctgggcgattttttattcaagaaaaaggggggagtgatctgaagtagtcgtttccagatttgaaagcttagccgaagggaaattcatgctctaagaatcagtaaccatagcacggtcaagtctaacctccacccattccctagttccctgactcttctcccatgtaaacgggtacccaaccagctcaagatccaccagaccacaatcctccaatgccgaattaaaaccatttattaaccagttcagatatctttgaccacctcgtttttcttcatgactgatactgttattgatatcaccaataacacaccaaggaattgtgttattgttcgctaaccatcgcagtaaatcccaggaattccgacgaagagagcagtttggctctccataaaaaccagttagcctccaggtgtaatttgcatcagattcaaccaaaaaatcaatgtaattactggagaagcccaatagtttttcaaactcattaaacttccatagtaaggccagcccaccaccactaccctgggcctccacactaaaagctccttcaaagcccaaataattcttgagccactcaattctagctttgttacactttgtttcacataaaaaaataaagtcgggtttcttttgagatacaatctctttaaggaattgaacagtccatcggttcccaagcccacgacaattccaacttaacacattcatgatgaatggcgggcctgtgaaacagaacccgccccatataagttttttgagtcctccactccagtacaatccatttgttcctctgaaatgtctctaggcccattacaatccaaaacaaagttgggcctccttcttttattgtccaaaaccaacatggtttgactttgtgtacttgtaacaggtggcaaaatattgtcatcaatcagtattgattttccatgcaccatatccccttggattaaattcttattgaccgaattactcaccaaacgaatcccaagaatcgtgggattcattgttccaattggcagagagattgtagcattagctg

SEQ ID NO: 43765 - DNA, 2413 bp, Cannabis sativa
tttatatgtgtttaaattccattgttttagaaattcatatttaggatattaaacaacatagatggtagtaaatctagatcctgataaaataatccctagtagttatctcattgttatgtatgtttttcattatttacttttcttactgagtatttgtgacttacgggtattttgtggtgtaggtaaggggaatggaaaattagggtagccatgagatgataatcttctctggcaaatgtacatatcgacttattcggcttgtgtagtcgagttgtaggagtttttttgagttgcacctaatgtgtaattgatttacttttgtatatagccctttttataaaacttttgtaagaggggttccccaaaataaattttcgtgatgtcatcttgttcattgttatgcatttattttcgtgaagtttttactattatcacagaattgattaattaacctacttttacaaaattatgttctaaaaacatacatgtggtagtacaagttggaatgtggagattataaatgacctttttaattttagggatagtgagctcattctcaatgtccaaattagatttgctgatattgattttttgtattggtctcataatagttttggcatttatttggtgaaagatgattgcaagtttctccattgtgatgagtgtttattggtgaacattaatgatttggccatgtagaatgtagtttggaaactttctgtccctcctaaagtctaaaaatttcctttggcgtgcacttttgggtattttagcaactaagtctcaattggtttctaaacatataccaatagatttggtgtgtccaatgtgtaaccaagaggagaaaactatttttcttttattagtttcttgctgatcatttcctaaagcttcttgaatttgttcttctatcatttctgaaagtttgttgggaggagacttttggacttggtttggtaacttgttgtagtatgcttctgctgcaattcaagaggaggcaaccatggttgaccaggctttttggaatgcacacaatgctgtaatttagagaggaaagagctcccctgcttccgaagtagtgatttcagctagattaacacttaatcaatggaaggttgctcaatcaaaaaagaattgtcccctattttcctttgagattgggtgtggggctttagccttggtctaaactggtttaaacaagattaaggtgaatgttgatggcactatttttgtttaggagggctagtttggtgttggaggtgtggcccgagactatttatcgaggttttctctattagtaagttgagttgtattgatgctgcaatagttaagatttttggcaccaatgagactttaaattggatcaaaagaaagagttgcattgggttcaacttgaaattgattgtttagttgctatccaagttttgcacagttcaatgcatatgccatcaccctttggcttattggttcatgagtgtaagcttatcctagattcgttaaagtttgttaagattcagtttgttaaagttttgtaaataagcttattttcaccgtgagtaatacttcagctaaattattatctactgtaatagttgaagtttcttactaataaagtttccacttctattaaaaaaaaaaaaaaacaacaacaacaacataaaagaaagctactacattctttctatctttactaaactcttctttcattttactttccatcaatcctactaatctccctccttacaaacataacctaaatgagatcatatatatgctagaaacaaaataattcaagaaaccttttattgatttcaatatagtctttaagtgtttacggttttgtttgatctaaattttaaaattgtcaaaccaaatcaatattatagttttttaaaaatttaaaatcaaactagactaattaaataatcaaaccaaactaaattaatccactcaaaaacaaattgatttggttcgaaaccataatttatatttcgtaattattctaatttttttaccataattgtttattttttcgatagtttttttacttttaataagtttatgatgcattattaataataaaaaattattatcattacaatataaagtcaatatgaatattctacctaaaattgttcctaaatattaacatttcatttaaaattaagtatatataaaataattacacaaattggttatgctgaactgctaccaagatataatttttaaaatcgtaactgaatcaaagaactttaaacggtccggattgatcaaattattcacactagatttatttggttcgatctctaataattttgtccgaattaattggagtttagaaccataaattgtgaattatataatcacccttaatcaaataataattattactgcaaaaaaaaaaaaaaacaaa

SEQ ID NO: 43766 - DNA, 1735 bp, Cannabis sativa
cacacgtacacgtcatgggcatcccgcttttctatgttctggacttggattctagcaaaaagagctagaaaatctgccaggatgcttggtgtaatccaaagggagggagggacccctcttgtgtacccatcttttttaccttggtttatgaactagtcattctttcaagaaaaaactttatgattctattctctaaccaagccaaatcatattcacatcattgttaatttacagatttaattattactttacaagctattcaacaatctgaaaatagaaagtgacaaaacgtaacaagggggctctggtggtgggccaaagtggtctcattctatccaacatttcttaacttatatgaatcagagccgttattttaaatctcatggcttatctgcatcgttcatttctcacttctcaacccttagattctttgtcatcaaccataacaccatcaataactaataataaaataaattaattaaaaaaagtcatgaacgtcataaacggttcagatttataaaaaaagaaagaaaaaagttacaaaatacaaagaagtggttattggatcttgaccctacaggctacagattaaacaagaatacaaaaccaattttcttgattaagccaagccaagaacaacatcacacacaaaccaaaagtcattctagtttattacaaaagctccaaaacccccaaacctcgcctgattaaaaaaataacgggtaccgaggaacataccggagctccaaacgagaaccgttacttctcgggtctgttcttcgaatcaaacgctagtctagaagcgatcgccgagtggtacatcacgtcgtgaaacgtggagctctccaaggtcttcctccttagctgtttcgccttctcttcggtgaaacaacccaaggagaatttggatctaggacgatctgactcagtttcgggatccgagaccgcgttctgttctccggttgaggtgccgatgtactccggatcggagtggtagccgaagagcggggtccaccagttaacggaaccaggcttgcggcgaataggatcgggttttcttgaggacgatgcttggatcggagcgggtcggaatgaggtgagagaagtggtcgccattagaggaaaacgaaggagttttcgatcggtggttacgagagaaatattgaatcagaaaatagggattgtaattttatcccgtttatttatcacggttaaaaaatatataacagtctgctttataggggttgtaccctaaggacatgttaagtcctttaacgaaataaagggtattttagactttaaagtacaacctctaaagcaggttggtaggacagtaagggtaggtttaagtggaaaaaaaagaagagaaaagtggataagatatacacgtggaagagcgtgttgttgcagcggtctagttgctcttttttaatagctttaattgtcatttttgaggaaacttggatattttgtgctcttctttaatgaaaattacgtgtcatggacaaaatacttacttaaatattaattaattttattttaaaaaattaattgaagattgctattagtcatcacatcttaatcaattgttaatgatttttttatttataaataaaatttgatatcgaattatattaataataatacaatatcttatatttttatttttatattacttttgactattttttaaccctcaaaaaaaaaaattataaggtcacaaataaacataatt

SEQ ID NO: 43767 - DNA, 2257 bp, Cannabis sativa
attgaaaacgatacgatattaatgatgtgaataaagtaagtatatgtacaaaaagcatgaaaacatagtaatgatcaaatcaattcatataatgaccatactatttcttgattctaattaataaaatttaatcattttatcgagaaaaaaaaaataatttatatttatatccatcaaatcgtgttcatatcaatttttacttggttgaataagtatatatacttatttagaatttatcaacaaaaaatataggaatatatattaaaaaaggcagcgaattttcagtaaatcgtggataaaatccatattacttcctctagagaaatatttcaagatcctaaaaaaaatatatgtaataaaataaatatccaagaaataatctattttaggtataatatatttatgaatatgaatatacataaaaaaaaaaaagaaatattacatgttttaattgcgtatcaaacattaaaaaggaaaattatattttttttatcaagtatcaatctaaacattaatatgttatttgtccaaatatctaaacattaaatgttgataaataatttacaataatgtatcactctccacacaatataatctctatatatacacacattttcttttcaatttttactataacaaaaaatttctagtcaaaaaaagaaagaagaaaacaatgggttcttacttgaagatttctttcactactatagtttttaccttatttttggtgtcttttactgtgaaaggagaccaatctgatgttaaaaattttggtttaaaacacagaaaaaatctactcatatgggagcagaaaagaacagttccaactggaccgaatcatgaacaatctcctcatagttcaggtgagaatagacttgagaatgaacaagattttttcttgactaaagatgaagatcaagaaagtttcgtctcaactcgtccaatttcaacccacttttctaagtcaactcgtaacagtgattctatttttattaaaaataagtaaaaatgatagtcttatcatatccttatgtattgtgaataatttggaataataataacataaggtacttttgttctaaaatagtttaatttgttttatgtttttcattttatatccacatctcctatttattagaattgtgtaagtttattggtgtaaatataatgagaaattgttaatttgatatttgaaatagaattttgagtgttttttaagagttttctcatctatagtctttccataaaaaaaagtattatgctaagtcttgttcaaataattataataatagcaataaaaagtatactattctaagtcatctaggtcttaatttatattattttgatcattttgataattcttattcatcaaagaaaatgtaattttgtggaagaaaatatttgtttagaataatcgataacataatttgttaaaatcaagtaggatgtagattataactacaatatatactattatagacatgaggtggtgatacagctcagttatttttttcttctattcttaactttattagttttttaatttttaattctattaatcaatttatacttataaacttatttatctattccattcaagaaaaggaaagaaaacttatttatcttttttttttttttttttttgaatattttctcaattttttcaccaaaaataagataattttttttaattatttttgtcaaaccgtacttgacaaccaaaatcacatcttttttaaaaaaattatatcccttaaaaatagttataatatcaattgaatgaaatttaatatcgtatcccttattattttgttaagtatatatacatattttgaaaatagttatacatgtctaccaaaccttattatttattcaaagtatatatctttttgaaaatagttatacatgtctactaaaaaataattaacccaaataattagtatgtgtccttaaaaatagttattgagaattttatcatttatttgtagcttaaaatgtataaaagaaaaatcctaaattcaaatatcccttagtaaaaatctctcaatagatctaactagttttgacacatttatacaagttgtatgtttgtcaatactgttttggcctttgtgaaagaagaaaaaagggttcaactttttaatacaatatgcatttgttggagtagatttcaaggcacaataattatcattccccacctcccttttcccaaccaaaaaaaaaaaaaacaaacaaacaaacacaaaaaaaaaaaaaa

SEQ ID NO: 43768 - DNA, 2010 bp, Cannabis sativa
ttattaaaaggaataaaaaaatgattttaaaaatattattcatgcaaaaatagtaccattattatgatggaagatgggcatgcatatctttggtactacacaagaaaatatagatctattatttatatgtgttggctcacttttggataataacaagctgtagttcttgattgatagattttactaagcaacaacctagtgaaaaacacaaccttatcttataccctacctcatcatataatctagcttaaatagtgtttaattctgtattttataaaaattattgattaaatttttattttgttgaataataaattaaactgtagttttcaaataaaataaaatatataatattttgaatttaattttcgtcaaaataaaacataataattaatagtcataccctgaaattttttgaatagatttgttatatctttgtcatttgcttgtgttagaaattaattttaatttagttatatattctttaaaataaaagacgaaaagtaagttaagtatactattttgtatcatttaaaaaataaaaaatttaaattgttatttaataaaataagtaactaatataggtaattttttataatataaaattcaaaataatatttaactagcaattatttattatatattattgatggtgtattacaaatttacaatatggtaaattattttaaaaattttaaaaatatataataatattattataattataatttacactatcaaataaaaaaattataattataatttactttttttatatacagaaaaattataactttaaatcaaccataataataataaaaaaaaacacttcctttaccaatcaagatctaagaataattatctttatcaacattcaacttagcaattatttttggtggctcctaaatggggaaagttaatggtgaattgtaatgttaatgaattttttttcttcttttaattttaattttaattttttttgcttgtcctttacttctaatccaagaccttggtcaatttcattttcatctattggttaaaaatgcaatctttgaaattacacaaaattaagaaaataattataggttaattaggataaatttctttaccacatgttctaattatccattaacaaacataatattttttatatttctttttctacttgttcttttgtatttatttttttctttttggatggtgggaacatcttgaaatgattcatctatgtaaattttacttgcttagaattagtaaaaaaaattatctgtgattaaattggtgatttagacatttcaaccaagttataatcatgaaaaccgactttgtgtcgattaattgttggcttaatgcaattaagtaaataattaaaacatgggttttagaagataattcatgacaaaaagttggacttgtggaaaaaagatgtaaaccccattgtacacattcactaaattcatttcataatgaatttttgggtaattaactttattttttttggcatttaggaaaattttgtagtttttttttagtatcgagcaaaatttttatcttcttcttttttttttagtatgatcatgtatgttgtaattttttaggattatttgtaaatttttaaaaaattataaatattttagactatcaaaaaataatgttaaaatattgtgttgcacttgtgatttttttttttttttatacaagtagtaagtaactatttaaattttattttctctaaattatttataattttttgaaaacttacaagtgctcttaaataagtataatatacacaattatgaatataaaagaaaaatagattaaaatattctcaaataccaaaactggaatcgtctatggtgcggtggagaaaagtttggtttgggtcctttcgacggctgggtgtttctcagtcagcttaaatgttgcggtgctacttgggaatgagtttatcgggtgggaggggcaattcgtgtcgccgagggtgtcgtcgcctagcgtgttgggcaatca

SEQ ID NO: 43769 - DNA, 2836 bp, Cannabis sativa
gggaatgggattagaatttagaaccatacagcttaagtatcaaaatcttaaaagggttgttccgttacacagaaattagtgcaaaacacatgagagaaactctcaaactcctcattcacttgctttaatactaccttagcaacagcagcaacttaccaaagttccctcacgcaacataatacacatattccagctcaaatagaagtgtttgaaaatgagacttaagtagattgactatgtttcttcagtgcctttgaagcccgttagccattaaaaaacctatgaaacccattgagccacaaacttaagagcatcaaatgaattaggttgtcttatcaaacttccagctgtgttttgttttacatcaatcaaccatggaatatggatcaagttcttcatgcttgttaggtttccaagaattataacaaggaaaataaaatccgaaaacaaatctatatcagaatctaacaaaattaatcattctctactcccattcaatcacaccatataatgcactttcaaaatcccaatcaaacaaatatagaaaatagaaacaaaagtaaaaataaacattaagaccaaataatgtgtagagctcaattttttaaaaagattttagttttacaagtagaatgggttcagtaataagttgatgaagaagcccagatatcataatttcacaacaaggatcttcataatattttttttttctcttctaaataaaaaaagaaaaaaagaaaaaaaataaaagtaatttctcttcaaacaacattccataagttcattttaatcataatcttatctgatttttttgtcatttttttccgcataataatattagaagaaaaaaaagattgaatcattgatcataatcacgatgatcatcatcaaaggcatagagccgtacagtgtagatcgggaccgtctgtggcgagctcaacctcatccaacggtggaaaattgagatcaaagggaaagggctttcgaaacgatgaagaagctatatcaccattaacgtcgtcgataaccgaagacgaagagtcacaatcgctatggcaatcttccggaacaaccggcggcgtccgtggataccgccgccgggacgacactgccggatccaccgttccggtagacaacggcggaggcctgggcccgctaaacgattccaaggtcgagctcaagctgcttgacgtaggtctctgaaggtccacctgatgatgatgaggatgattctgatgatgatggtcgtcgaatccaccgttggatccatacatacgatgatcggctaacggatcggcgcctacgccggtgggatgattctggtaacaaaaagggggagcaagcgagtaagccgccgacggaaaatttgtcttggctttaggtccacggagggtacgagctgccgcgtcgtatgcacgcgccgcgtcttccgctgaatcgaaggtaccaagccagactcgggtcttcttccacgggtctctgatctcggctgcgaatcttccccaaggtctcttcctcacgcccctgtacctaacctctttcaaacccgatccgttgttgggatctactgccggcgtctccaccgctgcttgagtcggcggagcaacccctctcccggtggtggctcctctgcctcgcctcatatctcaaatcccaccacccccacccccaaaacaaaactcctcctaaagaaaaacctcggtttagacaccgatttactcgatcagagcctgattttcatggaaaatttaggaaatagaaaacccccaaaaaagaaaacaaacaaaaaagttgaaattgttagctttgtgtggataaggaagacgatgaggaagaagagaagaagttagagagagaaagaagagagatgggtgggaggagaactggatggcacccaacaccaccttctcctcttacacaataaaaatattaagaattattattattatttaaaaaaataataataataataataatttctgggtttctttacttttttttattaatttattttttatttttgtaattttgagtttctcgatatctctacctctcttcacttctaatctctctcgcccccacaaaccgactccaaactctcgattgttgctcctttatcattctttcttctttctctccctctctttatttatttattttattaatttattttggaaaatgatatgagggtggaaatgacactgtggtccttacttttttttatttttatttattttttaaatggtcagctcataattatgtgttttagtaaaattgttcatattgatttctttttttatttctcttttctttctttttaggtgtggttagatctctttcactgctttgtgtatgcgtttcggtttgggtcatcagctgaaaggtacaattccatggcccctaattatgtctaatacaccaattattttgagtgcattagaatgtataatgttttttttttctttcagaacatcattatatacgcaattttattttaattcttctttctagatcaaatctttgttgcattatcattttatagtatacacaactgtattgttatctcatactactgtattgtaatttccataaaccgaaattgtaatcaaatcagctacactatttatgctcacctagattaatgtgacattttgattcattgtcatataaacataattaattaatttctatgcctatatatgaaggtgcaaattactttattttattttttaaaaatgaaaattcattcatctaaaccaacttgatctaaacaatgataacaacattagaaagaggattagtctctgaaaaaatacgactagcatataaacgaaac

SEQ ID NO: 43770 - DNA, 1636 bp, Cannabis sativa
tctctctctctctattaataattactattcttataattttccattttaaattttgagagaacactatttaatagagagacatatatataagatatgtttccttgtagtagcatttaccaaaatttcccacgcattagtaatcagacacatcagattataattgatgaaaaccaagatcatcatcaaaaccctagttgttactcatcatcacagcttgttattcccacatattctgaagaagaagaagaagggctgatgtttagtagtcatttactaccaataatgactactggtagtactactccagtaccggccactactagtactaattatgcaaatggtgataataattacgccttcactgctaccaatttgccttcaaataataataaaaggtttatttcaaagaataagaagcagcagattgttggtcagaaaacgaagactactactaaccctagaagaagagctgggaagaaagaccggcacagcaagatctcgacagctcagggtctgagggacaggaggatgaggctttcccttcaaatagctagaaagttctttgatctacaagacatgttgggtttcgacaaagcaagcaaaaccattgattggctcttcaacaaatccaaaaccgcaattacagaactcaaggattccatgatcacaagcaataataatgatgacaacgacgatgacgaagacgatgatgacgatttggtggtggtgatgaagaataatgaagctgctggtagagacaacaaaaagatgaagagcatgaatgtagtaaggaagctagttgcaaaagaatcaagagacatggctagagcaagggctagagaaagaacaagagggaaaaaattgcttcaaaaaacagcacaaattactgcggatcaacatccagaggtatcatcattacaagattaccatcatcatcatcatcataaccataatcatgtggatttgattaatgagaaatttcaggctgctacagagacttcctcaccgatgacaatgacaactaccactggtagtaaaagtgccgattatgaatcatcagtgatgatgatgatgatgatgagtaataataataataatgggtcaaagtccgaggacgactttctaggtttattacctgctccttggaactgggaactcattaacccaacatcacccagcttcttcttctcatcaaaaccacactactcattttgtgacatgaataataagccagagcttataatgagtagtagtactactactagcaccacccaaataatccaagaacaaaagcctacctcccattttctcatggcaaccactacatcaaacactactacgaccagggaattagaaaaccctagtaattccgtttcaatggcggctgcccatcaccaccatcaatcaagaggcctaaaccctagaacattaattgctcatattgatcaagaccgtcatgaggatccggccgttacttcgaatccctttcacagtgcaatccaattctagccatggagagaaggctgtaaatctttcgatgcggtcatcttcccaccccagataaatatgccaagaaaaatcactaaaagttctgtttcttttctgtgtgatatgtaggagcagatcattttttttt

SEQ ID NO: 43771 - DNA, 2848 bp, Cannabis sativa
  modified_base (2807)..(2822): a, c, t, g, unknown or other
tattagaatgatattttaatataatggtctttccactattttagtagattaactattttattttaaaaaaagataaaaaagactatttcaataaataaaaagaaaaattaataactaattttttttttatgtattttaaattttattccactccattcctttatattcttatatttttattcttttcaaatgctgtaataagaaacatatttccggttaagaaacatgtaatatgctgtaattagtaattagtttgaacctaaaagtaccacatcgcctggctcctttccaacattggttcttgtttttgaatgtcggtggtgatgaatacgtaaatacgtaaatacatttcttcagatttctagttttagttcttgcttaaatcttttctattgttattagaatcttgttgtacatcattcatttgatacgttgaagtatatgtacaaaatcttcagtatcatgggaacatatggtgtgattaggactttccttgcattattagtaagctttctaacaatggttgcttgatgttcacacagaaatttttgttaagaataaatcattacaataagaaaatgatggataaatcattaagaaaattaagttttaatactggtaaattaaaacggttttaaatagtgtttcgaatcatataacaaaactagacaaacatcaaccaatagataagtaaaagagaaacaacaaaaaattctacattaaaagatggtaatttaagttgaaagacaaaaccagtaatatgtctccttcaatccttcaacaatatccaaaacttaaactgatctgaaacaaggctaacaaccaaagatagaattttttgaaagctcaaaacaaaattttaaatactcaataacaaatgtttatgcattggcctttttcaacttagcgagctcttgcttgacaagtccagatttctgcaaacacaaaaataacattttagaaggtataaacttaaataatatataatacaatagcaaaactaaactttctgataagaaccagctgtataagaagaagagagagaacataaatggcacaaaccttaatcttggccaacataagcttgaaccgatcgaagtcattgagggctgcccttctcttctggacaatcaattttcttccccaggagctgttctcccacttcttctttacatctgcccaatttagacacaagaaagtgttaaaccaaaagatctaagatatgaatccacattacaacaaatcacttttcaaaaaaatgaacacctaccagcagcttccatggctgcaagaagttccttcttcttagggaccctcttgatgtcaatcttgatatcagtgagggaaagcctcttgaagttcatctgtgacctcaccatgtcgggagaatccacaagagcctgtacagacacaaaaaacgaaggattaacctcctcacgcacacctcacaaaaacaagggagataaaaaaatcaatgtaggccaaaagattagcattttcaatcaaaacaaaattagttcagtaattttcaatgtttaacacaaaacaataacataagttatcaaagccaaattggtctagaggagattgagctaacactgaaaatagaatactacaaaatccactaaaacatctcagaatgtccatactatgttcaatcactggtaccaaattaataatttcgaatttattaataaaaaaaaatcatcagaataccaataaaaataatatctttatcctttagcagtaaatcgaaacgaataattagtttcataccacagtgagtgtatctaaagttactcaatttttttgattcaaagttagaaaatccataaccacactattagatcaaagcaaagactccatcattttactaatcgccaactacagcaacaaaactaacaataatacaaaaaacctaaaagaacatttctctttcagggtaatgaagccctaagaaaactatatcaaagtaaaatcaaaaccagaaaaagaaaagattaagaaaaaacatacccggttctgatcaatgacgtcgacgataacaacaagctggccatagtcctttccgtagttgacaagagccactctcccgatctccacgtacctcttgaacggctgcaaaattaaacaaagaaagaaaaataccaagatatgagcaattagaacgataaatatgttattctgaagatcaattcaagcttagaagagaaaacgctcaccattttcgatgagtggtgtgtgtgaaggtgagaggtgtaagaggcggaagcaagaggacgaagacacgaatataaagtgttaagggattagggtttttctaaagagcttcttttatagtctaccagttcggatcaaacttatatttagggttctactgaaatggagagaaatgtttgggcttctcttttatgggcctttgtttcgaatcagataaccacacgacattatttattgttttgggtttggcgggtttttatattttttttttgtaaaaatatatgtttttttttttcaaaaatgttattttataggaaattttttttaaaaaaaaaaaatgtgtgaacataattaatcaggtatccttatggtgaacaaaggggtaatcagttacaaagggtaatcaagtatcttatgctatttttctcatattttttaatttttttctaaaattttcccacaaaataagttttttgagaaaaaattatattttttacaaacttataatttcaaacccattaaaataaaaattctccaaaaattttaggggtaagttgagaaataccctttttattaatcaattaatnnnnnnnnnnnnnnnntttatatttatttgaaacatacctct

SEQ ID NO: 43772 - DNA, 4702 bp, Cannabis sativa
gattgctcaggaggcaaagtacactgttagtggctatgtacctgcctttcagtacggggcatacgaagccattgagaaagtgggcaagaagtatgctcaatgcagcgggaccaagttccccagaatggtgaattggaaaactccggagggccagcggaaacaagatgtcaaggcaaccgacattgcactattgttcaatagtcgggtatgtttctattctgttttgcaatatttttttgttaattcagtaaaagtgcttgtttaaaagatgaattagttattcgcgacttgcttcacgacgtttagcgattttattcatgagatgttgattaatattttttgtttttaaattttgtgttgattcgagacttcatttcgtgaattttttttgacaatttgcgatttatatgcgatgtaagcatgtatgcattgctcagacatgttaatgactttgataacatgtcgcgacatgtttttgtatatttgtgatgtagttcgcgacatgttttgcgacatttttcggcagtgtttaatgcttatgtattttttttattttacagttggccataaagaagtgtttgtttttccagcccagtaaagaggaatatttcaagaacattaatgagggtaaagccctctttgttttgagatggacatcgaagaaatggtggagggtgatgctacacaagagtctttatttgaaagccaagtgaaaacgattaacgaggtcgtgacaaaggcaaatttagttccaccaccaccgacaccagaagtaaaagagccatctacttcacctgctccgtctgctctaaccagtacattaatggataatgacctggcaaagaggttggatagacttcaggcccagctggataaacttgaggcccagcaggctgccatcatattaggacagacagagttagtaaatagccatttcaatatgaggcggtccttcacggagagtcaaaaagatctgaaggagactctgttggctaagatggacatgttgatggcaatgttgaaactgaaggagggggaaccacagcccaccccagcaacggaagattgccgaccaatggagagcgataatgaagatgtgttcccagaagattgggaaccaaatgataatgaggcaccgtcaactccgttggatgtaattatcatggccattggtgatacacaatcacaggcgatgtcctacttctgactggacccccagaagatgtgccgtttgtgaggaagaggaagtcgcctacgtacttgaaggactacactgaggaaaagaagaagaggcgacttcttccagagaacgtagattcggaaagaccagcagaccgtagattgctatgtacgttcaagaggtggttgattggagacattcccaatacccaacctaggaatatgcacactggcatcggtgatgtgaagtgctttacaaagttgttgttgatgggggattggttggacgatgatataagtatttaattatttaattattttatagtatttttattattttttgttctctatttttttatcgacatgtcgcgacacaaaatggtttgctagttatcaaaaattttcgcgacaactttgcgacatgttgcgacttaaggcgatttaagttgcgataaaatgcaacttaattcgcgacatatcgcgatgcagattgcgatgtcatgtatttgatgcaatatttgaccattagtttaatttgatgatttttttctcttattttcatgcagcatatagatgcaatatcacacatgttgaggaggagacattttcatttttcagaatcttaccctcagtcaggtgtgatttttgacacaacactcccacaattcctcacgggcatttaggggcgtcaccagggtgacagaagtaccttccaatggccaaaagcagtgactgagtactacaagggtatggagagtcgttacctaccatgttggaaggatcaaggctacttatatttcgtcctacacttcgagagaaaaatattgggtggctgttgaggtagacattgattattggtaaatttgggtgtacaataatgatatctcatgtaccagcaaaaaaagattttaaagccattaggctaccttggactgagctatttccacatctgttgaggacaactggctattacaatcttaacagtttcattctctatgaagagttaggggagagtagccaactgagagcaatgcatgctaaatgcatgccaagtgaggtggttccccaaagtaaaagaaggtaatattcattaatatagtatattaatattttccttatcattaatttttttaagtctctaaatgtattactttttatttttcagtggtgattgcggggtatatgcgattgagtacatcgaacacctcatgatcaatcgatcattggagaaaattaatgatgataaaataaggatattgttcagagatcggtggtgtatggacttgttttaccaaatcctgacttggtaaataattaaaattttagagggttgttattttctttttgtgttttttaactctgtaattaaaattgtacagatatcgttgtatatcgcaagtaattgtgaatttgattgataaaatgtgttttgtacttaatttatatgttaaaactgaattttgtacttcaatttcataaaatatgtttgtatcgataaaatatcgcgaacaatgtcgaaatacattgcaaaaattcctcatacgtcgagatcaatatcggtaaacattgtaaggttgccaacaagtcatgtttctatttgtagtactacatcacataatatatcgccaaacatcgtaaaatatcgtgaaatatctctgattgcacactgcatgtcaaacacgtgtacaattcgacatttaatggtaattaatttttgacatttattatcccgccttcccaactactaatttatgtcaataataatgtgaaatgtcgcaaaaatactaggaccgtgtcgacttcttattgttgctacacgacgctgaatgtcgcaaaatgtcgttagatatctgctaattaattttttacatttattatcccaccttcccaaccactattttggtctataaaaacaaatttctacttcataagttacatacttttcttatgttttaaccttagagtgttcttatcttaaaaattctaaatgtctactaaagagaacaaacataaacttctatctactgaagagatcaagtaggagcctagtgatgaaattactcctgaaatgcaagaatatatagacaactttaaacgttttaaaaatgaaaggttgacgaacgagtggaggtacctacaacttcaaaaacaatttcacaaaaaataaatgaatgactgcctccaccaccagggtcccttgaagggtgtcgtcgttgcagattaagttattttaatagcgaatcggtgaagcttggatctttatgcccgtattgtgagtctcaccgatatagcaaagacttttaattgttatgttatgattgtttagtagtcagttttaatgttggtttagtcttttacttatgtttaaaaaatttcacttgtttcctatcaattgtaatcgtgaaatgttgcgactgttatcgtaataatgtcgtaaaatgtcgatattttcagaaaaaattatgttccaacaaaactatttatgtttctgtacgtcgcaaagttaatcgtgaaacgtcactacatgtcgatattatgacaaattgattatgctctactatgtcgcattttatatcgctacatatcgcaaattgtcgtgaaatataaccctactaaaaatctaaaaaattattattcatgttgttgccatgtcgataacatcatcgatatatatcgaaaaatatcgttaaaacatacacaggcacaaaaaactacaacatagatttcataaaccatactaataatgcatgtaattaaaatactaaaatgatgctcaaaccctggccttgcatgtagctttgttgtcccaaggcgccacagtttgaacaatggcgaggttcctgaattgctctttcttggacgacctacgagtttcttctccactggtaccccgactctcatgttctgcatgtgttctggaagcacccattcatcctcctcgccgacaagattaattgttgcatcgtaagttttcttctacgtctcttttgtgtgggagaacaaagcgtacatactgacattctgagtaagcgttgcggcacatgcatggggacaaggaattttcaacaattggaacatgccgcatgtgcatgttctctcaactaagttcacatcaccacctttctcacagtcagaaccgtcaaaacctcttccaacgttaaaaaattgtgcaccgttacgtaggacgcttctatgtctaccatcctcgtatttctttatcaaatattcctcaaaatgagttgccaaagggctagcgcacttacttgccttttcgagatggttagtgaacaaattttgtagtgtgagccttatgaactcaactagagtagtgattagatatttttagaattcttttgtcacgttgttgaggctttcaacaacattgtttgtcatgatgttgtacctgtctcctagacaataaagaacgagcccacttttccaatcctatactctcaacataagcagggatggcaggatccatctgtcgaagcacctataaatatctatcacattccctcttcga

SEQ ID NO: 43773 - DNA, 2203 bp, Cannabis sativa
cacgattttttaatatatatgaaaaaaaaagctaatctaatttcccacaagattcatatgctaatctaaatttaatatattgtattatggacttactatattaaattgtttcttatgatttctattatttgtactaagattagtgaatcttcaagaggatttttttctcttaaaaaaataaagattaatttattatctcttatacttaagtaaaagacaaactaggatgtttccttttttaatacaacattatcatcattattttaaaaataataataatacacagtccataaacgtgtattggcgtgtaacaaaatatgtctctctacaactcctcaaaccctaaattccatattctttccctctcaaaatataataattaggtaaataaaattataggcatcttaatcttatttgttacttcaagaaaaagaaagaataactatcaattgaagctgttttagggtacaaaaatatgaaaagtgtggtttcatgtgtctttaacaaataccccacaaatatataataaggccaattataatatacatatattaagtatatatatactaatccaaaatttataaaataaaataaagtaacatatatatatatatttaaataaatacaattatttgatggaggtgccagcatgagcaacacatgtttttgctaaaatttccttggtgttaacagctcaacaaatatgggcataaaatccttttatttccgagtcttcctatatagaaatacagtaaaaaccgacaaaaacattatatacatgtgcctctatctaatctcacttatagttatttttttttttttttggtaataacaaatttactttcaaaactttttttttttttaatgaatttatactaatatatatgttgaaaatggtaaataaattggggagaattagatgaccgacccacccatgaaatccaaaaatgtaggagaaacttccttttgtggttggcatgaaaaacaaagtggggagggaataaaagaaaacgtggtctttataagcttggtgtagaatatgtttgtaattaattatatgggtctaacttgatggagagagattgtaaggcattgatttatttgttcatgaataggtgccaatgcaatgtttcatgaactagtgttatgattcatggattagtgccaatatatgattaatttatatttgaaacatgttggaatagtttttatatagttataaattaattatttgatttataaaatacgtcaattaattttggtatttgactaaaatattctaattatgctcactattttacctaattatgacaaaaaatttaatagattgtgtacaatgtgatattttatgatgcggtagtgtgttaattcatgaatatatattataggttttttttttgaagaaatgtattggttcatggataggtatcaaacatgatccataaatacttaaaaaataacaaattaacaaattatatgtcacatcttgtgtttggtggttcaatattttgcttgtattttagggctagctctaatttgccatataaaaactcgtcaacaaataattaaaagtgattttgtgtcaaatagaatcataaatgttaattaaaactaataattaatgacatatatattcttaagggttatacataatttttttgaaaggattgaataatttcattaacgcaacggtgccaaagtcaaaatggactcaaatgccaatagggagtccaggctactaagaagctatttggctattttttcagttttcagaattatgttttcaaaagtgagaataaaaaatattttttttatcatttttaaaagtttatggtgtttggctcaacatgtttttaaaaactatttttagattttttcatactaaaacaattcaatattctacatcataccatgacatgaactcattctaccctaaacccgacctaaacctggaccccgactcgaacccagacccgaacatcaaacccagacccagactcgaacccaaaccccaaacccgaacccaaaccccaaaccttggggctagttccgagatccttggccgggtcggtttggggtttgagtctgggtctagggtctggtgtccgggatttgggttagggtcggggtccgaggtttagggtacggggttcaagtccaggtccgaactcagggtctgggtccagggtctgggtccgggtcc

SEQ ID NO: 43774 - DNA, 2204 bp, Cannabis sativa
tttttggaggttggagactaatctgcatcaaagagacctttttaggaacttttgccgcaaatttctattttttatataatgtttttgattttactctattttctagtcgtcttccttatatatatttaattgatgctacatctgattatgtataaatattgttcacgggtgtgcttaaaagaatatttattatataataatatatatactattcatgttgtgcctatacagtagacatgttcacgggccccttaatattatgtgtatagttataattcagaagaaaaaattagtgataattaattaatagtttctgcaccatcaatatcagttataatactctacaaattcctcaaattaaacattcatgaactcaactaaaccattactaaaaagttacttgttagagcaacttattttcatgaaatgaatatatattaataaagatgaaaactctctaactaattaaccttagttatcgccatgcagtacaatagagtagcaaagtacgtagataataacattagaaaccatttttttaattacaacaaaatcatgaacttattactgattaagaagttaattataaattcacaaattccacaaacacatcgataatgtggatcaaccccaatacagaaaactccaaaactcttcaattaatctttcattagtctagcttatctcttcgattcaagttagttggattgccaggttggtgccgggtatatgaacatacatttcaatatatatacatatatcgatcctacatggtcacatgctaatcaataataatcatatattccatgaatagccaatttataattaataattaattactttaattaatttccaaatccatataattataaccagcatatctataaaaaggacaccccaaattcaacattctccatcgagtgatcataataactctatactacttctcttcatctctctctctaatatgggttttactcaagtttcgactgccctcctcctattgctaaacttggtgttcttcaccatggttagctctacctatgtcccttgcccaccatcaggtcagactaaacactatccaaagagcccagcaacaacaacaccggctgtccctagctacaagaccaagtgtcctttggacacacttaagctaggagtgtgtgcaaacttgttgaatgatttggttcaccttgttgttgggacaccacccaagaccccttgctgcccactcatcaatggcctggtcgatctagaagctgctgtatgtctttgcactgctcttaaagctaatgtgttgggcatcaaacttaatgttcctatttcattgagcttgcttcttaattattgcggcaaaggtgtcccttctggcttccagtgtcctaattaatcaagcctcttgttttggggaaggctttgtgtgttttattatattttttttcttttaaattcctattttgttttctgttttgggctgatatatatgatcatcctgcttattatgtattgttgtgtatggcttcatcatcaatatgtatgacatattattaataaattcctttttgataatatagttgatattggtgtttttttccattacacgtgtgggtactctacacaatacacatatatgtgtacatataagagaacatattcatcatacgagaatttacattataccactctccaagtataggaatgaatggcaaaaagttcaaactttaaagctcaccaagtattgatactaagtggacaaatctaataaaccgttccttgtattcttatttttaggggtttttcacctaatactgaaatatttaatttttttacttttttacaataaagtgatttttttttaaaaaaatactatatattgtgttaaatttttactgttattctacggttataaatttttagttatttcattgttgttttaattgttcagttttgttattttacgattgttctattaaaagacaatatttttgtaaaaaatttcgtatggcaataaaattgtaaacttttacccaaaatttaatatttttataaaatcacctatttttaactcaaatcacaaattgtgtaagtagtcgtaattttaccaaccataatttattttagaagaaattaaattctataccttttttatattgtcttcttttatttttactctcttttttaaattctatcatttttacctcttt

SEQ ID NO: 43775 - DNA, 3887 bp, Cannabis sativa
  modified_base (44)..(73): a, c, t, g, unknown or other
  modified_base (3819)..(3830): a, c, t, g, unknown or other
taacatacatgtaatcataattcacttcaaaattctaaattgannnnnnnnnnnnnnnnnnnnnnnnnnnnnnagggcataaaacccaacacatacgacatatacaaagggttttccccatctgaggaggaatcgggagacatgaaactggatcaactagaaatgtcctctgctagtggagcaggataactggaatcgaataaaccaatgacctcttttagaagaacaagtgtaactttggaaaagtacctgtagaaagctttcggatacaatttgtgaaagggtgtctggaaacgataagggtcgcaaaaactaacccacattgcacactttagacatgctcccaagaaaataggcatcttgttccttttgttagagcacaaagaggctcacgaaaaaaaaggaaggagccttttttccaaacgcccatttatactaacattctctttcacgaggccttcagcacccatacaaacgtcactatccactatgtctccctgtacaggtgatggttatatgttgtttgggcctcacctaccaggcccataatgttaatattttattgtatttaccctatcactagactttaaacgtgataacagctgtaaacgggcctaagccagcccaggttcctgacccgttacctataaatatgatagaaaccctccatgcagaggggtggagtttttggagttagaaactcatacaaagagtagaatatactccatagcttaagctttataatcttgacatggattaaggcttgttaatgtccaaaccacgtaaaatctcatcctatttattccttaaacacatttctttagctcaatcttcttttaatttaatttccaaaaaatgcggtaacatacaccaaacttcatatttacccagttataaagattctattatagagttaaggcttgatagtgctattgagagaatccattttgacttaaaaatatcaaagattctttattaattacaaatatctttattgagctctttcgtaaagtttagttcaagaatatattcacatgataaatcagaggtcatatcttgtatatcaaaaaagatttactttctccagtgtttgctatttattaaaaacttattgatgaaggtaaattttactcctaatttacaccatatatacatggctagcttactttctccagtccacactattcaagatggtacgaagacctttgtggaagattgtgaagaaatcgttgcatgtttcttattaacggaaaagaagattcaagttcattacttggtgatactctactatagaaagaatttaagggttagagtattaaacagaaggagccatttattctgctgcgtttctagtgtaaggaaattctaaactagttatgtgtttaatttaatcgttttagaaatattttcaggttgttgatcaacatacatgatagtaaattagatcctggtaaaataaattccaacatgtcatccatctcccattttgtgcgtagctcccgattttgcgatcactaggcgaatgttggcattccatcgtgggtcagtccagtccttgatgatctttttggcctatctatgggaattttgtccaacttagtaagatctgaaaaaaaaaaaaaaaagtgaatatcaagcagttagtaaccaaactagaacaaagtagtaagagtacaagagagtcctccttagtaatcacttggagaggtccccactggaccctatatccaagaacaacccgttcccagataacagattaaagaacattgaaaagaaaataggtaatgatcatgttttgacctaggacccttagggtcccaaaaaaaataagaaggatgcagttaggtccctagggacaccttctgtgtccatgagataaacaatcatgcaaaaatttgaaacaataatttctaaggcttcctgagtattcaattcactttacatggaaatgtctctacgaatcaggtcatgcttatgaatttctaagttctgagataaataaagaatttaaatttccctatacggcaaagcctatagaaccagtccataaaccccagagttaacatgcacatctattatacagtacaacaagaaaaacttgttcaagcaaaataatttttttacaagaggatgaattacttacttgtgatggtcaaattaggtgtgatgggtattgcatggctagtgagcttctctcatgaaagttccaaagcctctgtacgagtttgtcaaccgtgcctttaaagtttgactaggttgatgatggaatgggtacgaatgggacaactagtaaataacttcaaacggaattgcacaaggtgatttaataaattggaggtgggagcgaacattcaccaacggtggttttatgggttcggaaggaacttttctctctaaaaagcttaagtaattcaaaaatagtcaaaagtgtttaataggaaaactgttgagtatttataagaaaaaaaaaaaagtaacctgtgtgccatagatccaatggtataagtcaaatctgacgaaacacatatccccagatcaattggcttgggaatgcagaaggacacctcttaaatgctcattaaaaacgaagggatttaccttaaagatgacatgcaccttgggaagcacgctaacataataagtcatcagcgcacaacccaagacaccatgcaccccaagctaagcgtgtgactcatatgtgcctcccgcacattgacacgtgtattagactaagggtataccaaaggtcaagtagtcatccacatcataccttgacaatatacctaaagggacaccccaattcaagcttccatgagctactggaaactcagacagaagcagcaagctttcgcgacccccatgtcctgaaggcttgggcagtaattggtatatgcgtttttggatagctaacaaatgggctgcattaaggcccaatatgagagaagaaccacttggcaagcctctaaaggacatatacaaagggttcaccccatccggggatgaatcaggagacataaagctagagctactagaaatatcctctactagtggacaaggagacctggattcgaataaaccaatgacctatattataagagcaagtgtaactttggaaaagtatctatagaaggcttttgaatacagaatgtgaaagggcatccgacaacgataaggttcgcaaaaattgacccacgtggcacacttcagacaggctcccaagaaaatagacggcttgtcccctttgtcagagcacaaagaggctcacgacaagaggctcacgacaaaaaggaaggtgccttttttccaacacccgtttgtactgacattctctttcacaaggccttcagcacccatacaaacgtcactttctactatgtctcattgtacaagcgacgattatatgttgtctaggcctcacctatgaggcctaaaatattaatattttattgtatttaccctatcactggactttaaacgtgatatcagttgtaaacgggcccaggtcagtccataaactcgactccttgcctataaatatgacataaaccctccatgtagtgcattggaatttttggagtagctagaaattcatacaaagagcagaaaatagtccatagctataagctttataatattgtctcgtggattaaaactcgttaacgttcaaattacgtaagatcttatcttattcattctttaaacacattttttttagctcaatcttcttttaattcgataaaatgtacggtcaacacatgccaccaaatatcatatttacctaataagaaagattctattagggtgcgtttggaagtaacnnnnnnnnnnnnaggtagggtaattattagggtggtaattacacagtgtagtaattacactatatttta

SEQ ID NO: 43776 - DNA, 3087 bp, Cannabis sativa
caaaataaataagcttgtttttttctggggaaaaccaaaatcaataagctttttatgtattggttaattgagaaatagttgttttctaaaaatattatcatgaaaacttaaaacaaacaacacttacactgtatatgtttgaaaaaaaatgatatctgggcacctataaattgtactgaaaattcatgactgggacagtttcacatttgggtcatatacactcccaagtaacatataacagttgttacttcgagaagaaatcatgtgaaacaggcaaaaaaaaaacagagtgagagacactagcaaaaagggtgcaagagaaaatgcagttttgccacaagcattggatgaaatcctccatattaagctttgcactgccacattggaccggacgatggaaggttaaacggtgttcaagctggtaactgaagctttttattgttcttccagctgtgataaaaataaaggcatatcagatattttcagcaatacaaaacccaacccaatacattaaagtctaggattagagtattctgttcacctgtggaaataataatagaagaaatctccatatagcagtgtttggaggagccctgcaatccaagctgcaagaaagaagaatcaaagaaaaagggttggttaatgaggctgagagcttattcaataacatgaaaagtgatatggatgaccttaagtttctaaaacagataattaatcttcttcaaaagttagtagtggtgagtttcagcatcatatgatagttgaagtcagtcgatattatgtgagcaacgggaatgactattgtaaaaaagggatacaaaaagaaatcactctctttctaaagctatggttgtgtttggttggaggtaatgaaatggaaaagagcaatttttaattctattatttagtttggttgcatttaaaagtttggaatgacttttctactattttggtggaataactatttcattttgaaacggaagaaaatgccattctaatgcaagatgaagaaaaaaaatatataattttatcaattttaaattttattccattctattccttattccctattccctattccctagtgtttgcattccttccaaacaaacacaatccaaatgtgtaaacgaagtcttataacatcaaatatttgatcaacagttgtggtcattaaagtagaacacatgtggacaaacacaacagtacattttgtgtgaaaaaagagtaagagatagaaagaaaacgtacgaatccagtgaacatagtgtggctcagtgaagtagcggtaaatccagttgaaaatgtagaatgctcggtatgccctgcatcaagagtcaacacagagatggtaaacaagaaaaagaaacaaaagtagtacttattaagcaagcatagaacaaccaaaactcttcacaatgtatagcagtgttctccaaaagtacattggaaatcttagcatacccaagaaggaatatatattgcccagtcaagttgtcaatatttcttgttctctgtaacaacaccagttgaggaagaatagcaacagcttctaagaacaatgaaaatgtccacaaaacctgaaacataatgcagaagatcattaagaaagacaaatcaatagtaagaatcaaaacataacaactaacccattgtgagaactaacctctctaaaggtgaacttctcattaatgatcatggccaagagtaagcatggcacaatgaggaagtaatggcgaaatgtatcttggtctttatcataagacctacgtacaatcttatggctcctcatgtaccaaacaatcgaaaatgagctccccaagaataccaatttcataaaggtattgtatagagatatgaaatccgtaaagatatccaagtaacgagtagcaaaaacaatggcatacagttcttgagttttcaatgaaacacctgaagaaaaatttaaaccaatgttaaccccaattcacaaaattgtacatttatgtttaagaatgaacctctcctctcaattaccctcctctaatttcagcattcatagtttttctaaaccaaaaatgaaacctagaaactcagctggagtaaaagcaaatctagagctaaaacctaattcaatcttccacatcgaaacgggtaactattcgtaaatgcattacagacacattaggtaaaagtagagcgaaaattcataaagaaggaattggattggattggtaccagcacaggatttgatagtgtggatcttgagaagcaagacgaggacgctcgccaagtgggtcatatcaccggcgaatctgaatatattcatcttctccgattgaaatgggatgaaatagatctcagctccgatcaagctcgttctcttcggatctgctacaattaaacaaacccagaatcgattcttcttccctttattttatattttatattatataaaaaaaaaatacaataaagacaatgaaactaactagaaatagaaaagcacttgagttttcttaatttacatttaattctattttatttttttagatttgtttttagacatctaacgctaccgttaactcgttttgttttgttgttggttttaccacgtttaatattatttaatatttttaagtcaatctagatcccatataattatatacaatagtagatgttaaattttttttgtttcatctaacctaattaattttaatcattagatatagtatttgatcggttttatctatttaatgtatttcatatatatttattggtttaatttaagattatcaaatattttagacttagtatttttttagattagatcagattcatttaatattttaagttcagtatagcagtgtgtattagattagattaggtcatctacaaaaaaaaaaaaaaaatttaatctaattttgatatatacacatatattttaagtataataatataaatttaattacttatccaaaataaaatgaaaatactaattagctcgattagatgttggatgtattagatttttagacatcctatctaatatattgtgacagtcagtagtcccgtgatccgtaaggagaaataccgggtaagctgtgcaatccc

SEQ ID NO: 43777 - DNA, 2225 bp, Cannabis sativa
aaaaaaaaaaaaaaccttcaaattaaacttgatgagtacgttcgtactagttcaaccctagctgatcattctgctgttatttgcttccacaatcttagctggcttagctataataacttaattttcataatattatatatgtatacatttataataattaatctacacttacaagattgatcttcaaagttcgatcaataatttcttcgaaatccctcatcatcatgatatttaattattgagtctcctcttcgagaaaaccttcatcaatcaagaacaacacattatatataatttatatatatatatatatatacttgcaattaatcatattatataaataaagaaatttaaaaacatattataaagcttgcccgtatcttatctacttatatatgcaagtaccttttaaattatttaaacagatggaacatatatatattatatatatatagaacaagaataacaggtcatataattttcaaatcttgtaataagaaatgatacgtaatcttcatatggagagagtatcaacatatataatttcatttaattaaagaaacctaattaatataaagtacattccaaaacttccactaatattgattaaaattaattatgtatattataacgagagtactataagctttagctagatcaaactatatatatctaactgtacgtgttaagggtccatgatagtataaattacaataatatattataattttggttttagtgatcatgtatgtatggatatatatatataaaggtagtttatttttaaatctgagattgttaagatatcaacaaatctagctagaaatgttcaaggttcccacttcaaatgcaaacatattgtaattaatattccaattgagcaatatattatggtggtgtgttatattgttcttttgttagtgccaatcagtggtttgctacagttgaattaagatattttgtgatcccattatttatttatatagttatatatacaaaacacgacaaaaattttaattcaaaatatctatgtgacaaagacatacatagtattaataacaagacaaatttatatatatccaattaacatatatatcaccttatcaaaaacaaaaacaaaacataacatatagccttatcaaactagcttatataataagccccaaaatataagatatatataaaccgatcgatatatactttaaaaagatcgattaacaacactttcattgattattagctagatttatttttttgaaaaaaaaaaaagtgtctatgcagcagtttttacaaattacgatatatataaaaacatataatgacacatatcagcaatatatatataataaattcacgtaatttaaattgcttagttcaaatctacctatcataataattcacatatatacaacaaataaatctcatctcaatttataattaagtaattaagaatataaatttagtaactataataattagattgtgttttgagatcgtaataaaatgaaaagaattaatcttcactaaatttacaatataagggaaaaaaatttaaaaatttatcgtattcctatttctattcccacttatagtcttatatttttattttttccaaccaaatacaaacttattcaatatataaaaattcctaatttgtcagttataaatttaattaatatgattaaatattgtagatattgttccacataaaataaatggtaaggtattgaatcatatataagaatataaactattccaacaattaagtataataagaaaattaatttctattgcaatttgtctcaatgtatatatgtagtgactatatagagggagtagtatatgtctagtgactatagggagtatataatttttatttatttatttatttttttttttggctaactgacaagagggagtagatatgagtaaaataaaaatataatcggcaacatgtttaaacataaaattaaaaaggtcattaatataataatattactaaattttaactgactagagagtagatattagtaaaataaaaatataatcggcaacatgtttaaacatgaaattaaaaaggtcattaatataataatattactaaattttaacaaatagaagaaataaaattttatccaaagaatggatatccctacaactttcttcataactataataatttagttagttgggaaaaagaaaacaatgcatgtctcaccatatgt

SEQ ID NO: 43778 - DNA, 2481 bp, Cannabis sativa
gggaagagagagagaaagaccaattttagtttttaccaattttattttttttttaaaaaaagggtaaaatgggaagttcatgtaatcaatgactaaatttgtacaaattaaaaaaggatataaattttatatggcttgtattattaaggccaaaaagtaaaaatatatttatgaactatgatactgacacacaaacttgacataaattatattataagtcccttttaagattgatttttattaataactgattaaatttttttgttacatataaaatgaaaatcatctttaattgggataattgttttttttttttttgttactttggaaatcgctaatgtgatatattaaccaccaaagtcattgcaataagaaacaacaattacatttaataaggttagaagaattattaaaagatattattagtacttaatactgttttcaatattatattctagtaattaaatatgagttctatcctggtcaatagcaatggtacaagattaaagagaagaaaatgtaatgaaattgaataatgaataagcaaggagaatcacctaaccacgtcagtgcttcctgtgaatcacaaattataaaagacaaaataattatggtttgatttcaactccaatcaaactcaacaacatccttatcatcaattataagccctctccaacttgaatactcccacttgctggaaaaccctatcttccaaaatgacatagaaacaagaaaaaataaaataaatcataaagaaactatctttctcctctcccatggatactttgtcgagctcagtttccaccattaaagttcctacctttcattccaattcttcttctcgtgaactcactcatttcaagtctacttctactctatacaccccaaactccctcctcttctcaacccacaagcccatcaacaacaccaactcaatctccaccaagctcaactctttcaacaaccccattttccaatcctcatctcggccctcatccccatcttttgcggcgattcacaggaaagcctccgccggttacgccgcggctctgctcgacgtagctcaactcaacaactcggttgactcggttgggaaagatgtggagagattgtccaagcttctaaagaacaaccgggttcgggctgttttgtccgacccgtttctggaagaggaagaaaagggtcgtgtggttaaggggttagtggagaaaggaaggtttaataggcatttggtgcgtttagtaaaaatgttggttggaaaaaacaaggtgggtcttttaggtgaagttttggacgaattcgagtgggtttatgatgagattttggggactcaaatggttttggtttcgtccaaaaatagaatggcagaagaacatttaaccgggattgctcgaagggttcagaagcttactggagctgttaaggttaaggtgaggaatttggttggtgtaattgatcatcacagttcgggttcttttgctgtttaaagaatctcttgttctaatgaaacagaggtttttactgtaaaacacatgtaagattgatatttgattaattaattaggttacttttatttcaaatggcccatgtttgaatttgtaattttgaaccttttcttttttcagaactggatgtgtttgaatatttggtttttggaatatccgtcttcaactaagagtttgggtttagttagttggtttagtgagggagagtttgattgggattaatggcagttattaaggtagggtggtagtagtagaactataaactgaatgatatatgatctaatacatggattttaattgaaatttgtatgatttttcttttttcttttttttttttttaataacaatgaaaacttcgttaacttaaatcatccaaaaccagagaagaaattacaaaaggtaaagaagaaaaattaaaagtacgatcagcctcatgaagagaggatcgcgccaaacaatgcgccaacctattagcagatcgcttcactcaactcaaagagagattactaacttcggcacataaagccttacattcgaaaataatatggccataaggagagaccatatttttattacttttgatatcagaaattactcttaaacaatccgactcaagaaccactccatcccatccattagatttaatccaactcaatgcttccttgattccaattgcctccacctcatgtggctgtaacatgcccgatttgagtactgtccgggcctgcaacatcacaccagcaacacatctcgccaccattcccaccccgtatcgcccatttgagttgaataaagcaccatccacgtttactttaacacttgggaaggtcagaggacaccatttctcagataaaaccatgttagaaccaggaagagtatcattttctagctgctgtgcattgcaccaatccagaaaattcacttgtgcagtgtgaattacctcttcactcgaaggagaaatagagttccaaacaac

SEQ ID NO: 43779 - DNA, 1881 bp, Cannabis sativa
ctcaaattaaatattatttccaagtatattcttggatagaggttctactgtatatagagaaatcgctttgcttatcttgctacctcacttgatgcaagtgtaaaaactaaaaaaattgcaatgagtgataataatatgctgaccctgaactctccaagaacatataatttgagtatataataactatcttggaagggttgacttttaaggacagatttctgtctttacctctttgactaatacaagatactcacaaatgttgagctctccaatcaactgcgaaattctcatcgctgtcatcatcactagacgactcctcaagttttggccttgcactaacaccctctgtacctttgctgcgtttggcagaccgatcggccttcaattccatcttcttcttcctcaacaattcaactttctctctgtaagtcctgaataaggacaaccaagaagaacaacagtaaaacagtaagtgaaacagggcttgaaaataagaattatgttgacacaataatactctgcggacaaaacacacttttgctcaacagactcagcttcttcgatcatttcggcagcatcaatctgcacatgagacaggtttgagaataagatttatggtagtctattcaattgttgttaaatataccatagactacacgcgctaaacgtctaaatgaatataatgacaacttataaaacattacctcgtcttcttccatacgattgtccacctcttgcaagtcgtcttgaatcaacttctcaaattctttgtactcatctctaacaaaaattggagagaaaaaataaagacatgatgtggcttccatgataactacaatgagaaatgactttgttaacgaaaattttaattggaccaaaagatttggccaggataagtaaagcacattgacaaagttggaaaacctgacttaaaggaaactccttaaacccaatttccagagggaaaaaaatacatttataaataacagaaaactgtaaatccaggagatcaaaatgattgtgtaacattggaaaaggaaaacaaaatcataatcggagagatcaaaccattataagtaggaacttacttgacgtctggctttacaggctttatgccccttgcaagtaaatcagcttccttgttatcaaaaaatccttctggaagtgctcccttgacttgctttgcttccgaaccagttatttgagatgtttgtgtgagccccttggcaggcgtcataatatccgtcttagtaccttgacaatcacagcaaaacaaacataaagttgaaataaattgaatgggataatatgtcataaaggtagagaagatactaccacaatagcgattaactaattaaaaagagaattatagaaaattgcaggaacacaaagaaaaatgcaggaaaaggaaatcatactagaaaattattgagttttaagctcttgattttcttttttcacaagagagaaaattcaaggaccctaagctatgttaaccaaagaaaatttataacgatagatttcttcaatttttgtgtagatttcctaataaatatgaaaaaagaatgtagagaaaaaaaaaagaaatagattagtgttcttcacagaaccacacaagaaaggaattttgagataacatcattctgttccaagcttccagatatcatgcattacagcagaaacattgtaggcaattactggaagtagttaatggaaatgaacttattgccctcaatgttatgatttttttcaaatgtaatgtaagactataaactgactccagtctcaaggcaggctccatatctcattcattcgtgaattaacaacatagagttatatccaaaaataatttaaaccttcttcagtaaattgagcaatttc

SEQ ID NO: 43780 - DNA, 3717 bp, Cannabis sativa
tgaaaaaagaaaacatgtaaattatgttattagtagaaactgatgtaaacttttattacctcctgaagaaccctagtcgccacctcctcaggagtatcattaggaagcacaggaacaacactttgagcaagaatacgtcctgtgtcatagtgctcatcgacgaagtgtattgtaggacctgagaatctaaccatgtatgaaaacaatgagtactcaattttgtaacaaggacataatatgagaaatttctgaaaaactttaaaagagtgattggaaaggtacgcagagaaaatgtatagcataccttgccccagaagcaacaactgctttgtgcaccttcatgccataataacctttgcctccaaaggctggaagaagagatggatggatattaagaatggatttgggataagcccgtatcaactctgctggtaagagtttcaaatatcctgctaggaggacaaagtcaacctcaaatcccctgattagaaaacatacgtatattaattataaaagaaaaacaggcaggactccactagttataaagttattaaaaacatcataatttacttcatataaatcttgtcattttggaaatagaacataaatattatgtagcaatatgcaatagcttattggacaaagaagacaatatattattggattaatagatgagagcaatatataagttactatgaatttatcacagaccttttcaaatgaagtagctaatatcaaatattttttcctaatagattgtgctcaatattatacaaataaaccgaagtgacacatttttatatgcaacactgcatagtgcataccacttaaattagaccttagttggagcacagtgaatttacaaagaaaaataatgttaaatggtagttatcatctacttatcagttcctagtttcaattggaaaaaaaaaattaatgtcttacaagttccttgctaaaataaaaacctaaagaaacaaaaagtgaaaataagtataatgaagctcaaccaacaatgtggaagaggatactgacctaagggaagctacaagatcagcaggagatatcccctcagactcatctttcgttttggggaataagacaatagggatacccttctctcttgcaaattcagcacctccacatcctgcaatgaaataagaaatgtaaaactaagtatcaataatttcaaaactccttttgagaaagtgaaactaatattgaacctttcatttcatcaagttgcattcaatcaataacttatagttacaaccgtgtcaataaaaaataaaagagctaaacatattaagagaaagatagtttaaaagcaacaaaaaaagaaggctctgaaatcttgaacaattataaataggaaagttttccctccgtattatctagcccagtagccatcatgagactagactaagacacaaattttaccaacatagcataatctaaacacttacatttctcctaaacgagcaaaactattaaagagaattgactaaacgaatactactgatgcaggacttgacacaacagacttattttacattcatagacatgaaattttagacaaaattgaatcattcttattcttaacaggatatctattcaaaattatattcactaagttaattctaaatgtgtgaaataatcaatacataaagaaaaatgtaaaactggggtttaaacagcacaattagaatgcaattcatttccagcaactacaaacaaaacaaacaaaatccatagtaagaaaaagtacctctcttgttggtgaccagaacaacaatgtcgccgagaatcgatccctgaacagatgcctcataaatggaacggaaattggatcctccgccagatacaaaaacagcgagcttttttcttctggtaccactcctcaaatcttcaccggaagaaccaccccctgcttccactacactattacgacaagctcttatcgtccggctacaagggctgactctgaaaatgacccacttgtgcgattgaggaaaagaacatgtggaagaaatagtaggaggagacacggttgcagagaatgggattttggcactgtgaagggatgggattgtcgtattggagcaaaacccagatagcatcatactagtagctcccattgaagaaaaaagaaaactccttgggtttcttctctacgttgagtgaacttgttagcacttagaaggaggctacacccacctgagctgagacacgaaagacaatcgaaagaagaagaagaagagaattccaagctataaagcagaggactggaagcataaaaaaatgttgtatattgtattattgagtgaaattgataattacacttgtatacaaacaaagataataaagcaaaaaagaaggaaaaagagaaacttcaactagaaatggtggcggccgaatgtcgagctccggtcaggtggaagaataagaatatgaaaaaaaagagaagcaaaaattcgttactttgctttgaaagagggctttagattggggggtttttcggaaacgacgacaagtgtgtgaaaacgacaattcggcaacaacaaaaagagtcaaatgacaattaaattaaagaaggacgggttggacccgaactgctaccgaacccgatcctatatctggatgcaccgatccaaaaaaagaaaactaattagtaacagatatcttcagtcatctctataatatttgaattggactggaaaaaaaaaattaatctactgaactacgaaaatgactaacaacattacaaaagaaatgaagtaaacttgtatatgtgaatatcaccaaaaaaataagcagttttgctcaactcaactgcaacaaatatcaagaattgacctcaatggacgcatttaactctaataacatgaacacaaacaaatcatgtttagagttggtaggttctgaattttcaaatgaaagaaatatgcctaacgaatttaatactgacctgattggataaaaaaaattagattaatctaaataggaaaaatgtatttcagttcttgaacaaatacagaaaatcaagagaaattcttaaaaaaaaaaaaaaaaaaaaatcaaaactttaatactcataacattcacctccataaaaatacaggaaagcaaaaaacttgaaaagtaaaagggattagcatcattcaataataataaaaagaaaaaagtaaaggaataaatcgtataaataagaaaagaaaaagatattcaaatacaaacaaccactggaaaaaccaaaagtgtggtcgatgtgtgtacagatatatatttagtgacttaccaccagcaacggagagaccaccggaggagggaggaggagaagataaatgccactgctgccgactgggagatcgagttaggctactgagaattagggcttcctttaaaaaattagaattttgcttttgcaaacagggcaaaagattagcgcgtcgggtcgggttagaaccgggagaaacagccaaagctagtaactaattttccaattttttaactaaaaaaaatatatatataattatatttttcagatatttaaattcatttttattttaatataattattttagagggatcggacgctcgcccgagtcatggatggagttggggccccgctcgggcggtcatcgacccgttacagaccggcttctgtgtttacagggacggtgagaaggtggaaaaagaaattttttatttaaatac

SEQ ID NO: 43781 - DNA, 2477 bp, Cannabis sativa
  modified_base (1826)..(1838): a, c, t, g, unknown or other
ttttggaaaatataagatttatttatcgtttaacaaaatagaaggtccagtcagtaacttttagaaaatacaagatccaaaatgatatttagccttaaatttatcatatgttcatttggtttagaaatctaatttgctaactttgttgtacactagttggacacttgatggcatggccaacccaaacactaggtagcttgggccttctcacaaagtcccaattaaaatgggcctcaatattttttaatatagttttaagtatatttttttaatattatacatataaatattttgattaaacgttttatttaaaatatttaattttatcaaatgaatagtaataaataaaaaaataatgaaatcttaggtgataaatacatttttttaataaaaaaaaggtttaattttaattttttgcccaaaatgttaaaaatatttgagttcttgatattgtgtcttattagatttttagttagatctatattgcgaggattttcgcttactaattttactatttttatgaacgttattttttttatataataaactgatttatctattaatagatatctttaaaaaaaaattgtataaatatattttaatggtgcatgatgaagtgatcaagactcaataatagaattgttgtgcatatataatatgcaaaccttaattgatcaaattaagttgataaatgtatatattgcctttattattttttttttatcatgatcatatatatatatatgcacactcatatcatatgtactatgtgtccatattatatatcatcactaattagtagtaaaagtgattaatggaatcatcactctttcacttcttaattaaatataattagggtttcatctaaatataattaattaaatatataactattatattaattgtatttattaatctacttgtgcaaaaagtgtgttcatgtataactaggatatacactaattcatcatcacaaatcacaatcatcaagttattgggtggcctttattaataaatatttattacttctaaaaattgatcatcaacatcattattttttctaactctatcattccaaaaaaagcatgtatatgccaaaatataattaaagtgaatgaatgatttcaacatccttccttatatggatgtggacactctaattttgatatctaaatggttttaattttatttttatgtatatatcgtactttgttcaagatattttataaaattttaaaaaaatttaaaataatttataataaaaaaaaataaagttcaaacaaattattttacaaatttttaaaattaaaaaatatatatataaaaaatacctgtgcaacaaactatttataattttaactttggcgtgtaaactttataaatgtttaacaaaattaatgggatgttataaataattattttgtacgacactattataatattatttaaaaaattaaaattaaaactatcaagttaaaaatataaataatcgatattcccttctttcgagatgcacaataaaatttcataaatatatagtttaattttacatagtatatattatattatatgtatatatagagagagagagagtgaaagaggaaattaaagagcacatagatttttatgtgttggcaacaataagactattattgactcttctttcccactaaagaattctatggatatggactatgaaattatttttataaaatataaataacttttttagttatttatggttctttatttatatattaaataatgacttacgacttaaaaagttaaatgatcattgctaatttgctattattattattattatnnnnnnnnnnnnnattattattattattatagtgtgttgtgatattttttttttttgaaggaaagtacgtatttcattaaaccaaatcagctgttacaggaccactaataaatctaggacaagcatctgtccacaaatcaacccctagggaactagttacagactttgctagtgcgtgggccacaccattcgcaacacgcggaatggcacaacaagaaccaccaccagcagcagctaaaagagaaataatctcctcaacaataggtttatacataaaaatagaattcggagaagaaatccaagaattaacaatagaagaatccgtctcgactctgaccaccgaataccccaacgtggacgcccatctcaaccccacccgcatagccagaagctccgccaccgccacctgaaaatctccaaccccacccaccgcccaagcagcccacacctcaccatcaccccctcgaatgacacccccaaacccgacaaagcccctacccggagtgactgccgcatccacagataagacaaactcacctctcaaaggaggccgccacctaccaggcacgcccaaaccagcagacccacccctcacaaccgcccccccaccaatgacgcccaccctagccccttgaaactccaccaacgcctc

SEQ ID NO: 43782 - DNA, 1650 bp, Cannabis sativa
  modified_base (71)..(73): a, c, t, g, unknown or other
atcaatccgggaagcatccagagtgacgtactcgtgtataagagccatttattccgtgggtgtaagggccnnntggaggcttgaagcggggatgttacaggtttagttaataagcataaggcccaattggtagcaaggggtttccatcaaaagtatggtttttattttcatgaaacctttagtctagtagtaattaaagccaattaccatcagggtgatttcaacagtggctttagcaagaggctggtttatgcatcaacttgaggttaataatatctttttgaatgtcatgttacaagaagaatactacatgacttagcctcctgattttgaagatccaaaagtcctccacttagtatgcaaactccataaagccatctatggcttgaagtaggtcactaaagcctagtttgatatgataaaaattattctattcattattagtttatcagaatcacttctcaaaacattatatatgtgttagtttatgtggatgatattctcatcactgggagttctactagtgagattattgctcttatttcaacactagtttcagtatctctctcaaggaccttggtcctttgagcaattttgttagtattcaagtgcaaactaccttagatggaatcatcttgactcaacagaaatacatcaaagatgttctttgtcgagctaaaatgcaatatgcaaatcctttgactacacctatgataggtggggagaaaatctcagctcaaggaaatggtcctattcaatcctcacaactctacagaagcttggtagggcccttacaatttgtaactattactagacctgaaatagctttagttgtaaacagagcaagctaattctttcagaatccactgaaattccattggaaaataattaagagaattcttagatatcttaaagatatataccttgaaggcactcttgagcatggcttatatcttaaagaggtcttcacatatggatttgatgtgttattgtgatgttgattggacttctgatcctaatgatcgaaggtccacttcaagattttgtgtttatcttagtaataattttgtcaattggtcttccaagaagcaacatattgtttctaagtctagtacaaaagccaagtatataagtttagccctacttgctgctgaaatgaaatcatttggattcaatccctcctctttgaagtgcaagtttctcaatcaagagctccaatcttgtggtgtcaagatgtgacaacttaagcacattgcttatgtctgtcaaccctgttttgtaccaaaggactaaacatatagaacttgacctttactttgttaaagagaaagttctgaataagctgcctgtgattcaacatatgccttcaaaggtcaagtggatattatcttaaataaagtcttagcttgttctagatttgttctattgaggatcaaacttagggtaagaattcttccaccataagattggaggaggatgttagtgcaagttagtttattgttagaacttagaaatcttagctaaaatgttagtcagaacagctcactgttaactaattattttaactaactcagttttttatataaatatacatatttagtaaactatctaattgtaattaataaaagaataattagtatttttgacccc

SEQ ID NO: 43783 - DNA, 845 bp, Cannabis sativa
accctagtcgaaacttgaaagaaccttgtagtccaactcctaattttcattcaaaaccactacagaaacaaaatccatgttgccattgactttgacactgattaaagtgtataatgagattgttaaaaaaaggtggcatatatgtacctcagctcctaaaattttgagaagaagttgagcacagaagtatgtgcagatagcttcaaacgagtgcttttttcgatcgataacggctttagcttgccgaacatagtccaatggatcatcttgtagagcaatgttgaaagggagcaataggtatcctatccaattaccccatttggtctttgaattcttggccatcatatctgctaaagcctgttccaaaagtgaatacacagtaaatcaaattatcaaccaaaaaaacaaaagggcattcatcaacaatgatgttttacagtattattcacctcaatccccagagttggtcttagattaacaagtacagttgcacttagccgaatatgtttaggaagataattcttcttctcctttgttccttcatcttttgcaattagaccttgtatcacacaaaagactctaacttcagatttgagcttaaaaaacagggctaattacgaatttttttctctcgaattttggttattcgaactattgagatcgttagattcaaggactttcattcaaatttactaacgagcatctgacgtgtacgaaatgtatctgttagtaaaattgaacatgactctaacaatctcaatatttcagaaataaatttcaaccggtacaatttgatatatgtcaaatttcaagaaaaaaatcataataaaccaataaaaaaaaca

SEQ ID NO: 43784 - DNA, 4144 bp, Cannabis sativa
ataattgagatggctcgaaggtcgttgggtgttgacttttcaaggagatatggtgtcgattactataaaggtggtcatagttatgtttgctacggggcaattttgactgtgagtggtaatatgattttaccatagggagtgacattggctcacctaaaaccatacatgagttgcttgcattgctccagatctcttagggagtaacccactctttttcagggactgttctgattaaaatattggtgatgtttgatcattaaccatcacctttgtcaccattatgtttgaaattttattaacattgcctgaatttgactgctcttggcctcagcatttatctcttagtaactggggtgaaaagctttaaagtttgtatgttgaaactatctattatcagcaagatagaccgatgttgaggtgtaatgagttattgcttgtgtgcttggtgctcaagcatgagttcactttatgatcacaagtgaggtgaatcactgtcgaagagtagtgcaaaaaaatctatcaaatgttctgtacaggagcaaaatcacaggttgttgaagaacctttgcttgatgatttcaactcatagaactttgttaaagaaaaaactccaagggaggaaaaataaaaaagacaaattggattaaactcgtactaagtatagtgtctcatacttaggaggagctgaatcacttaaagaataccacaactgaggcagcgtcccactcccatagggtttttttcaataaattagaaaatctcttctggacgcaatgtcatacttctagagagctttctacaattgatgatgcttttcttttctttttgatttttatgatccaagaaggaacacttgcactagtaatttagatttataaactcagttggtatattcttgtgtgacctcaagtgtttttatcataacagcgcttaactctggattgcaaatagtctgtatgtgcgattgttcaacttaattaacttaccagtactcgcactagtacttcaggattaagaaacttggttactagagataacatcaacatttcattaaatcatagaaatactaactcaggtgtgcaaaattcctaaatgccactgcaatccctggctccatataacaggataacacttggctcccgtctaccaaagtgtatgtgacatacatggctctcgcgtaccatgatttcctatgaatgctcatgtaacgtgcatagctcccgtatactatgtcttatttgccatccgagtgatccaaaaaatgatttcattggtcacttgtgtgaaaacttaatagcttaataccatttataagaataagaacgtgaaatggactactccatttataactaatgattttgttaattttgaaatagaacccccacatttttatatctagcagtgaatctaaccctaagaattcactcttaagaatcgtttggtgatggttttcggttgattggacaaagctaattctcctaactaatagtaaaagatacacatgatacgacaccaagtaagcaaacctaaggcttacataacatttcagtaaccaaaagaagacaagcaacttaagttttcccacaaaatagaaaaaaaaaatatcaaaactcttcattgatcaagtttgtacttttttccacagaccatgaatcacatacttacatgtcaagctgttcggtaaaaatcctactttctgcattctatcctgcaaatccaacaacctggccacatctccatgctcgctgaaaaccttggcaactgcgttataactctgcgtgtcgaaaacttggaactccttggcaaggaattcaagaagtgattctgctttagcagcattagtttcttggcaatatccatttactaatgtcctacacatctcagggtctggtgataaaccagatttagccatttctttcagtaaggattcaccttctgcagttctatctattctacacaagcattccacaagagctttgtatgtgacaaagttgggattaatgttgatatgtaacatgttatccttcaaaactagtgcctcagttacataatcacatctgcatagagactcaataagctcattatagattatagcatcaggcacataaccatcttgagaaattctttccaaaagactcttagcagcaaatgggtgatttgctcgacataaagcaaccataagatagtcatagataccatgagacacattgacttcgaatcttttaagttcttcaaccaaattcaaagctgagagcaacttaccttctttctgatatccatcaacaagtaccctacaagtgaaactgtctggcaggatcccattcccaatcatctcatgcaataatgacctgcattcttgtatctttccctcattgcaataaccatgaataagagtattatatgatacaatgtctggattcaagcctctatggaccattctatggaaaagctgatgagcctccctcactcttccctgtcgacagagcccgttcatcaaggctgtataggaaaccaaatctggaatcacattccttctatacatgattctgtacaagtaaaatgcatcccctagtctaccttttctgcagtagctattgattaaagtgttatatgtaacaacatcagggtcaaaaccttcttcttccatcttttctataaaagcattcactttatctacatcctcatctttacacaagacatgagtcaaaatattaaacgtatagccatttgggtgtactccaattctccccatttcttcataaacatgccaacactgctcaacataattcattcttgccaacccattcaaaagacaattacaagaaatcacactgggaataaaacctacatctaccatcttttcaaaagcaccaaaaccttctcgaaccatacctgtttttacataagcctttatgagcatatcaaagataaccggatcccagttacattcttgggtacacaagaccaacgtttggaaaatgtcctcctttggcgaaacatctttaaccatccctatcagctcagataacaatttcatggctggcgaaaaatttcgagaccaagccaaaatatggagaacaaggcaatagttctgagtggaaggtttgagacccagatcatttttaacccagttaaagaatataagcgctgaagagtaatcaacttggcatctcaacaaaacccttgaaatttcatgggtacccagatgaggaagaaggccttttatgctattttggagaagggaaagactcgtgttgtcttgtctgaggcttgagcatatgatattgacaatattggcggggttttggttcgggggaagaagatggtaaagagggtttaaaccagatttggagtctatatcagggactgccagttgggaagaggaagaagaagaagaagaagaggaaatggtggaagagatatccgagtttagtgaattgagcttagagagtgaatctgaagagaaatatgtgcgacctgagttgttttgtatgttacgaattcggctaatgtaatgggttgatgaagctcgactcatcagagcaagcaagtatcgaaaaatcaaagagtagaatgagaaccaacagaaaacggggtttagtttaaagttttccttgaacaacatgtcgcttgttgttcaggtactttgttgtcgtttaacatgaaattcacatttttatttagaggtggtaattcctgttcatggatcgtgttcgtttaatatcgagacttaggtattacaaatgaatattaaacctaaatccgacttatttaattgtgttgaaaactaaaacttaaccccaacttgtttataaacgagttaatccaacccaatctatttatataaagaaccgtgtttaaattttattaacttatcaactattaacatgttttaggggtgttcgcagtacgggtggtgcgatttttgactaaattttcaaaccaacccgcacatgcagttttttcaatttctcaaaccgcacccgcaccgcgaaactaaaaaaccgcaaaaaccgcactgcaaaaagtaaggaggtgcggtggtttatgcggtttggactatcactaaataattaaaatatcacaaatacaacaaaacttgagcaacacttgtcaaaaatacaataaggcttgaaaataaata

SEQ ID NO: 43785 - DNA, 2231 bp, Cannabis sativa
cacttttaaaacacaaatagtaatagaatacaataagcctaccttacataagattacaactttgaacacataatcattatctttcttttctttctttctttctttctgttgcttttgtctttatttgtttagtagttcacttgtcataaggccaaagcaaattaagacaagaaaaagtgagtcagactttgatatatgcttgaccacttattctcttactacttttattttatatattattttgatcatttcaataactctaaaataaatacaaatactttttgttttgagggatcaaatcaataatgattggaaagcaaagcatatggttcattcattcataatattattatttgagagaatgtttctagtcgtctacttggaccacattcattcctttgttatcaaaaccactctcacacgttccatataatacagccaattacatgataattattacatatttatataaactaagtactctacttaagtaactctactatcccttttcaccacttttgatgattcaattctatgtgtgtttaatcaattaagtttttggttttataaaagctaattactataatgacttgaaaactacaaacacctttactttgtagtttcattataaaacaatagataaatcaattttaacaagtaacataagagagtcatatcattcatcatattaattcatgtcatgccactatataataaccattgaaattgtttatgaaacttggaataaaccaccccatttgaataaaggcatcgatattgagcaatgcttaacactttttaaaaatgacattttataattaattaacgatatgtcttttcgaataagtacaagtagtagtatcaaactccattattaccaacttcttcagcttctattatcaaccgcatatgtatatgaattacattacataattatagaattatggggtttttctttcttaattcatttgaaaagtgcaggaaaaaaaaagcatctttatctataatgtcacatttttagacacacatgtcatcttgattttagcaaaagcatgcaattgcagagttgtcaactgtacacaaactcactctaaaatctctcagaaaccaaaaaccaaaagccgaaaccttttctagtgttataaaaagacttggccctctcttaacaaacaactgagcagagcatagaagagcagagccattctaatggcctgtctcagcaaagagaggtgttggggtgtctctatctctaaaatgctctcagaagatgacaaacaaagcttcatggattccaccaccactaccaccaactcatcatctactcccaaaagattagacaaggttttccccgtttatgcattggggatttccaagtctaatcactctcaattggaacaactctcacacctttctaattcccctcaagaccccatttgggatgccatcagacaagaggccaagctagtggtatctatctaattctcttaaaaaaaaggaaaaaaccttcttttatttgtcaaaattatttcttttcacttcaaattttctgggatttctgtgatattatgtaaagtcatgttcttttgggattagaggccaagacaatttttttttctatttctttctcttcaagttttctgggaattttatgaaatcatgtaaagttgaagcttttgagagatcttgacaatgttgtttgttgcaggcagaaagtgaaccaattttgagtagtttcttgtatgcaagcatactttcccatgattgtttagagcaagcacttggttttgttcttgcaaatcgactccaaaatccaactcttttggcaactcagcttatggacatattttatgatgtaatgacacatagtaagaccattcaacgctcaattcgtcttgatgtgcaggtaaaactttgatggtgtttattacaattacaaagattgtatttgtatgtatagatatatgtatacaaactattaagtttttcttgtgttgatagtttctttcaaccttcttttttaggcatttatggacagggatccttcttgtttgtcatattgttcagcactgttatatctcaaggtattattctcttctgttctaggattgaaagttggtttgctttttttgtgtttaccaagttttaatagttggattcaatttttgtagtgtacttcactaagatcatcaagtaaatgtcacttacttagaaaaaccaagttaaaagcttcc

SEQ ID NO: 43786 - DNA, 1932 bp, Cannabis sativa
tcaaatataaggtataagctgcaagaggtacgtgatgtgatcaacccttccaacttaataatattagggtggtcaagccgtcttagaagaaggatttccctcgccatgaacttgacactctcaatatcaagattatcaaaccgtacttttttcaaagcaacaaacttattgttaatgacatcacgagccttgaaaacactactataagttccttgaccaatctgacaaaaaataatgtcatcaaaatacaaaaacaacaaaccagagcaatcaattccctagtaatacttcagtatttacttaaatttgcatactatcaaaatacttgcagtgaattgctttacacttttctaaatggtcataaaaaagaaaatctaaaagtacaagatagaaggattacatggagcaaaatttcaacacacagaatttagtgagtaatctaaatcgttcttttcaaatagcattagtcaacactataataaaaaggctaatggaaaatctaaattaaagaacaaacgtactttattcaacttctcaaaagtatcagcacggcgtggtaaccatccactgatagcttcaggtgcagccatagaaagccaggtcggccaacctgcagcaacctgctctccctgtgtagcctttggaacttttccaaacccgggatgattgaagacagcaacttcagtcttctctgtcttcttcatctcaacctgatcctcataaattctcacagagccactgattttcttatcaattaacataactttgacatcaccaccatccagtctctcttttgtccaaaccccttcttctctttttgaagaattgtgtcttgagaccttcagttccgagtactggttgtttgaagatgacaatatctttctcgggctttccctgctgtctttgacagcagatgtctttgaacaaatacaacccattttctcaaaaacaaatagaagatactccccaacaaaaccccactccacaagcgaaatcagaacccaaaaccaatcccaaacttcccaaaaacttgttctttcttcaactccataaaaaaggaatatcacccaatgatcaactaccaataaccactcaaggaattcatatttgaaattcttgaaaaactatctttacttcttatatccaagtaaaaactttccaacgtcaaacttcacaactatttagaattcagatgatggtcctaacgaaagaccccaagacgaacccaattataagaaaaatgcctaaaagtttgacgaattcaaacaaacccagtaaaaaaagtctctgaattcagtcaccctcgtactccgccatgtggattgaataaaacccaaaaacaacgatggatgatcgatcaatacgctaaaagggtctgaaggaaacgaaatttcgttgaatacccaacaaaaaagaaagtgaatatgatgaattgaaatggggagaggcttagttaccaagaaagaggagaaagcttgttgagtggcttggtttgatcgttcaacgcgcattcaaaagataatcgattcatattattaatatatttgtatgatatgaaataaaaaataatgatttttaactaaagaagacggctttgccggctattttgctgagtcaataatattaatttaattaatttttaactttctcagaattaataaaagtaattcccctttttttctctctctctcttccccatttctcttagtaagcagttggagttggtttttgtgttcaaagaaagttgtttggtatttcaatgcagcaataacgcgtttttatgaaataacaatatcccctaacttatatagcttttttaattcatttatttttttttgtaaaatttaattaatatgcttttctcataataataataagaaatttttacactaaaaatctaaaatgataaatttattacattaatacctatac

SEQ ID NO: 43787 - DNA, 3263 bp, Cannabis sativa
gaaccaaaacgagcttccttcccttggtagccatggaggattacccagaagagatgcgtagtccgccggtgagtctggtctccgtcgctggatgccctgaccttcaccaaaccatatccacgcaccttcactctcttcagcccccaatcaacactcttgcgttgccggacctttccaagatctctcttctcctagcacctaaccccaaagatgaccaatcctccattcctgattccgccgcctccgccgggattttgaagcgggattggctgctcaagcatcgcactaagattcctgccgtcgttgcagctctcttatcctctgattgcgtttctggcgatcctgctcagtggcttcagctttgctctgatcttgataatctcaagtatgttttctttcaccttattcgccgttaccttcgaaaaagaagtgtttatgaactttctgtgtttgtttcagaacggtgattcgtgcgcgaaacattagattggtacttgtggttgttcattctcattcgaaaggtttgtagatgtagtttcatgtcatctcttgtatatttcttttttgtgtttatacagtatatttgtacacacatttcgtatatattttggaaagaggagaatttgatcaaataggaaatgtatttgatatagatgacattactgaagatcgaatgctcgctctacggaagcgagctgaaattgattcgaagtactttattaccttctcacaaaatgatgaaactgaattgaaacaatctcttcacaggtatgcatttttcatgttatagggtcctctttggacaaataaggaaaataaagaaagaaaatatatttaattgatttgaattgtgtattggtgcagattgggtagcatatttggagaattagcaaacatatactatagagatgaagggcgaaggattaaagctcgaattgagaagaaaagttgcagtgcagtcgagttgcaagttcgctactgtttcaaggcaagcctcgttagcttagattttggtcaaaattgtggtaacagtttagaatttaagaatcacatattttagtgaatttcttatgattacttttttttagtttgttttgttgactctcctgattcttaaaaatcatgtttttgctttgactcattatgtatagaactatctgaagaggattatggtcattttttctcttatctgtttgcactactaatatttgatgcaaacagtaagtttaatgtttcgttggtgtaaagcggtaaacctcttagatagcttgttcattaaaagatcaaccaatgatgcaatgcgggtctgctttctttattaatggttcttggaatgtataaaatctgcattttcccctttactctaagttaaaacattgcccccaaactaagacagcacgatcttggtcgtctgagaattttgtaacctttattggcactattggggttgcaatttggatatttctggttttggtttgtcgctaccttcattgtggtgctaattttctatcatacctccttcgaaatataggttgctgtgtatgctgaatttagaagggattgggttgaagctattagattctatgaagatgcttatcacacgctgcgagaggtatatcttgatttatttattcttttcactccatctttaagaatttttatagatcatagatgctatcagtgagtaatttttttttttacaagggactggagttttgttatgtgatttctttcttcttggatagattattcattcactcttaagcttctatttcttctttattaatacaagtcctatttctttaaagtgtcattttttttcaattggttgagttttatggtagcttgccaagttcctacccaaaacagaccattttgctcagaagctgttcaactttcttgttaaatcatattgcatgtataaggttatgtcagcataagaaaattttccaccaaccgtgaactataggcagttggagaactcttccatgtacatgatttaatcttgaatgaaacaattctcgtaagatactcaatattttatttgtgcaattgaagagtctccaaactccaaaccctttagttatgctcaacaaatgattctatctcaaatgtaatttaaagaatacaatgaagtattggtgggagacttacagattgcgattcttgctaatacttgaatttgttgtgaatcaactactattttctttgtatttcaagtgactactattttctttgtgaaactagagatcatactttttaatctcataaaatgattccatttttcatttttgattatgtcaaatattgtatgcagatgattgaaacatcgactaggttacccgctatacaacggctaattgagattaaaactgttgcagagcaagtacacttcaaaatatcaacctctctctcactttcactaaatcgcatagtcaccattagcccctctcaggtggtctgagattttttggtacaacagagccttctcatctctggttaaacatatatgatttttatttgataattactttttatttttaaatacatttaatattatctatctttggttatacagttcaaagatgacaagccgtacagtaatcaggagataaacgaaatacgggatgaatggggcaattttgtgaagtcttatatattaaaataatgagtatgcgattatttacattttgttatggtacatgtagcatataaaaattttagctatatgatcgttacttttagtgatacttaattttattgatataatacttcatagttatatcaattttttattatgacatgtaggatacaattttaatgatccttacttttgattatattaaatgtacttcataactatataatttttttaagttacatgaaaaatttaattatcattattatattataaatgttattgttagtcatataaacattgttatgaaagccaattttaatatctaaaaatgcaggtggagaagattgtaaaaaaatctgtaattttcccctacctacagcaatgcgtcactttatagccgacacaaaaagtgaaaaaaaaaaattgcgtaacattatgtgtcgagttgtaacggacgctatattctaattagcttcggttataatttgaagctacgttttttgctttattccaaaactgatgctaatagagcgtaattttttcttcggttctcaaccgaagcaaaaaaaaatttgcgtcggtttagaaatgaagcaaataagttgactatttgcgtctgctg

SEQ ID NO: 43788 - DNA, 4522 bp, Cannabis sativa
cacaaatccaattacattgtggctttccaaacgcaccctaagtgtttcttcgaataggatgttaatgaacttccattgtcaactaaaactcactttatccttttatttgggagttggacagttattacaagaggttttgtatgtggaaaacccacgtgtgtcacatggtctttagtcaaggtaatcagtggttcctcaatttcggcacgctttagcacttcaggtgctaacctgaggattgattttttacttgattggcatattgttattgggctatgttacttattcctgggagatgggccctccaaaaattaccaaaatatttttcgccatcaactgatggtggctagacatttttatttggaatttgattgttgggttgatttttttcatttcccttatttctcacatactgcctaaagtatttttgtgacatgacactttcaatctcatctttaaagttgttgacactcctcggttgtgtggctgatatctttgtgaaagcaacgatatttattctggtcctatttattccttgcatttcttataggttctggtttgcaaaaagtgaccctattcttgtttatgaggaatatgttttcacgtgtctcattcagcttagtacacacaatataaactaggttgtatttttttgtatttgtttatgaggaatatgttttcacgtgtctcattcatcctttctctttccatgtggctcttggctcttacacgtgtttgtaatgtttttttctatgttgctcgagttgggtttatttcttcagccatctcataatacctttatctctgaccgatcttcttcctttcaaacatatataagtgccctttcgttaaattcatttatcaatttgattgggtgccctttcaaatcatcccataacttgcctccaacggtagacaagttggtagttatatcagccttaactattgttaattgaatactatcattaaggttgttttacctttgcctctattttactaaagcaactccaaaaagcctttaaggattcccaaggttggcttgatattcgtcaaagatgacacttctggtcttttgtctctcacagcctagaattgtttttttaattctttagatagttgttcccatgaagtaatggaatgatttgtgaacttatcaaaccaattaattgttactcttattagggatgtagggaataataggtaatgcatgttattggaaacattacttgctcgtattatcgtgtcaaagttattaaaatatgcaactagggctttggttccgtcgtattgcgcaacatgagggttcacaaatccttttgaaaattacaaattcaatatatcagggttgaaaggttctgggtaatcatctgaatcatacacttgaagcttcccatactaaccatcttgatatttcttgaaccaatcctgcagctaaattatcctttgttgaatgaattatccttacaatggacgtggagggcgagcagatcagttgggtggttgatcctttgtgttttttgttatttttgtgagacttttgttttccccaaggtcgtggcaccctaattctatggaccttgacccttgacaggaatgtcttttgtctcccttggtttttgttcctaggggtgaaagggattattcaactcctattcattggtgttgggtccgtgtgcccttctattttatgaatcatagggtcttccaagtggtcgcaaaataggttgcttttcctatactggcggtgcatcattttgagttgctctggctgccgccatggcccattctaactccctttttcttcagttggactctacgagtctctaacggttgtcaattttctaactctaaaaggggaatgtacctcgcacggtattatgcattagactctctactttcaagaacttctttctcagtgtcactctattagagttcctcttagtaggaccccttccttcgttagtttgagtttgtgctacctggggttcttttccaagtcgacacattatttcttcttccatgataggttcataacatttagtgttttctaagatcaacaagtctggttatctaaggggagatgtgtttcgagtttttttttttatcaaggcacccaatgaaagcaccaaatttttaacttagattttcatcaacaataattgtagacttataaattaaagtttcctatttatagttaataaatataaataaaacacaaagaacttttacgtggttttgtagtttgaaatgtacataccccacgagttaatattattttgtagtaattatttataatttctttcgattaaaagagaatttgtgtagatattcactcaatctcatagggtttttccacccaaaaaaatcaatccttttcctagtagaatttatacatatttatagggatttaaggaatgtcaattactctctttcaatcttttctaggtaatcgttcatgaaatgtggacaatccccatgtttcatatttacaacatgtagataaaatgaaataattgttgattaccgctttttattcttattaggatatagtttgtcgttgctaatgtaaaatattccaaccattgctcgcaatcttcaattgtgtttaggaatagttggttgcattccgcgagatgctagttaagaggtttatccttgctactgccttttactgcaattcttttacttgtctttaggagttttgacatcagtcgctcttgacttatttttgttagtctttgaacatactcacgagtatgtggatcaataaattgcaagctcattaaagaactcgttatctcccatttctaacgatatagcttcagttcttttatttttctaagctatcctggttagctttcgaggggatctcagaatatcatcacctcgcagttctatgttatatcgtcactgtcattgtggcacagtgcgagacagatatttgtttattactgcttatcttgaggaaatataatctttagattcaataacctctactaatattcgagattattattaatgtgtcatttccatatttatgtctcaaaatatggtcataacaataactaataaaatatctttctattgttatttttttaaaactctttgcaaatattcaaaaaaaaaatatctttctattattttttacatatctaaacataatatatttctattattcttattgaaactcactgcacatttccaaaacatatttttctattattgtttttttcaaataataaaatacagtaattatttatgatatgtgacttattacgtattgtagttacataaaaaatctttcttttcaaaaaaaaaaataaaaataaatacaactaaacatacacataataaaaataaaatctttgttatattaaatgtggctgttatacgtgtttgtggcgaaggacacgtgaattccaaatattaccttagcgcccatcagtgggcctaaatgacttaaactaggcaaaaaccatgatccattttgcctcataggataacaataacatagtcacccatgttaggttccatcaagtctagtcagcatctagaaggtccatctccatatatctagaagaggtcctcaatttgtatctgtaagacggttatagttacctgttttcttctgaatcgcacaagatcaggaattactttcctaaaatctcagacatagaataatacattgctaaaaacgaaaactagacaattggaaatcaagtaattattatgtcattaaatgcccatgaatttaggacacaatatgaataagtaacttcgtgataaggcctccacgtcagcatacacaaggtgcctcatgggctagacttcactagataagcccaaagtcaatatatttgtaaaactccccattagaggaaaaaaggtaactagtatgacctgtagaacattataaacacacattaaatccttcatgcaaagggttagaaattcttggcatacttgctcaggcaaagaacaaagtgctcaaacttattataatccttgaaggtttttcaaccaaagtacttaataatattgactagtggactaaggctcataatgactaaaccacttaaaagacacagagtgtcttcttcatatatttctctctaaattatattttctttagcttttatttctaataattagttttccaaattactcgttgatgattttggagctttcattgagagattaagaaaaaagtgatacaatctaatagtacatttagtatttatggtactcacctaagcaaaatctaaacttcattgccaagttatgctaatccaaattccataactgggctcaacgatgatcagaccaaggcaactagacaacaaaaagggaaagatcagcatgattagaaaagccttcatgatgatattgatgaaggagaagaagaagaggagtctaaggactcagatcctatggatccaaaagacaatgatgtcaataagggagatgagcgccctgattcagatcctaaatttgttaggatggcaaaaaaatagaagaaact

SEQ ID NO: 43789 - DNA, 3237 bp, Cannabis sativa
atgtatatatataatacatgctataataaaatacatatttattagcgtttggtggtaagtcggaatcaagtgtatacaaattacaaaaagtactataagtgaagaccttaaacgtatgcataaaaaccaagtgctttaataacgtgggagttaaaataaaaaggaaaacgacgtcatatgcttgacattttgtgtagaatgaatttgattttgttaacaggatctactaaagagatctctcacgatgatgtaaatatatgccaaacacagattagggccaagaaaaataaaatcatagcatatataattccacaaagcagagcttagagcaatataattgataaactttttaattaaaattaattaatattatctataatgcatgaagacaaacctccaagtctcgttagaataagttgacttagggtactcttataattaattaagctagcttctgcattaaattcttagtagtgaaaagattaatattaattatttattttagtttaatattaattaagttgcaaaattaacaagtgatctatatgtctggccaggcttccaaccagcagggattacattgtttgcgacaatggtctggcttcctgaggtgagacgaatggagaatggagcctttaagggcgagccggcgttgagtttccaaacagctccccaagactgttgcattggaagccatgagtcttggtcaagtgcctgtttcagatcaacggacccaagttcacctggtccatcttcgaattctattaatgatgcaaaatattgagcgttcgatcctgaatccactttgaatgtgatggtctttcctggaaagttgcactcaatactatatatgtatagtattagtagaagtcaagcaaaaaaaaaaaccataattattattaatgaaataaaattctaaaaattgtaatagtgacatgaaactaattgacgtatcattaatagtatattatacgcataatggaaagataattaatgtcaagatatttgaaaatatagaagaatatatataattacacacgctctaattggtctaataaaagactatatatatatatatatataaaatatgtaaacatgctgcaagatattgaacagaaattgtgtaaatatgtcaacttaaaaggaacattaatttgacctaatcaataaatgtaagagaattctttttaattttgttatagtacttttcgtctttagaatttcattttttacagcatacaatatatatacctcttgtattgaatctgaagtactccagcattgcgtaactgattagcctgaccagaagaagccatagcaccaaaagcagtaccactcaaatcaaagtgaacagcttcattggtacatccagggcactcatctgttatgaccaccgtcactggatttcccgaacaagctttattaacactcgatgtgcatttcacctgataacacactccacaacctttaccagatttgtacaaggaagggcctcctgctgagatcaatgaagagaatggtgactgttctacagctcctccatagccacatgcaccccctgcgttcgtaacataattaatttaatattatatatccttagtttgcggactttatgatacaaaatatctaatgagctcaagaaatacatgtatacatacgtaccgtcactgcccgcaccgttggggctaccgtaccaagttgcaccagcggcggcccagcttgagctagactgatcaactttcatggagacattgaggagcttggggttgaagccagagacagtgtttaggagtagagaaacgacggttattacaatgaagaatgataatagatgttgattgagatgatggtaaactacagccatttcaatttatttcttagacaagaacttgttgtttctctaatattgaagtgtattcgtagctgttgtgctgatgaccttgattgcatgaacccttggtatttatagagggagtagaagggcatgccattcaaatacacccagttatttgttgccacatatttcaattaaaaaaccatttttattaactaactgcacgcaaaatggtactctattagggctcgtttggtacgttgtattaggtcgtattatattgtattatattatattgaatgtgaatatatatcatatttttatataatattattgttaaatttcaatttatactaaaatattatatagttaggagctcataaaatttaatatttcatataattttacataaaaatattgtataaaatataatttaatataatattatacaatacaatacgatataatatagcttacgaaacccttaattatataatatatattgtttcataatacatacaaaagtatgacctcaattaattaaatatggataactattatgaattagaaaataaactttattaacaattgtgaataaatgtccattactaagaaaaaaaagtgtaaatataaggaaagaaaatataaatatttttctaatattaaatgtgagcatttaattaatggaaattattagtttaacggttttttccgttaaaattaaaattgttaaattaatgaattaataattttttaaaaaaaacatagttttaaatttttaaattgaatttaaaaaatattaacaaaattaaatagttatttttttatataaatcttaatttaaatttgaattagacgtttatttaattaattattcatactttataacaaatttagtagttatattatttaaaatatctaaacttatttacttattttttttaataaaattagttagatatattttttttataagtaaatttaaaactagattaaattttatatacttaaaaaatataataagaatctattagatatataactttatttttggaatggaatattttttttggttgatggctaaaaacactttgagtaaagactttaaacatcatccccactgcactggcttaaaattgaatcatttgtattttgcggatgatcttcttctcttttctcaagatgacacccactcaattaagctcattttgagaacttttaagagattctttgaaattttgggtttgtaagctattgtcagtaaaataatagtttattattctggtatgataaatgaggatattcagcacattttagattgttcggggtatgttagaagttctttgccttttagatatccttgtattccaatttgttaaaaaaaaaatatctaaagtggaatg

SEQ ID NO: 43790 - DNA, 7040 bp, Cannabis sativa
  modified_base (28)..(41): a, c, t, g, unknown or other
taatcaagcttccaataagtagctctannnnnnnnnnnnnnaattctctaacttattaattcctccttgcaccactataaatttggaattgtgctcttaagtatatagaacggtctatatgttctacgatatagataccctatgaattatccattattataatccaaataatcaatgatcctctatagatgatctacatcgagttggaaaaaatttaccgttctacgattcaatgtattttatccttaaaacacttagctacctataaaggatatttcagtacactaatataattactgaaatgagtattcaaccatttctctctattaagccaagctcgaagaaaattatcatttcacttctatgcatttataaaagctatagattctgtatctatgattagtgctcccgctcaattgaactactatgttcttaatctgtatgttacggaaatatccaattggtcaactttaacgaacaaattgaagaacataaataatacaactaaactagaaactaaccatatcaggattgagatcattgatctaagatcaactaggtgatattgacttagatagatattatgataagtttatggtatcttatctaagtttaatatcggtccctttcgatgtatactccatacattcaatccaagcttactttaccaatgtcctggaatggacatagcacttatccaaggtgcaagtaaactacattgtaaattatcatatcagtttaatcttgtgtactgataaatcgtaagaatttatttcatcacataatcttgattactttccactactttgacaacacagtaatcaagaaaatcaatgtgataaggatttagatgaatttataaatcaaataaatgatcataaataaacatgtgaaccaaataatacattaaacaagtaatgaaataaatttgtttctttattgataaaagaatattcaagattacattaaaatatagttttagttagggtacaaaatccaacattcttgactttttcaatgtctatctaaattgccccgctaatactaagatactacaccttgtctatgtgactctataggccaaacgtcgcattccactattaacagcataaaaatatgaaaaatacaaatttcatatataacataattaatacacttataatttaaatatacctccataatcataaaaataataattaaagcttacttttaacaataatccctaattgtctaataattctcaaaataaagctaagcaatcattacaattaccccccgttaaaaggatttgtcctcaaaatctaacttgaataactctgggaattgagccctcatatttgactccaattctgtggtggtttcctctaccttgctgtttctccagagtaccttgaccaatgttatggtcctattccgaaggattttatcttttctgttaaggatctatactgattgctcctcgtatgacaaaactggttggagctccaggatttcataactcaaatcatgtgtgggatctgagatgcattttcttaacatggagatatgaaatatgttgtttattgttgacaacgctggaggcaaggctagacggtaagctaccaatctaaccttctcgagaatttcaaaaggtcttataaatctaaggcataactttccctttttcctaaagcgtttcacccctttcattagacataccggtagtaatacatgatctcctacataaattctacatttctgcgttttagatctgcataacttttctgcctactctaagaggtatgcattctgaccttaattttctctattgcttcattggtctacttaattgattccagacctaagtattttctttctacagtttcattccaatgaattagagatctacattttctaccatagaacatctcatagggagccatccctattgtactctgataactattgttgtatgaatactctatcagtgaaaaatacttactctaggagccttcaaaataaatcacacatgctcacaacatatctttaagtatctgaattgctcgtttagaatgaccatctatctgaggatggaaagctgtactgaactataactttgtacccatggcttgctggagactttcccagaactttgaagtgaagttgggatctctatatgatacaatggactttagatccccatgtaatcttactatttcctttacataaagttctgcatactgatctactatgtacgttgtttttactgaaaaaaaatgtgatgattcggtaaattgatccacaactacccatatggagtcaaacataatcgtggttctaggtaatccaaccaaaaaatccatggtgacatcataacatttccacttagaaagagtcaaaggctacaaacccctacaagtctttaatgtttagccttaatctgctaacaagtcaagcactgcgtattctaccacatcctttttcataacgcaccaccagtaatggtatgagcttcatcaagaatttcttttctaagttccacactattagggacacaaactcaggttttgcaaagtaaaatcccattttttcatatcgagaagtctttagtttgaccaattaagacttcttctcggatcgtcactaattctggatccaccaactgatcatttttaattctatctaacaagtctgattctagtgtcaaattattaagtttcccaactacaaactcaatacgtgaattgaccatgtcatctgccaactgagatgaaatcataatcgtgttgaataccttcctgggacctttcattcttagggcatatgccactatattggccttcttgggatggtaaggaatttcacaatcataatatttaaccaactccaaccaccacctctgtcttatattcaaatatttcaaggaagagaaatatttgaggctcttgtgatcggtataaatttcacacttttctccataaagattgtgtcgccaaattttcaatgcaaaaaccactgtagcaagctccatgtcatgagttggatatcgctgctcatactccttcaactaacaagaagcataggcaataaccttattagcttgcattataacacaccccagaccctatctggatgcatcacagtataccacaaacttttcttgatctaacaataatgctaatacaggagttgtgatcaatcactgcttcagttcttagaaacttacttcacacttctctgtccatataaactgctgattctttttagttaattctgttaagggcaatgagatcttagaaaacccctcaacaaaatgtaaatagtatccagttaaacccataaaacttctggtttagtgactatcttcgaccttggccaattcctaacggattctatctttcctggatcaatcatgatcccattcttaatgacaatgtatcctaagaatgacacttgggatagccaaaatttacaccttttaaatttggcatagtgcttatgttctcgtaatcactgtaaaaacaatttgtagatgttgctcatgctccatttcagactgagagtacacaagaatatcattgataaatactaagaacacatatatcaaggaaatcctagaataacctattgattagatccatgaaagctatcagagcattggttagtccaaaacgtataactaagaaattatagtgaccacacctagtatgaaaagcagtctttggaatgtcctatcagattctcaattgatgatagcctgagcagagatcaatcttagagaggaatatcttctcctgaagttgatcaaacaaatcatcgatcctaggcagaaggtacttgtttttaattttcaacttgtttcattctctgtagtcaacacacatgcaaaatgatccatctttcttcttaacaaacagcaccggatctccccaaggtaacacgctaggtcaaaaaaaccctaaatcaagcatccctttaagtgtatcttgaattccttgagttctgcaagagccattctataaggtgccttggaaactggctccactccgggtgccaagtcaattacaaaatctatttcttattccggtggtaaccctaaaagttcttctggaaacacatctaaaaactcttgaaccactttaatatctttaggctgaactgactctggccaagtggtttgtaataccattgctagaaaccctatgcacccttcttctaacaaatctctcactttcaacactaagatcactggaaattgggaaccttgaattgatcccacaaacacgaataggtcttcacttttgggctgaaagaccaccatctttcacttacaatctatgttagcagcgtacttggacaagaaatccattctaattataatatcaaaatttgctaaacccaattccactagatcagtgctcaactccctatcctcgatcctaattgtcatagacctaatccaccttttggagagaactatttctctgcctggcagtagggttccaaaccctatttcatcactatcgcacaacctacccaatttatcaattattttggtcgtcacataagaatgtgtggctctataataaaataatatagtgcaataaaagttgttaactaaaagctaacttgtgacaactaaagaactagcttcagcatcagccttggtaagagtaaacacccttgttggaggggggctttgcttttgtcttttgctcctctttctttaactatgggcacactcttttgtaatgtccagttactctaaactagaaacatccttgaactctacactcgcccagatgatgcttcttacaatgggagcattctgggtaagtgtatcggttttcagatccactctatctattaccaagacattggttcctctagaacctcttgttctggtttgatccaccagatgaaaatggagcctttcttttctgatctgaggtcgagtcacagacacctctaccgtaaccagaggtaggaaaagtagtcgccctaccagcactaggagtccctcagggctcttgagtacactccattgtgccttcagcttgtagtgtcttccctaccatgtcagcataagtagttttatcatctgtttggatcattaaattgtgtttgatcttggaattcaacccatctagatatttttctttcttactaaaataagttgacactattgctgaggccatcctagccaatctgtcaaactgtgttgtatactctgtaactgtcatgttctctttttgggtcaactgcataaattattttctctttgcactacaaactacttcattatagtactttgcattaaataattcttgaaattcttcctatgtaattatagtgacatcccaggtgagggacaccatgtcccataaaactagggcatcctcctagaactagaaggtagcataagtcactctgttattgtcagtgactcccataaaattaagtagtctgttaataagtattagccattgcttagcttcataacgtccaaaactcccaaaaagactagaggtgattgcttacggaatctctcatagagtgattccatacgattgccaactgcaattggtcccacttgcataataggggaaggagccatttgcacctcagtggtaggcattactagagtaccttactatcttagacgctggattttttcatcttgttcattaatcttggcttgcatttcagcaaacctatgttcctaatcctgggctgcctacgataggttaatgtcaccccaactgcatgccctacctcttaggcctctgcctcagccacgaacatttagggaaaattgaactccctaaccgccactaaatataaccgaatcacactggcttctcgtgttctgcctggcgtccattctattagaatagcctacataaccatgagctagcttgatcaaatcgtgataaagattaatttttaattagcgattacttgagaaaataaaatatgcacctattcagctatcaggctatctacatgcttcctattaggctttccttataacatactaataaagaaaactaataaggcatagaaaggcatactgaattgtgagtagagcataactctaatgatgattttacatatcatgattatcttcagaagacaacttggcaactctaataccaaattgtgacaccctactagtttaggcatgtaatctattatgaattcttaaacatgcacgctaaacatgcaaacactatgcaattattatactaatcttaccttgatttcaaattcaggtgtaacggtcaacctaagtggaaactactgctcgacggtttacaggcccctaagtcataatatatgtaaaactgataagtgataaactaaatcactttcggggacttaaacttaaaactaaaagttttcctataaatagataacatgtcaatacaccaaatatcaagaaaacactaagaaatgagattctcaagaaaataccacaaaaaacagcaggttgtttcctaaaaatggtaggccatttttttatgtccctggatgctaaaaatggtagaccgattctatagaaatggtttgccattttttactatagaaacacaaagaacctcatttctcctagaattctaccccaaatctcaccaaattctctagaacacctatttgagtcgtacacaccatataccaactgaaaaatccatcaacaagaaactatagaaaaattcaccgcgaatgacctaagtttgagcttaaaagctcaagtttaggtctttctcaacaacaagcactaaaaccagctcaaaataacttgaatgaccttaaaacaacctcaaaaaatgtttcaatacagccccaaaacatgcagaacccaaaacttaacatacatgcaagaaaacctaaattttcacttgaaaaacaaagagaaatagaagtagaagctcaccttgatctttaactaacaccactcttgaattcctagtgagaaacctcttgatttaggtctgaaattgaaataaatacttggagtgtttaaattttgcttgtggccgaagagagagagagagaga

SEQ ID NO: 43791 - DNA, 3458 bp, Cannabis sativa
taaaattaaataaaaatccttaaatttaacaatctcaataattcaaagagaatttttaacatctaacaaaatttagacagcatgatttagtacatgttaaaatttaaaaactaatttttattagccttattattaatttattattgaatgccatcactcccaatcgatattttccaagatggtcagaaatttttgacatttggtcgaaaattccagagaccttgtccgatattacagagactattttccaaaagacatcaaaacaattccaccatttatcaaaatgccattcatgcatcaataatgctccttttgctcatttttattctaataaacatccaaatttattgtttttttttcattttttttaagaaatgtattgttttcatcaccccaaacgaacaagcatcctagtaatgttttttttttacgattcaatttatttatatacaaaatgattagcaaaatgttcatgtttttgggtcattaaattgtcaaaactagttcagtttgacgttcagaaaagatttgtgttaatccaacagagcttctagtaagttctttgcaagattccaaaagattgtctagggcgggatttggttgatcacttctggcaacaatattactaacctcttggacaaacctaacaagggtaccttcctgaaatctttcggaattcaccttgaataatctcgaccaagccttcacagagaagtctggcaacgcagctaacagaccttgattctgaatgcaagaaagagcagcgacgtagtcttctttctccaacttcatgcagagtctttctttgattagggatgctggtggagttcgatccgcctcgaccaagtagttccatgttatgtccaacaactctccctgaaaatatgaaatggttcacagcaattctaactaaaatataatatatatatatatatataaataatttatcagctttttaagggtattggagaacagaagaacacatcgagttcatattgttgcccttctaaacaaatttataatgcaattcatgagctagtttaatatatctggcacaaagagaatttttgcttataaatatactagtaaataaggaactcacttcctaagagtatctacagttagataaatcaaatacccaacaatgcataagctttacaaggttccatttagtgggagttacgaagggtatgcaaaaacatagaaagtcacctttcccgctctagaagcctctagtatcatctgaagatgacgcttagagttgaagtgatagccacgatgcagcatcgttttgtaaaagtactcaaaatcatcccacttcttctcagacacacacgcatctaacagagtattgaatgtgtagacatctggttccaccaaaacattgtgatcagctttgctcctaagcccatttccatcttctaacatcatctggaacagctcttttccctctttgaacatcccatggtttagataagctttcagcattatgttacaagtaacaagatttggggagcaaaacttcttcatatggttgaacatatacgccccatctttaacatttccagagtcgagacaagcttgaattaatcccgtgtaagttacaaccagaggtttatttgcaaccttacatatcttctcaatctgtggatcggtccaatttttagtgaccgaaatacataagaacttgaatgtgcaaaattgtaagaaggccgtacctgagctaatgcctcttgacaccttccagcgctacaaagacatcgagcaaaatcataataaagggcagcagaacctactattcctcgattctccatgttttgaacagctaatacagcctcatctagcttaccttctttccatagggtattcacaagcactgtacgtttaagaagccattattataatgagatcataatattgatatacagcagataaaggtggccaagtataacacctctataagttaaagcgtttggagtagaagacttttgtatttttctgaagaagtcgtgaactaagttgtacttgccacatgcatacatcacctacagaaaatgtgtagaaaaagaagtttatttattttttttgataagaaactaggatgtattgattaaagatggtaggaaatcatctagattacattataaaatgccaggcattaattacagcaaagtagaaaaccatataatgcaatactgtcatatacatcagaaaacaaattactattacagccacagcagccagccacacgaaggcatatagaaaaataaaactctttgatttccttattcttgataatacatatatgttagtttaatttgaaaatagataaataacaacacctacagcagcttaccaacatggtagtataaaagcaatgcataatgcagcaaaaccacagtttaagttaaggcctttccaccgctaattatcgatacataaatataatatttgtatgtacgtaattttcaatagtactttatttagaacccatacagccttggacttctacagctctacttctctccacagataatagctactttctttgctttcgacaatactaattaaggaaatatttcattacattcatcaagaagttcaaaagataaacctttccctttcaatggaaattacaccagattatgaatgaatgtcagagttaacagcgaaaaaaaaagcatgaaagcttggttatacgcttatcatgttgatgaaaccaagacagaaacttgtatgataaggcaccaacaaagtagacaaaagcactgtgtaccgaataagaattgtataagttacttaaggaacctactactaattattggaactgattatgaactaaaaaaaacagacaagacagaaaaaagaaactcgaacctccattacgagtccataagttgtagcagtaggttgtacacttttttcctttaattgctgcaaaacccaaaatgctccctcccattgtgtcctcttaacacaagcatttaaaacctgaaaagacaatatatttttttttcatgcataaaaatgttaatatacataaatatatatttatttatgtatatgtgaggttgtacgacgtgcgtgtgcatgtgaataaaaacatatatacgggtcaaaaattgacaaaccttcactcttacagagagaatctagatcaatcaacatattactctaggaacatcaaaagaaacatgaatcatcagtataatgtgttgttttatattttggcacaccaatactcaaatccggtgaagatgtaaaattatgtaattaattaagcaaatggagagtttaaacattttatcaaaatatatgattttttattctagatggataatggttcataattcatgtacatgtcgaaattcataaaaataaatcattgtatcaatagatgtaaatagagagaagaaacttaaaggcaaactgctcttagaaaaatagcatgttaacat

SEQ ID NO: 43792 - DNA, 3019 bp, Cannabis sativa
taaaataaaaataaatgtaatgcatctgaacccttcacgtgtccatatgagctaacggaaatattggtagttcggtgtaggagaattgtaacattagatatttttaccaccaaaaataaacatgaagtatttaaatatataattaagtatttatgccgcaatttccctttttaaatttatattaatgttacctattttagagaaagttgacagtggatgcttaataaatcatttttttttcttaaaaataataataataaaaaaagaagtagcggtgcagggaaatagggtgcaccttcgcctccatctatgacattagaatgtgactgttcctctttcatctcttcactccttcactcatttttttctcttcgcctcactcttctcttcttcttttcagtttggaaaattacagtcttccaagtccgaatgatcaaagttttctctcagactctctttattacattctagctcccaactctcctattagtaagttaaccaatttctcagtttctaaatcgattataaaccctagatagtcaggaaggagtagttttcagttgaagatacatagctaggttgctatttcttttatcattgatttctaacattatagcactacatgattgctaatcagttgttattttgtcgttaaatttcagtttctttttttgtgagtgctttcatagtcatgggtgctggttttaggcatttgggttagcataaactccgccatgtttggagcttagtgagggggtagttgagtttattttgtgaactttactgtaaggatttggaagtgggcatggtgggcaaggaggatgcatctggtgcttcatggggtccatcgcagcctccttccggttcccggaagatgttctggcgttcggcttcatggtctgcttcgcggtcttcgttacacaaccctgagaatgaagagaaagatgttgcagatccaagtaatggtagtcttggaaacggccatggacaaaaccgtcggtttcctgctccattaactcctcgttctcagcagaattgcaaggccaggtcatgtttgccacccttgcagccattgtcgatagctcgtaggagcttggatgagtggcccaaagcgagttcagacgatatcggtgagtggccgcagcctcccacaccaagtggaagaggaggcggggaaaggctgaagctggatttgtcgtcgattcagcgaaaccagccagataagaatggtgggcttgtgagaagggataagattgctttctttgataaagagtgttcaaaagttgcagaacatatctacctcggcggcgatgctgttgctaaggacagggaaatacttgagcagaatggcattacccatgtactgaactgtgttgggtttgtctgtccagagtacttcaaagcggatttcatgtatagaacattgtggttacaagatagcccgtcagaggatattactagtatcttgtatgatgtttttgattactttgaagatgttagggaacagcgagggagggtttttgttcactgctgccaaggggtgtcccgttcaacatctttggtcattgcttatcttatgtggagagaaggtcagagttttgacgatgcttttcagtatgtcaaagcagcgagaggaatagctgatcccaatatggggtttgcttgtcagttgttgcagtgtcaaaagagggtccatgcgtttccactcagcccaagttccttgcttaggatgtacagacttgctccacactcgccctatgatcctcttcatcttgttccgaagatgttgaatgatccttctccggctgctttggattccagaggggcctttatcattcatattcgttccgcaatttatgtttggattggtaagaactgtggaacaatcatggaaagggatgcaagaggtgctgtttgtcagattgttcggtatgaaagagtgcaaggaccaataacagtactcaaggaaggggaagaaccattgtatttttgggatgctttttcaaatcttttacccttgatggataagtctgccaacgttaacttagttggaaaatcagccactaggattttccctggtgatagaaaagttgaatcttataatgttgactttgagattttccagaaagctattatggggggctttgtaccgccatttgcatcgtcaggaaatgagcatgaaacccatcttcctgctagagaaagcagttggagtctgctgaggaggaagtttgcctctggcaatatgaaggattttgtctctgcacctagaattcccctctccagggtgtatttagactcaatgatgttggtgcattcccctaaaaattcttcatcaccttcatcagtgtcatcttcctcctcctcttgctcatcatcatcctcttcaccttcacctccttatctctctccggattccatatcttctgaaccaagtaccagttctaattatttcccagaatcttctttgcattctccttctgcagcttctggtgtaccttcatcactgtctaatttttctaacttatctctgctctcaaccaaaacttcatctcaaccaaaatctagaagtccagaaatagctggctctaatttaacttctcagtcgagttcttcaccatttaaaaagtcttcctcaccttcccttgtggagcggagaggtagcatgtcaaagtctcttaagctcccacttttgagtgataagatgagggctgctcccaccttctcacttcttactgatgatcaagagcgtgctgtaaatctaagccacagtagttgcttcttagccaataatgttggcaatgccttggagaacagtgacatttttgaaaatggggagagggtctcttcagaacaatgctatatgtatcctgccagggaaactggtgttgatcttgattcaagccaggcaaaagatgattttgttaaacattgtagtgaacctcggagagaaggcccagatttctcagcccctaatatgatagtagattgtggtggctcaaagagatatgatgcttca

SEQ ID NO: 43793 - DNA, 6985 bp, Cannabis sativa
  modified_base (53)..(57): a, c, t, g, unknown or other
aaaactgtttttagtaccagtttcattattctgcatttaattaatcacttaannnnntaattaaactgggaatattaaaatacagaatttcatactacatatcaatgcgtaagtaaactttatcgctgattatcacgtcagtgtaaatctagtgcactaataaatcatgggactgtagactttgaatcatataatcatgattatctttcactgtgtagacaacactataatcataaagaactagatattcaagatttaataaaatttatacattaaacatataatcatgaaagtaatcatgtgaactatgaaacataaaatgatttctaatattttattaattagtaaatctaattatattaaaatagattttatttatggcataaaatctcaacatccatgatgtatctaattttgttgagtgaagtttactccctgatcacattcattgtaaaaaccttacggttaacctttgattttacatatgaatccttcttttagaaaaaaaaaatgcatttagtaatatatatatatattttattagattgtgttttataatcaaatattttttttttctataacttatatttgatatttgatatctaacatttttaattttgttttttacttgtgatatttgatatctaatatttgatatttgatatttgatatttgaaacaaagtggagtagaaaaaaagaataataagagcgaaaatgatataaatattgatgagaaaaaaatataaagttaatcataattataaaagaaattgaattatttttttttaataaaaatattttcactattcaaactaaaaaatataaaatggttgaaatagtggttgtgaaaatagaacgtacttagattatctttaatagagtgtcaaataagtagtgtaatattatattttgatatttttataaaaaatccttctccaatagtgtgttaaaacttgtgctgaatcatcaactatgcacaaggaatgctctctaggggcttacttctcggaagttaatagagacttgctctaagctacatttcacctgtattttttcacagtcatcataatggactcctctggaatcagcaacctattcgaagacgctatacaaatatcccctgatgacattactttcacccttaatccgggtgaggtagatgaacctcaagaaacaaaccaagtgctgctaggaaaaataatacatagatacaagtttgaaaaagctgcaatacaaggatcattaaacctctcatggaaggcagttaaagggtggagatggaaggagattgaggatggtcttctccaattcactttcgccaaaagagaagacgctatgaatgttctagcccgcagaccgtggttcgtgtgtggagcgctcatggtactcatgccctgggccgcctggctcaccccagctgaggtccgctttgacaaaaccccaatgtgggtcaatgtggagagtatcccacccttttattggaacctctctaatcttaaggagatggcagccaaggcctccctggttcatgaattaccttcaggcattgaagatgctgttggattaagcactttgagattcagagctacaatcgacattaacaaacctatcttctgtagctttttcctcaggcggcaaaaactgaaggatctctggatccaatataagtacgagaaactcccaaaaatctgcttcaaatgttgtgtactctcacatgaacagggttcttgcttcaaagcccccactgtcgtcaaagacagcctaggcaattactacccactatacggtacatggctacggaatgatgtaaaggagaaatccacgttcactacccctcttgctaagtggtttaaagattgggtcctgcaaaagagattaggcaaagaccctattctttgtaaccaaatcaaggtgcagaaagccatccgaaatggcgaggaagcggatatgcgagaatgtcgaatgcagctaccgtcaaagcgaagaatcttctccgactccgatgaagaaaatgaagagaatacgccggcgatggtcaatacccaattgcctatggtttacctcccgggtataggcaaaatatctccctttggacaaaactcaaaacaggtcaatgtccaggagcttattgatgctgcaactccttctgaaaacaagaggacaaaaatgtttgccattaagggttccaactcaaacggcaacacccaatctgataatgatagtgcaatgattcaagaggatcttaccatttctgtggtgaacaacaagccaactacggaaagctgtatgtagagtacccatttagaggagaagcgtgctcctacctcctcttccccttctgatgctattctaaataatcagcgaattcgtacacccaatgaaaaaaagaagggctgcctgtcaccttataaggcctcaattttaggcacccaagcccaaattgtccaatggccctctaaagagggttgggctcaagacaaggcccgataacttctttttggttctctaactgtggacaaataccaccgtgagccttcacttttcaaccccatcctcaacattgaggactttagagtccaagaacatttggaaggcccaaggaaaagaaaggcatcagacggtattgtgcttagcccactaccagtatcaattaatgagacaacgaccccctctctcatcgaagaagaagacaaaaccaaagaaggcaccttcaatgactcccacacagtaccaacctcgtacaaggactcttcgaacaattcccagcctactggtgaatttgttctaggccaacacccagctattgccactcccaggcgtcgaggatgacccagaaaacaaaccacccctacccctgagtccgaaacaagtctcactaagaaacgacgaggaaaaacaattcctactacatctaatcattcctccactccaaagaaattcaaggccagagcgacaaaggcgaaaggaggtttcttttctgcaatcaagaaccaatggcacaggaaagactttgacctgaaaatcgatctaaataaccactttgtggtgattgagaaagcatcaagctcaaactctaccttccgattacaagaactgccagaaaacactagcaccagcgatgtggattttcgttttggggcttcggagacttgcccacaaaagtcttcgcaatcgccatgaaaatccttgcttggaacaatcgtggacacgggagttccacgacagttcgtcaattgacggctctcgtccgtcaacatcaacccgaaatgctcctcatctctgaagctcgaataacacaaagtaagttctatgcaatttgtagtaaactgaattttactgggattcactatatcccaccagttggtttatctgggggtttaggattatgttggttaaaaggggtccagtgtaaaattctctcagcaaacaagtttgtcatttttggagaaattagctctgaccccccaggagaaaaatggctggtcttaggaacctatggccctccacatgccacggacaaagaggaattctggcgctcgctaggagacttggttctacttgcaacaatcccaatccttattattggcgatttaaatggcactttgcaagattcggtatgcataaactatgctaacaatggtaactcttcctgctatgcctttgactttagaaggatggtgaatcgcactggtctaattgacttgggttttgatggacctggttacacttggtctagaggcaatgtacgttccccaggtgcggggtctttaaaaagggccagacttgataggggccttgcttccacggattggcgtatccttttccctgctgccatagttaaccatctatcctcctctgtctcagaccacagacctatcatcctcgataccaacggtggggtcatgtgcaaaggtcgattattcaagtatgaaaacatgtgggctcgagaccgtagatgcttctgggttgtcaaggaagcctggatgaaaagattacactccaaccccatgatcaatttccatcgcaagaccaagaatactggccgaaggctgaaacattggaacaaaacccaatttaaggacttaaaacagcaaatcgacaaagaaacatgcgaactcagctatttggagacaaagtctcctgataatatatctctcattgactctgcaaagaagaacctaactgaagcgcttctcagagacgaaatccattggcgccaaaaatcccgagttcaatggctctccgagggagatatgtgctcgaagttcttcatggcatctaccattgtcagaagaaggagaaactacatccaatgcctcaagaacccgaatgatggtggttggataagggaccaatctgaaattgatacttgcttcataaactattataaagacctcttctcgaagcaagccccttatcggatgccttgactaaatgcagccttccctacacaagatctcactgatgtggataacctgttcttaaactccatacccaaccctgaggaaatcaccgcagcgatctcagaaatggggaaggataaggctccgaggccggacgggcttcccccgagtttttattcgcatcattggaatactgttagggaggatgttttcgagatggtgatccattttttcacacatttggaactgtcaggatacattaatgatacctcccttgtcctaatcccgaagaatgaagctccaacttccaccaaggattatcgacccatcacactttgtaatgtctcttataagatcatatcgaaaatccttgcctcgagcttacgtcacataattccaagaattgtatcccccaaccaagcggctttcatcagaggtagaagcattgcagaaaactccatgattgcaagagagatagtccattcaatgaagaagagaaaaggtaatcgaggctttatgatgatcaagttagacttagagaaagcttacgacgaaatggactgggacttcattatgctcgttctttcaaatatggggttcactaatccattcctgggatggatgcgatcctgcatttctgtgcatgaaattaagctccttcttaattgttccatagctggcaaagtcaagccagagcgaggtctccggcaaggagatccactctccccgtctctgttcatcctagcagccgaaacactttcccgccttcttttggacatagaaaagaaaggcttaattaaaggaatcaaggtgggtagacatggcccggctattcatcatcttgttcgccgatgacataatgctatttgggcaagcttcaactaaggaagctaaagccttcaaggatttcttggccacttattgtgaatggtctggactgtcgatcaaccaacataagtcttctgttcacttctcttgcggagtgcctcgggggcgcatccaagctatcacggaaatcctgagaatgaagaaaatgacttacaagacgacctacttaggattgcctctattcagtacttcaagaagaacgagtaattataaccacttggtggatcaggttctgctgcgaattaagggttggaaagccaagcttctgtctagtgcaggtagagcatgcctcatcaaatcagtaggctcgacactatccaattatgttgcatcctcagatgttatcccatccaccacggcgaacaaaattgataaagcccttcgtgatttctggtggggtgatacagaagaaaagcgagtccttcattgtgttgcttgggagaccctttacaaaccaaaaacctacgggggtcttggttttagaactacggaggctactaaccaagcttttcttatgaaatgggcttggaaggtatttttggatgactcaagcctttggaagctcgtcatgggtgctaaatacatcaagaatcacagcttccttgaccttgagccccaatcctctgattccgtgctctggaaggcaatccttaatgcccgaactcaacttatcaaaggtatgtgtcgaaaaattggaaacggtgaatcaacatccatttggtttcacccttgggtccccttgggcacgctccaacctcaaccgagacttgatgcaacccatggcatcagcttagtgagcaattttatccaaaacttcacttggagggaggaccttgtcaaccaatggtttcagccagatgatgctagaaggattatgaatattactcttccaaaccaccctaccgaacattattcccgaaaacaatggaaaattcactatctgttcagcctaccgaatcataaagaacctagaccaaggaggtaccagtaatgaaaaatggcagattgtttgggggactaagatgcacccgaggctgaaaatgctatggtggaaaattctctcaaactgtctgctcactcgaggtaaattacaactcttcgatggtattaatgatcctaattgtcctatgtattccttggtagtggaagactcgttacacatcttttggaaatggcatttggctcgatccttgtggtttggctgctgttgggggattaggacatgctcttttaatttctccagttcggaggagtggataaactggtttaagattagcgataacagaccaaaggataccagcctccatgatttccttgaaggggctgcaataatctttgagaagatttggttcgaaagaaataaggtggtccaccatggacatcgcactcccacaaggatcatccttcaactaatcgacaaccgtcaccaagaggctcttcaaacccctatctgtggctctggttcgatgatgcattggatgcctcctcctgagggctggtgcatctacaacaccgacgtagcgataggcaattcccagttggttggtgcagcaatcttcagaaatcacaaaggggagatcacaagtatccactcaacccaaattcaacacaatgagccactagccggggaaattgctaccctttgctgtggggctgacaaagccatcaacttaggccacaagaacattatttt

SEQ ID NO: 43794 - DNA, 2980 bp, Cannabis sativa
atatttttcctattcaaaatgcatcatttgtacgaatatgatattgtagaagataagtttcaaaaggtgggtgaatttatttattttgcacaacttagatgtgaaagttagattcacttttttaacagtgattatttcacattctttagatttgacaattctttttgctattagaataatagaaaagttattgataattcttatatatatatgtatatgtatactagaaactctttatttttaacgaatgtggtacataataaataagtaaaattaagttagaaatctagtttattaattttattattattctactataaatacataattgtactatttgacaatataaaattatatttacaatttgaactagttatacaatactttccaactccttgctttctgagttaataatattgtaaaaataataattatgatcactaatatcattgatttatcccaacaagcttgagaatctaattaatgaaatttactcaaactattatatttgtagtaaaacaaggttaagctaataaaattgaataacagttaagagtgagaaatggctaagattccaattagctataaaaaaaatataaattttttaaaaaaccattgatccaaatatggaaaacgaagaacaagagggtagatatataacttggatcatattcgtagagatgatgcgttttgaaaaggaaaaatatgacattgtctttgttaggatcaaaagtatattacaatggtcgaccttccaaaatatcatctgtaactcttatcttgaagtcatgtaagaaatctcatccataatcaccatcacaaataaaagtttgaaagaagcgatgctttcttcggttgattttttttttttatataaagagaataaggtaattagttccctgttttgattggtaattctcattagtgtaataagaatggtgactgagatgggaaagcacttcaatcaaggactagaattcctttggattgtgatttgtgatatgacaaaggtaaaatgttatgacaagttagtttctctgcttcacaaacatgaaatgccttttaacacttccagactccagtgatgtgatgtgcattcgaaaatggcagctgctcggttctcgatgaaggagcccggtttggtttgttactcagaacagcctatgcatatagtaaaactatataacatgatcatatcagtaactttctcagacacaaaacacaattcctttcagtgtaggctgatacatttgatgtgaatatgtaactcttatctgaatcaaaagagacttttgattttattgaaactaatcactctcttgtaattgtattgtattgtacattgagaaacaaagagaaacaaaaattccttatatcacatgagtaaaagatccaaatcatggtccaataaatctcattatatcacatgatcacataaacaaaattcctataaaagatttttatctgaatagaaagaaaaaaaaaatgattttagaataggaaaaatgaacagattatctaatataaatgatagtcaataaattgtaagctttactataagagatagttctatggaatctacatggaatggtgaagaccactgattcgtttaaaagtataatattcaacaaatatggtaaaacaataactcaaaacacataactgaaacttatgaaataaatttagtagctgtatttgagttcagttatggcattgtttttctatcatggtttcccaggtgacgcgtggtgttactcaaaactaaagaagcaggccaagaacgtgagcgaacgaacacacgtgttttacattcactgtattaaatctggtttctggattttgaacctatttaagcaaaacttccccgcaaatcccggtatttctctccttttcttttgtcactttctgccaactgtgcccaccggaaatggtaggatacagaaaatgttaggcttgtagtctctatataaagcctgtttgagggatagacaattcactaagtattcttgtaacgtttttattgattaaggaagcaaaatacaactcttggaagatttttgtttgtaagttcatagaatactttcttgtacctaatctatgttattatcttttctattgcaagttttatgttgttgggtgcatacattacattcttgcataatccttgttgttctgttaatcctagataataatttatcgagtttctttcattctgcctaatgattttgtagttaagcatgtctatggttcttgtgcataatgtacacacacacacgcatactacagaatctaaccaaagtacataaaatagagctaagtctcgattttgcttactgttcttttgagttctgttcaggcttgactgaagaaaaatggcaccaacatacttgtcacccagacaaatacgtgcaaatgggggcgagaagctacctcagcgtaggaatccacccgggggagaattcaaccccgaaaccaacaccttcatgatatggaggaacagactcactgcgcttgttgtggacagtgaatcattctgcagaatgcttgagaagagtttcctatcagcttatggagtggagactgaggatgtagagagtggtagtgctgcttttgagctcatccaaggtggagctacattcgatcttattgtcatcaatccacatctgtgtggcataagtgggattgaggtaatgaaattcatgttcaaatgagtcatcacttaataagtttacaagtaagttaccttattccttgtttattctatgttgtcatgatagacagctagattgcttcgaaacatgggtgtgcaaagcaggattgtgggaagttctgcaatgtacgttgaagacgagcgatcgcgctttcttcgagcaggtggtgatcattatgttgagaagccctttggtccacacctctttattccaatccttcaagagcttgacaaccaatagaattgaatgatgaaccaaccaaactatac

SEQ ID NO: 43795 - DNA, 2731 bp, Cannabis sativa
ttacacacaaatatgagacacactgatataacaagtcacttttttgaccggtgtcacttatcttagaaaaaaatgagttgttaaaattacttttctcatataaatgtgtgttaagtttgtgtgtaaattaggtgtgcactcattactgatatagatttaattttattttaaagtgttagattgaataaattttgcacatgaagcccactgtgatggctataaatggtgtcatttcatacaaatttttattagcccactttgctcaaaattcccactcttttgaatgagataatttttgtagacaaaacccatttcatataaccaaatggtgtcatttcacacagattttgatatagctttaatttgatctcaaagggtatggtcattattgcttatatccatggccattgtaccctaatgagtaatgctagaggcacataaaagttaaactattctttttacaattgtgtatttagttcttattatagataatcatataggagaattatattatttttaatatgttgagattaatttcatataattgtgtgtataaattaaatgtgtcacaattattatttatagtctaattcactagagtaatgttattggggatcaaggtgcctaacattacttatattatgagatggtgtcttataattaattaataatttttattaaagtaaaataaatgggaccctcataattttttttaaataaaaatgcaattttattaacttataaaatcatttaaaagaacactatttaaactactcaaattatgatcgtataattcaaataaatacaatcagtatttaaccacaaagctctagtcaaatagtgagtaacataattagcagatcgcttaatagaaattaaaaagacattattcaaactaaaaaaaattatctgcactttaaaatgcaaaacccaaaaacaaaagagtaataattatcataggcatctttatcgtttttgaatttactattgtgtaggaattgctttctatatacacatccacatggaaatattcattatgagttgatgcaaagtaaaatatgtgactatggcatatcatatagtattttttaatagtctaatactcctgaggttaatataaattatgtactagacataaatagagtgtaagagtatattagacaatttacttataaaactaggtacattttaataaaatataatatgagagtgtttttaattaatagataaaaaaataagtattcctcaacttatcccaaaatattactatgaagagaatgaaagttaaacccagggccggtcctaaggtatatggggcttaaggtgaaattaaattttggggcccctatatatatatatagtttaactattataaaaatgatagttctagtgcttagtgtaatggtaaaaatttaaaaaagccttaagaggtcaaaggttcaatccctttgatccgatgacctttaaagtaagaccttttaccactacaccaaacaatttttgttatattttttcttatttaacactttatttatgtattattattttttttttttacaatttcgaggcccttagcgtttgggggctcgaggcgcacgcctaacccgcctacccttaaggccggtcctggttaaacccaacatggggagtttgaaggccctaagcagggtggtcaaccactacgccactcattattcaaagatttatacaaattataatttataaaaaaattgaagggagtcgacttttacttattacgactaatttaatcataatttataaaaaatttgcagcagtgtccaaagcgtgggtatactctattttaccttaaaatcggccctgaaaagaaattatcatgatttcttcttaattagctacgattacaataaataaagaaagaattagtagtatctctttaaagattttgtctattaatttcagcatgcatataccaataaagaaagcagtccctacaaataaatttatgataattttttatttttattttttaatgaaatatttattattttatctatgaatgatacttaataaaatgaatatatagatattgatattttatgaatctctatatgcaccaaaaatttgaagggaaaattacaaaaacattgaaatttatgttaacttttacaaaaatactgtcacacagaaatcttttcaaaaatactgtatttttataaaacacaactcaaaacaatagtagaacaccagtagaacactagtgaaaatttaagacagtatactgcaatatgaaacttataaaaaaaatacagtaaaaaagtaaaaaataccgcttgacagtatttttataaaaaaatggcaaaagttagtataccatgtaaattatacaaattttaaaagtgcctttacaaattttttaaccaatcacatttatttaaattgagacttcccttattcaaaaaaaaaaaaaaaaaaaattgagacttcccattttaaaatgctagtgtcacatgattagatataatgtttttgtgtatattttgggtacaaatatgattaatcttatgaaagtttagatattttggtgtatgttttgctattcaccaaaatcctttggctggtcactgagttttttagtgagtcactaaattaacctaaatgctcttgaaagtacaatgctattacaaaagaaaaaaaataggtacaatggtttaattgtcaaaatcaagattttttcctatagaaaaaaaaa

SEQ ID NO: 43796 - DNA, 3497 bp, Cannabis sativa
ttgggccaaagcccaaatcccactctaatcaggtggggtctatatttctagattttagtagaaccgcctcaatgtgctgtagaaaaatgacacgttattatggatttaatatttccttaaaaaacaaaaacagaaatttttacacgtggctatattgtctgattttgaaatatctatatgggcttagtatctgaggcagtgaccagaaaccacaccaccatatccatagtctcaagctctcaacacagtttcaaactgtgttcttggtctcaattcaaagatgacaatgagatatttctgtgcagttcgatctgcccccttagtacctttacccggtggaagtttcagctcttcaaggtaccccttttatgcctttctctccttgtttttttccatttcatactcccaaatttattaatatagaatgtgttgtgattgttagaatagaaaattagaagaaatttttcatctgggtctttaatgatagttgagaattttggtttaagctcaccacttttcatgttaccagggattatttattgtgttgtggtggagttgaatagaatggtaattgaaaggtataggggttgcttgaattgtagtatcccatttgtcaaagcatggagttttgtaagcttgaataggaagttggctgcttggtacatgttttggaagtggattattgtttataaggatagtatagtatgtagttacatatcatattacaagggattatgtttattccttgtgttcatattatgttgaagtggaacagattgatgggagtagggattctagtgtttaagaatccaatttttcaaagcataggaaggattaataggctgaaataggaaagctggctggctttagtgccaaactcctcccaccagtaccagtgaagactagctgggacagttctgttttttcttcatttgtctttgctaagttgaaaatttatggtctctcattttctttttctctttttctctcagggctcgagtagctttcagtagaaaaatcttcttctgtcatgccaagtttggtgagcaattaatttaacaacaacacttttacttgttattttaccctctccattaaagtcagttcactggaattttttagcactctctttggacaatgttgaccaagtcattggtttctttcttacagcagattctgggatagagggtacggttagtttaaaaatggtatctccaactcttttagcagcagaaaaagaagaagccaaggctgtcttaaccttgttcttgaaaaaacaaggtttgagtaatgttgttgctgcaagaaccatcaataagtcagactcctttattgagcacctaatctcaaggcttcatgttgttcacaaatctcgctatctagtaggttcgggtttcaacatgttactacttcttttaactcttaaataaatttaaattgttatccattatggggctccttgcttataaaacaaactctcattgttgacattgtaggaagggagttaacaacccttgagatcagggaggctcttattccctaccttgaaactcttcatgaggagaatggggatcttataatagatgtggttgaaagctttccaaacccacctgttaaagaaaaaccagtttcatctgtttctccatctgatacacccgatacacctgttacacccgttacatctgccaatagtaagaagctgaaagccatatctcgagtgagtgagatagacatagatgggaatcttcggcctaacatcctatacctccaagaacttggcttggatctcgatcagattaaaggaattacacgaagatttccctctttcgcatactacagcttggaaggaaaaataaagccagtagttgagtttcttcttgatcttggtgtgtcaaaatcagatattcccaacatccttcacaagagacctcagttgtgtggaatcagtctccatgaaaatattagacccaccatgaagttcttagagggtttgggggtggacaagacacaatgggcaaaagtgatataccgttttccagctttgctcacttatagcaggcagaagatgcagaccgctgtagattttctttacgacattggcctatccaaagagaacataggtaaggttctaacacgttggccaaatataacaagttatagcgtggaggataagttacagcctactgccaagtattttcgctcgttaggtgttgatgtttctgtccttattcttcgagctccacaaacttttggtctaagtattgaggcaaatttgaagccaatcacagagtttttcttggagaatggatacaccaaggatgaagttgggaccatgatatcaagatatggagcattatacacttttagcttgaacgagaacttgataccaaagtggaagttttacttgaccatggagtatccaaaatcagagcttgtcaaattccctcaatattttggttacagcttggaggaaaggatcaagcccaggtatgcacttatgaaggaatgtggggtgacattactacttaaccagctattgtcactatcgcgtagtaattttgaaaaggctttagaggcgaaagtaaagaagctacttccagacgaggatcaaagctcgtaatagccacagaggcaaatttactgtgaaatatttgagcaggcattagaagaaatcaggattcaaatatgccgggcattttcgaatgtcgttactaggcttgagtcctataaactactgcattttacctcggagacatagggcctcaatcttgttactaaattttatggcctataaaagtgaacataaaattcttcatctaagcaaaaaaacatgggctttttctcttctttggtgagctctaacaaagctgcaagcagttcctttgcagcatctatttcccaggcctttcgttctgtattgatcttcctttcctaatatagtctatatgaaaagctagtggaaagtaaactaactataatgctttcatcttattaccaaactgttactgaaacaagttaagacttttgacacttgggtgaaaatgtatctattctataaattctgataaacataatctgttaggatttcagtatcattctaatattttctgctctcttttttattttttaccaatatgaattcaaacattttatgtgtatattttgaaaggctttgatgtttactaagaggaccataattgagctgaattggaaatgaggacatagcattttggctagtagggaacatggatgtttcatagctcttctgagtcattattattattacggtcaaagtagtgtgttgtgttgtgtgtctacacttttttcttagcacttttgaggggaaaaagggagaggtcatgggttcgaacctagactttgaagctattaagctattaactgattgtaaaataccattacgctacactcaaaaaaataaaataaaagaagaacagtggatggtgactggtgagagagagtaacgagaacaaaagtta

SEQ ID NO: 43797 - DNA, 3327 bp, Cannabis sativa
  modified_base (28)..(54): a, c, t, g, unknown or other
  modified_base (218)..(221): a, c, t, g, unknown or other
agaacaaggagaaaggttccttttcttnnnnnnnnnnnnnnnnnnnnnnnnnnnatgaattcttagataatatctcttatgtaaaatctattgtccccttccccagtgagtatgcatcactatttataggactatgaacttggagaggaagtatttcctttctcgttacaatggtgataagtagaaagattgcatgataaatacagaatacactgatnnnnggatttggacagcttgccatatctatgcaatctgatcccaaagttatagggttttctttgatgagtcacgatgcaaaaactgaattcactaagtgttggtcgctctgcgcggactgctgatcactttgcttcaggcatgcctataaggcatcctgtttggactgtactctccgagcagatactcgaaggttattccatgtgtcaccatgatgtgattccacgtcagagtacaaaaattgggatgacaaggaacaaggcatgaccatcgagaaggaaatttatagaaatcgctacttttttttacgacacttcatgtttggcacaaaaatcaaaaaggagcattttcatcattgattttcacctcagtttggaaagcattaattgtgaggatgcacgtagattgttggacgccccaatcgtaggatggagcttgtgtttctagagataagatcgcagtcgtccaccccttcttcacatagattgactttttgggtataaataccctttgtaacttccaattacaaatttcctttatttttcaaatttctcaacccttcaaagcccatgaatttctctacaatctctagaactacgaactgaacttgaaccaaagctctcttctttaacctaaaaaatgtcgtggattttgccttcgtctgctgctgagaatgagggcacaaaagtttccacaccttccttccctagtgatcaagacgtctacagcaggcaaaattgcaagtctagatttcaacgcagagatcgattcgctgattaccctagcatctcgtcttcgcgaaaggtgaaatcaacttccctagccatacccagcgacgatcagcttatcatctccattgtcaatatcaagtatgttgtttctttgtccatggattgtactttttgaattcattacttccaattgtatttgtatgttctattctagaatgagattgggtgttttattatgtaatttccatcttaggtagatttaagcatcacgaaccaatttctttttaaaaatttgcatgtcgaaattcttggagttgattggttttcagtaggaatgctagaaaattctactttttgcccaaaatccttcaagttttaggtttgttcttaatttccatcatccctctctacatcgttcttcacttcctatttggaacgagtaatttctggaagttctcatttctggatagttagtctagttgggacctctccaagtagtttatggggaaggacccctagctccctttctatcctaggtagttaaggtggctaactgctttgattttgttctttatgtatagaaattatgcctaaacatacctgtcaagaagatgctgactcaaaggaggaagttatggagcgaggagacgctccaaagtttatcataaatgatagtccatggaagttggactagcatgtcaacatgttcaggaattataataacttgaggaagtacgagaccctatgagggctcaaaagtgttcgaggattgttctggaacaggctctctgtacttgaggagaggcccagcaaatgcacggaaagatgctttggtgtctgaaactgggctcacattgaaatgggggcacacatacccttaaggtgctattttgcaaagttttgtgtcgtagctgggattgcacctttccagcatattcctcaagcgtaccgcttgctatgagagtggtacatcttttgtgttaaacatgacaaatctgtgtagatgccagaggagatcttatacttctacaagatcaagtctcagcccatgaggggccacaaggagaaggtgggcttctacagattggagtggtacacaaggaatattccttggcccaccaattccataaagtatatgcacaacttacgggactaatacttcttcacttctcgcttccctctgaaaagggttcctcccctcaatttgaattttaacactataagtaagtattgttcccttctttggactctaggattctacttttcctcctatttaatatgtaatgatttcttgttctttagcatttgctagactaccttccccaattgcctctaactccggagctggaaaatatgatagctttctacaaatgtggcaagtagagaagcttgtgaccccggagaacctctgggaagtaggtctcatcgctccacactaggatgtggctcatcttttcgttaaggatatagtccaggatgctctacgaggggacccagacgaggttaaggaaaccatcgcagttattattgttgaagaggcactaaaggcagtgaaggccgatgagaaatggttggtggattagaggagacaattcccaaaatgcctaagcgaggctgaagaactcactatctaattcaaagaggtagtgcataatgattgaagattcccaggcctatgttgaaaaatatgacaaatgccagagattttcaaagataccgcgagctccgcccaacgagttgactcagatgcaaagtccgtggccttttgccatttggggaattgacctcatcgcacaattccccaaaggaaaaggtggagtgcattatgtagtggttgcggttgattactttattaagtggacggaagcgagctattggaaaccattacatccaaaaaagttcaagacatttttgtgaagaacataatatgtttattcggattgccatacaaaatagtttcagacaatgacaaaaagttttacagccagtcctttaccgatttctgtgcgaaccatggtatcatcaaaagtttctccgcggtagcacatccccaagcaaatggtcaagttgaatcagtcaacaagacactgaaggacacactaaagaaaagactgaggatcctaagggaaactggccggaagagcttcttgaagttctatggtcgtaccaaacaactgagaaaacggcaaccagacagattccatttgccatggcacatggatatgaagcaatgctgcccgtagaactcgagccaccatccctcagaagattgacatacatccaagaagcaaatcacgtactccttgcagaatcacttgatgaaatcgaagagaagcgaaccacagcaaacataaagttgatggcccatcagcaaaaagta

SEQ ID NO: 43798 - DNA, 2609 bp, Cannabis sativa
acaaaagaataacaaagtagaaaacgacaatctcattacaaaattagtaatcacaaaaaacgacaatatattggaaaaacgacattaagtatagcaagcaatgaaaatgaccatattaattaatatacataaaatttcaacaaaagaataacaaagtaaaaaaacgacaatctcatcagaagaaaacgttaaacgacaacaaaacctaattattaataaacatgattaaaaaattaaattataattaattaaagaaccctcttaacttggtgggttgttttttttttctttaaagatggtgggttgttaaaagcgggaaaattttcaaattttgaatttcaaaataaattaattagaaaaaaaatatgatcgttgtaattattattattattattattatttttaaaaatatttattcaataattaaataatataaaaaaacgtctttatagcttatgtttttcaaatccattttcattttctttcgcattctcattttctctctctctagagaagaatcgtagtgaagtgaaggtacgaacttgttcatcgattttctcacagattctttcaattccttctatttttcttcaattgatcttctcccttttcagatttcagtagaaaccctaatttttaaatgggtcagatccagtattccgagaaatacttcgacgatacctatgagtacaggtacctttcttttctctttgatgttttaattttgattcgatcttaattttaatcggtttgtatgttcaatccaggcacgttgttcttcctccggaagtggccaaactccttcccaagaatcgtcttctttctgaggtatgttctgtttgttttttgtaaaacctaagtcttgatgttacactcttttgcccctttgattggttgatttgaatgaaaaggttgattttgattttgttcaatcgagtgatgtgtctgattttgtggtatttgtatgttagatcataaagttgagaaatgcgattgaacaatgtaattttaaggcttagttaatttttagggcttatgattcatgttctttcagttgtcttaattggttgatatatgggtttgggattaacgtgtgagtaattcatcgcattgtattggtttttatttttgggtataaaactctggacttgaactatggagacattgttattgttcttaattgcttattggtttttatattttgggtataaatctctgaaggacttgaactatggaaacattgttattgttaatgttcttaattgcttttttctatgtgtcattttcagaacgaatggcgtgctattggggtgcagcagagtcgtgggtgggttcactatgccattcatcgccccgagccacacatcatgctcttcaggaggactctgaactatcaacagcaacaggagaaccaagcataagatctaagtaatcagatatcaatcaatatttgagtatctggaagtgaaattaaatacttgatacttggaactttgttatggattgttatgagtagtggtagtacattggatgttatgatgtttacttgtactgtctatgcttcttagttctctcatttggagaatttaatgacaagctttttacctaccagaagtagtatggattcatgtgtctttttcatctgttgaaaaatcttgtgtttacctctggtgtacgtactacttagattttgtggattctaaggtccatttgtgtactatttatgttgtgttttgttttgatttgatgggttttttcacatatattagaatgagtgtataattttaagttgttgggctttaggatatataatttgaattaatgtaggttaaatgttcacatcatataattctttttatcaaatttggtctggaggacttgtgttaatatatcagtacattaagttgtgtttttctatacactaaaaattgtcattttgggcattgtgtaattgtaattgggagtaatttgatagtaattatatagttttgtgtgttttattaattgcctaattacattccaattcttgaagataattgtccaagtacacactccatgttgcatctctcaaacatgtccctgtttcttatttatgtctccattcctgacctgcttaattagattccggataggagaaaggtatgaagatttattgggtattaattaagattaaaacaataacaataagaaaaaaagaatgtaatataatttaaaataaaaataaaaaccaaaatattgctgtaaaataaataaatatttacctattaaaaattacactgtaaaattaaagaaaattaataaaaagctggtatgtaaagtttgaaaattatatatttgagtcaaatatgaaacagatagtatcactcctattaataaaaaaaatcattttctcgtgtattatttagttaaaaaacattggtactttatagtaaattaccacatagtagtaccataacattttgcagttttgtatttttgcccatatttagataatgctaaaatcaattttgtaaaaagaatgggagtaaatttggacaaaaccaatatttggataatgctaaaatcaattacattggtgagatgtacttctttcccttttctcccttaaa

SEQ ID NO: 43799 - DNA, 1317 bp, Cannabis sativa
ttaatgatatatatttgcgcactaggaatgtaacaaaccaaagcaaaatgaagcattacaaacccaaataccaagttttgagagcttggctctctcccaatgagcaatagctcactatgaaataacacattttgtctcctcattcactcctataacataactagcaaaagcaccactggaccaactccactaattagtaacacaaataaacccctctattatttgcactgccaattgcctactctttactgaattcctatcaaatacctattgccccaagtttcaaattgtccacaaggtggacaagataattcatccccaaatgcccttgctgtatccaacgtcaaaggaccattccagtaacactgcttccaatcgcattaaattaaatgcccttgaattctttgcactatatcctgtgtctgaacaagcatgttgccattaggggaggttgttcgagcctcaatctttgatgattcagttggagaactaatttaaagtgctcatttgtcattccaccgatctcatatctacgttcagaaagccacaacatcactttctcataaagtttagcctgcaagggatccacaatctgagtgaaggaactagaacaaacgacatcaaacttgacaatatcatcattatcgtttcttgtggcagcattatttggagtgaatttcttcgttagttgtggctgtaacaagcgctcttcttcggcctctgccaagtggtgttgaattgcttctctaatgttagaaagaggaatgggggtccacaacttcttccacgtttgcgctgaggttcatatcttcttatctcaccttagtgaggagatctagtgtgttgctgagaacaatttcgtcgtccccatctgcctccgggagtagaaaaaaggaaaagagaagatcaaacttctcacgcagttgccttgtcaagtcgtaacgacatttcacaagtagatttagggatgatttgatctattattaaaatgttataaatgtgagcaaagtcttgacattaacattcttagctaatttagggatgttgttgaatatgctgcattttgaatttaagaggaaccatagtcaatgataaattttttgttacatatcaacactaggtaccgagactgcagactgcagtgaaacagctgttaatgtctgccatagtcttcttcattaagtctaaggcttttttgtaagatttgatgtaatttttttttttctgaatgtgtttcatgacttttatgtgctgttttgcatccagagaagagttatttatgcagctattccataatttgagatcttgtctttggtt

SEQ ID NO: 43800 - DNA, 3726 bp, Cannabis sativa
tgtacttgttcctacagtaattaccaagcatgatgttgtggtgattcaatcaacttggccagctcattgacatgtaacaattactttagttagctaatttcctaatatatattagtaagtagttagttatctattctttgtttgagccaatacataagagtcctagcatcttttttcattttactgaattttaagacaacttgaaagagagttttgggggatgttaaagagagtattgtgtgtttgatcaatgcctctcaatgtgagctgaattgtagtcgtgtagtgctaggctctttgttcattggagattcaataaagaattcattagcaattgttattgactgttttctccttcagaatagttctttcatctctttctcagttttgattcattttgatttattgttaatgtttggttctcattgttttgtagcatatattgaattctattcttgaattggtgtaggaactcacaccacacatgatatacccattttacattaagagaaagtttttaataaactagcccaactaccttatcatatatctttattggtcatactatctaattttctttaagggcatttgtctttaaacttttacataccttctcgagagatgattgaatctggtgaagtggggttgcattatggttctggtttccaaagagattaagagacccgcttgattttttcttatccatcttgaggaaaaggtggaaagttagaattgaagactccataatcttgataagatcagcggcaagaacagttaacggtgactcttctccctctatctctttttgatctgaagctgaacagactcatcaacaaaatactaaataaagaaaaaagctcaacaaacaaataaactatgcatgctcccattagtaataggtaagatattataacaaaacactccataaactatgtagcaaatttaagtaggtgtatcttacctttcacattagggacctgtaccaatttaggaagagacttccttgcacgagcataaatttctgccctcagaccttgctcaaatggctcattctctatatacctttgtaacaaaacctggaattgttgaaactgttgagcactgtggttgtagcaggtggaattttcaggttggcacacaattttctgacacatctgggtgtattggcagtgaagtgcctcccaagtcaagcaaatctgagctacatatgctgtttcaatatcctgataagggtcatgctgcaattgctgaagatgctcagtttcatcatcaggttcttcaaactttttcaaagagagacagcggagaggcgatgtcagctttttagatgcagatcttggtgatggggtggtgggagtttgggagcctgcatgacaatcttacaatgagaattccaaagagttcttacgaaattttaaagttgaaaatgctagagaaactaaacaagaaacaatgagtctgaatattgattaatttcgtccaagatttaacttcataaacgttggaataagtcagataaatccctttggatatgcttctccacttgggagattagaattgtataaaaagcataccagggaacaaccctgcccaaaatgataacacatccaatagtatggctggcataatgcacttctaaagatttgtatcaagtccaatagtacaatgctcatctaccaatgaatggtgagagagaaaatacacctatctcgttacaactggcagttcatattatgtttgggaaaagacaagtttctacttttaagcagaggatgaagctatgctttatcttattactgaaataaaagcattattagcttaacaaaattgagcatattgaagaatccaaaagattaataatgaaaaccagacaatggcaaaaccactttaaaccacacatgttcaaacaaatagcaaacctatatcaggctgtcagctaagctcccttaaaatatagaaacaagcacaacttcgttctcactgcattcccacactaatacttggaatgaatctcaaatgcctacattagcatactcattttaaacaaagtgaatagcatcatgatttgagctcaagttacaaaaaggtgatttctaaaaatatatatatatagatgaatcttcagatttgaaataagagtgggaacctggaaaaaataatgaaataacataataatcttttaccattttctttgagctgttgagtgctcatacgatcaaagaacaacatcctctcacagtatttgtcatacaaagcatcaaatccaccccaccattgtcgaccttctgcctcaacatctctccactcacaagagcttctctcaccttcctcatcttcctcttctccttcatcttcttcagcacatgactcttcttcaggaattaaaaccataaaactattccttctaagttcttttaatcttctttttacctcatttgtgatgaaatcatcatcatcatcatcctcagcttcagcttcagcactgggatcagcatcatttgtcttagttgaaagttcatctcctcctccattctccttctttagctcttctggctgaggcacaggcttgtcctctatttcactttccacaactggtttgtgggctttcctgaatttcttaactttgaagaaatccatatttagttatttatctgtgaagtaagactggttggacttattaagctccagttcacactccctggatcacgacagacccaaaaagctaactttgtggacaataaacaatattcaatcaaaaaaggcaccacctttttcgtccagatcggataataaagccaataagaacttgtcggtgcaaatgttctgcaccacaaatgtaagcaaaaatgaccccagaaattttctcaagaagatgtgtgaaatgctctcaagttccttgaacacgttttgagcaaaaaactgataagtaaaaatccatgcagatcttaccagaagcgtccaaatgccattaaagaaaatcagtgatctgaagactgaacagaacgacacccaaataaacttcagccaaaatccactgaagacaaaaacagaaaaggttgcaactttgatgtgaaaaaaaaaaacccagagaaaaaatagcagaggcactaagaaactttagctgaactatcagctgaacatgctcattttactcacgcgaacgcttgataaaacttacaatgcggtagaaagcatgaacagattcgctttaaagctcaaaaaaatctacaccaagcaattcaagttttgttgatcacagctaataagcactcttcaactgacagaaactctaggaaattttcaaaccccaaaaccaagaccaaacaatgtgctccagaatcactctgagatcacaaaatgaagaaatcccacaaacccacaaaccaaaacttgtagagaagaaagatgaagaaaaggaaaagaggagggtagcaacaaaagacacagtagactagagagagagagagagagaaaccctaaggagtcactgttaaaaacgtcccaagaaagaagagtggaagaaagttaaaagaaaaaacctgtgaattatttgggcaaaacgaaaacgccataaatgtgacaacccaattaagaaaaacaattatttttcactatcttttgagttcgcaactttcccaattattttttaaaaaaaacaaaaaagaaaaaaataaccaatcacttttagttatggtattctccattgaaggtaagcttgagattaac

SEQ ID NO: 43801 - DNA, 3469 bp, Cannabis sativa
acatatatttaatcaatctcttttattgtccttgtattatttttacaattgagttgtatatatcttgatttatcttccattacaataatatctctaacataaaaaacaccaaaaaaatttattcttattcacatagatacatacacataaattcaaatacatatactaacttatttgttttctgaataagaaaagaagacattggagtgtttattatttttatagcaactcttacaactcccatattagtaacttttagagaaaccatcatacaaaacaaaaaacatcttagcaacatttggagcaacttatattgtttgtgggtacatatctataatgtatatactattataaagtgtgatacaaaattaagtgaccagttatattatgggtatcataagaatattaaattgtcatagaaataatgtgtagataccataagttaatttataatttgttgaagggccaaattataaatacccaagactctcattctataatgaacatataaataggtagtggtctccaaaaaatattaggattcctgtattctctctttctccatcagagaaaatactttaaagaaatagtatattcttagaagatcataaccttatgtgcaatctccaacaataattttaggttagcactacaaaaaatctcttttagtcacaacaaaacttgtgagtaaaagtgaaaaagttgtgactaattataaataataattcatatgttgtgattaaaaagtcagtgactaaatataattcacaaaaatcacaatcatgttatgactaaatgtatttttagtcacaatacttgttgtggctaaaataaaatagtgacaacttgtatctaaatactatattttaatcataagtaattttattttgtaattaaaagtcacatataatcacaaaaaaatttattttgtaactaaaaatttcagtaaagatagtttttttgtagtgtattgcttcggctcatgccgttatcatcttctttaatttaacaaaggttttatagaaatttaatttagaattttctacattaaagtacttttaaaatatgattagatctctgcttatttgtatttcttaagtgttttataaatcttaacaattgatgaattaattgaagatcaaataattttatttacaaaatttgagaattttgaaaattagaatttttatttctttttgaataattctgcagctacaatatttttggcttaaatttcagttacatatgtcttcttaggacatgtctataataggtacatgagtttcgtctctatgtggtagggatatttttatagcccatatatttaaaatctaagggtgataaggaatgagtgtatttcaatagtaaatctttagagtgtattagattattagtaatttttattttttaataatattttggtacatgtgtgtaaattattgtggacttgcttcttccaaccaaaaaaaaaatctcagttttgctgaatgaaattgggtcttgctccttccataaaaaaaaaaaaaatctcaattttgcaagagtatttagagttgatcaatagtttggaagagatcaatattagattattagaagatttcaaaccatatctcccaatcctttcgcaatttaaactggatacattcagtaaacatatttggtaccaatgattttttaatttaatttttaaacaaacttgatctgacaactccaaactaaaaaaattatatcttgtttggatagaaatatattttcattttcttattctaaaaaaaaaaaagtctccattaaagatcaaattttcactaaactcttcaataaacccattcataaagatctgagattcatgaagtttctctctcaaaaatactaaaatcaccaagctcaattagacaatcatggtgactaatcaaacctaattcaccatcttttttactattacaatggctttctcactctattttattaaaattcgattctttgagatacaaaatgaggtacggatgattgtccctttaaacgaatttggattcacacacaagggtcgtctcgagctcaatgtttcgaagatctcgattccttgtaagcattcagagcctaatctcgctttcttcctctgtacacgggaatcgtggattcatgtcctttagcagcttgaagatggtgagattgactgtgctcttagatctgatattttgtataatgagaccgatgcagatcaatccatgcttcttttcgctaattgcaattcggggtcgacggtctcaatgaatgtaaggtcagcgatgtacaatcttgacggaaaaggaaatgtctggtttactttctattctcgttgtcgtattttattattgaatttatgttttatacaagaaacgactcaccactgcagacacttcaaaattggagatctattctttataaaccagcaaattctaagaagattggcatctttaaaatttgattttcattataaatggaaatgaaataaaaaccattcatatatcacaaaattaattgaatgaaaaaattaaggagagaagaaaaccttaggaggggaagaagaaggaaacttcttgcaccgccccataattatataaaaaaaaagaaatttgtggccaaacccctttaagttttaattaatatacacttaattttctgttttttttttcttggtggtaaaactcccttaacttaacttctgattgcaaatccattgtattaatttcagtgttaaatgccaactaggacactaacttgtattgtcaatgtgtacatagatacagaggcatgtttttattggtctaaagaattttaattattttaataatttttattattttagtaattttcaaattatttgaaaattacaaaagtaatattattaattgaaaaaaaatataatatcagatttttttgtttccttcttcaccattaacgacagacacaccaccatcaccactaacggccaccatccccattacaacccatcaccaaccattaacggcgccaccatcaccattgacgacaccaccatcaccattgacgacaccaccatcaccattaacggcaccaccattgaccgccataacaaccaccgcaatttatttcgaacgatctcaaactcaaattcaaacacaaactaaaaaaataaactgaaaaacactatcaatacaaaacaagagaagaaaagccccaatcccaatctcaaacaagagcaagaaatgaaaaaaaaaatagaaagagaaagaaaaaaaatactaaacttagatctgaaccgctctccactcttccgcctccatcaacctgtatgacagcctccatccaaaatcttcattaatgtcggtgagaaaacagaggccacaaatggccaagaacccctgtctcacgcgatttctctctcacacgattctttgtcaagacgaccggagtaccatcaactcccccaagaccaataaatctcgatcct

SEQ ID NO: 43802 - DNA, 2243 bp, Cannabis sativa
aaaattattatttaacaaaatagacagttaaatcaataattgataaaacacaagttttaaaataatattaatttaataatgataactttcatatataaaaagaaaaatgtataaaatatcaattactgtattgataaaagaataaagagaaatgttaaaaaatattaatagtgcaatgttaaaatataatatcaatattgatgtaattaaatattaaaataatttgtatggagtatgattaatgaggagaatacctttaagtagaggaaattagtatctataccttttttatattctcctattttattttgaagtctattatttttatctttgttttaaaatactttactaattttgttcttatcacttcaatatattcataaatatagtaatagtaatgctaatacttagcgttgaatatgggcccaacttacggcgactccaagactagttttgaagccaagaacacatccaataggaagaccaataacataataagctgtcagattaacataagccaccacagcttgccatccacttccaatggccacccctgaaaacacagcacaatacattacaatacttgtatgtataaataatgaattttaagcacatcgttattgaaattaattaggattaattattttcacctgatagtataggttgaatcccattcaagaatatagaaatggctaacaatggggtcaaattggacactgcttctataatactagtgtcgcttgtaaacaactcgctcaatgctacccgaaaaattaaaactattgcactgaagattaggctgatgatgatggtgtttccatttactactaatactgaaaatttagctacttttggattagctgctcctagctcgttactcacccggacactgcaaaaatcgacattaatatttttgctagtataaaattgtgtttatatataaaacagcaatcaaagtaattatgttaaacaattactaattacctggctgatgtgcctaggcccaacataaaacaaatgtcccagttcaagtagttcatgctgaatttatttaacacagacaccaatatataattgttatgttaaaaggtagggaaaagaaatcaagaagatgtgggcatataacagcataccaaatagtaatggagtctaaggaaagtgtaggattggaaagcagtccagatatgagcaccagtccttggttgtaccatatctccaaactacatgttaagcatttgtgggaatgttgtagaaataccaataaatatatggtactcgaaattaagatatcatttttttttttttgctttgagtcttagacttaccacaacattacagcagaggaaagagtgagcttgaaataaggccatatcccagtgaatgctttccaagaaaatccagtccaagtttgattacaagttgggctaagaagaatataaaggccattagaaataacaagaagccaccaagagaagctgagtgaaagggctgcccctaaaagcccaagcccaaaaacatcaacgactatccaactgagaaaaacatggaagacgaagaccccaactgacatgtaggcaagaggattaacaatggtctgagcttgaagaaacctctgcatggggcaggtgagagcgaatgcgtagatttgagggattaggccgcgagcgaagacttgaccctgctcggctatgctccgggactgacctattgctattagtattgggccagagaaccagtaaaggaaggtgagaagtactgcagcacccaagtgtaagacaattgctctttggcatatgatccccattgccctgtattgtttggaaccgtacgcttgtccgcacactgtttggactgcactcgccattcctagcttttttattattattattttatataatataaaaaaaatattagcattctaaaattgtaaatagagaattgttaaaaagtattattagagttgcattcttttggatatcatacttcttggtgtaattaactcttatataacttttaaaaatatggcaaactaataataagacattacttatataaataggtcccaataacaatgctattgtaaaagtgataactacagtggtggggtctcctctaatgtctccataaagaattctatcatagaaagtaataaaaagaaaagtacttagaacgagtaaagacgcaaaatatgcacaaaaatagtagatcgcattatatatttttgaaatgttgccttcttataa

SEQ ID NO: 43803 - DNA, 3320 bp, Cannabis sativa
tccactcccatccaagcattttctcctttacccagttctgctaatataacccttgctctcctaggccacccgtactttccataaccatggtatccaaagcccccaccatagcaaaaccatatgccatctagatttccacaaaaatcatttttgtgatcatgacccatgaacacacccttcacatctcccatggagactagggtctgtagaacacctgagttcactgatgagcatgccactgcctcctgaaactgacctataaatgttttatagtacagctgacgaacttctgggatcggaatgtggaaaaacgctagggctggtggtgtggggagtgtcaatggactaagcgatcgattagtacacttctttgggccctgttagtgtgtgacctacaacaatttaatgaaatctaaatctaggaaacctaacagtcattcacatatatgatgttgaataacaaggaaatatatgaaacaattatatttagctataaaatcggattcgtgcaaagtagggtagaatttaaaagaattcaacagaacttatcagagagagtgaattcattgcattaggccaaccatgattgacagattgcctttaccttttcatattaattttgtaaataattattaagtttagtaatattctaatcactcgtgcggtaaagaagggaaaaaaaaaggttagttagaatcaatcaaacgataaatttttttgtagctgtttttagtgttatttcttgtacctgggatcttttcgaagcataataaagccaacggagttgagattccttaatccatccatatgttcgaattcctttaactgtctccctatctccactgtcaagaaagaaaagattgagtacactgctgttagccaaatgggaacctggggcaccaaacactcttagattataattcccaaacccatcaatggtttctcgtttgcctgttttagcagcatttgaaagttcttcaactgaggggttgatttgtgagactgaataatccaagagtgagatgaaagacattaattcttcacgattcattgtagactcttgatcatgatttcctagaattgctgcccaaggaattccagattccatagcaggacgaaacgcaccaaaaagagattcagctgcatcagtagcacttgacccgaatatattgtcccctgacacatgtaccagtaaaataacttttcttgaaaaagaaaaagatctaccacatttctcaataaaaaaaaaatcattcttgtctcaaagctatcattcgaaacaaatcaagcaagtaacaaagaagtcattatagtatggttaaatatttaggcagatcaaactgtcatttttactgtcatttttacttatcttagcaagtaacatttggcatatctatttccatccaatcaatgaacaattcctttattcttctcagctgaataaaatgcaattgacaacaatattcatagggctaagcaatgacattaatgcatatactatgcaactaagttaatcttctaaataaaatagagagaagagggtttgaaaatatgaatcaaataacttaaaataaataaataaaaaaaacaatgataaaaatctgattctaaaaaatgcaaaaaggcagccaacgataccagaacaactagtaaagttaaaagtattcaaaaattgaaaaacaaagttcttttccacgagagaacataaataagtaaatgaaatttgatttgggccatatctatgtcgagataagcttattatgcattatatgtgtgtcactggcatgaacttagtcttatggaatcaaaccatacagatgctcaaattttggaaggcacatttaccatgcagctttcatctaaggtcaaaggctggtgctttacatgttactttgtaaacgatgcaggatttgttttttcagaaaaaaatcttaaaaactttggggaacaacattttcaatatatagaatttttttatttttatttttgcttaattggaaagccaaacttccacacagaataaatcaaagttaagtttcaatggggagattctaaacaattacctagataataatatcttgataagcttactatgaccaaggtcaaagtatgtttcaacttccaggtgttccaacgatctgataataatttaatgcaaaatttgagttacagattatccaccttccatttggaaacaatatcttaatccataaccattcagtgtgaataggacaatgttctaagttaagctctagctttgttgaaagtggtataaaaattagctagcttttttctaaattaaacaaaagaatcataataacattacaaaaatggaaactagtccaaaatcaggatctaatcaaatgagatgaaccaggtatgttaactgttatatacgtctactacctactttcctttaatagcaaatacaatcaatacaatttatacaaagcacatgtaaaaaccaagtactgattcattcatacctgtaaaagcaatgaaatcagggttttcagcttggatcattctgcgcaaaaaccaagtagagtttagatcggagcaatggcggaagccggagatgggaatgtcacggcagcgagaagtgggtccgttgccgtagtgcaaatcagcaacctggaggattttgaaagtgccatcgggacggaagcgaaggggatgaggagggttcttcttgatgcgaagaagaagatgggattcatgggggaggagaacgtaggagtggaggaggtagagaatggccaagatgaagaagaagtagagtaatgaaaaaactgagtggttccatttttgagttgcagactccattctagtaatgaacaagtcttggtttgttttgttttgtttgataaaaataacactttctttcagctcttcttcattataagtttaagtaattagttctaattaatacacctgttaatttaagagtttgttaaatgaaccttcaaaaatccaaccataggcatatattatgattaaatcagccctttaactatatttactactatattctattttttccttttttttttttttggaataaccactatatactttcaaaaatactacattcaattactactatatttggattttttttttgttacgatactatatatggaaaattgtgagttgtagttaggggtgtttattagaccatattcaatatttttaggtctatacaaatccgattcaattatatattggagattagattttaccatccgatctgattcaattaatttcagttatccaatcgatccaacatccattggatattggattagatcggttctatc

SEQ ID NO: 43804 - DNA, 2530 bp, Cannabis sativa
  modified_base (813)..(814): a, c, t, g, unknown or other
  modified_base (2084)..(2096): a, c, t, g, unknown or other
ttttttttttgacaaatgagtttatttattctcaatatgttaattttcaatctgaatgaaccctttaaaatatttattggtttgaagtggggttgggcttggacttttttataggaaaacattggaatttaaaatatttattggttacaaaaatatttatttggttacaaaaatattagaatttaagttaatttttacaaaaaatactgtcacacagaaattttttcaaaatagtgtatttttataaaataatagtgaaacacaaaaaataataacgaaaaataatagtgaaacaactaaaaaacaaccgtaaaaatacataaatagtgtaaaaaaaaatttgtcccactgtaaaagagtaaaaaaaattaaaacttttggtgtaaatatctcttcttatatataaacagtgtgtgtgtataatgaggaaaaaggttgttaagtgccccaaaatgacttcaatgaagataataaacaatattttgtaataatgccatttttcaaaagtagttttaagtcattttctagaactgatgactatgggtcacaaacaatatactaaggtcaaatatgaataaaatggatgcacctacttacattccatttttcttttttaaaaaataataataaattaataaatcatgtcatcaatttttaaatatataatgaccattaataaagttaattccgtttccactaggaaaaggaatcaattgatcaaaatgaggaagataaaaaatataattccaaaactatgttaaggtgtagtttggtaaaaaatttatttattaattttttaatcacaaaataaanntaaaatttttgtttttaaaaaacaaaaatacatttggtaactacttttgttttctaattttgaaaataaaaaacaaaagtatgttctgtaaagttcatttttattttttgagtctaggtctgaagtcgaattcgggttcgggttagaggtcgggttcagcgccaaggccgtgggagggatttgggtccgggtctggtcggagttcaaaatattaattaagaaaaaaaactatttaaaaaaatattgaaaataacatttttctatttttaaaattttgattctcaattaaaaaattaaaaagtgaaaacagttttatataacatgtttttgaaaaatatttttactttttcaattttaaaaatagaaaactgattaaaaaaaagtattaccaaacaccacctaaattttgtaaaaaaaactctctcgattttttaatgtttgtaatttttattttgttaatagatcttgtaattttatggcccataatgtggccaagtgggctttcactaacaattagtatggtcgattgtgtgtatcttcgctcccaaacaataacttttgtaataaccgtgaggtctaattttatctatgcacgttttcgtttaaaaaaaaacaattaaaagtgaacaaaaataattattttctaagcaaaaaaataataaataattatttacccaaaaaaactattaaaaataattaaatttgaaatgcactaaattgcattaaatttgaggtctaaatgtaatttttagttttaacaaaaaaaaaaacttgtgattaaaatatgatatttagatacaaattgtcactaatttagttttagttacaagtattgtgactaaaaatacatttaattacaacagtataattttataactaatacttttaaccacagaccttttagttataacagaaaaataatttataatattagtcataatttttttttattttttattgtgactaaaaataaaaatttttgtagtaatatcttatctggaaaaagaaacatgcctcatctaagaattcccatgtccttaatagggggaggggactcaacggcccctaaaagagggaatccgagaataataaatttacacaaaatggacctaattatatatcttattaataaaaccatggtgtccaaaaggaaaacaacgagttaaagaaaagaaaaataaattaaattgtgtaataaataattaatgaaattgattttaatttttaattcaataagataatattaaaagagaattattttatatactannnnnnnnnnnnntttttttaaatttacgatttaagtttgtgaagtagttacagtgctggttgcaataagagtttttctatgattttttgttataatttaggttgcagcgctaattgcaatagaaatttttatgtagaattccgtaaaaaaaaactattttgaagtgtaaaaatataaaagcctaaatattaaattgataatatatatatatatatatatgcatattatactagtgagctgattttgtattccatgatgactagctaaaagtattgtgttattcaaaccgagtagacataacacttatttatttattttttttattttttttaaataaccgagtacacaacagtatttgtttgtcaaataaagtgtttttttttttctttggaaattaaagtacgtacgtatggactttctctagaagtaactaatagagtctaata

SEQ ID NO: 43805 - DNA, 4694 bp, Cannabis sativa
cacttaaattttagcaacccgaactttagattgggttagaaaatatataggataaaccgcccaaaccgaccgatgtacaaccctaatgtggaggtctcatttatatgactcagtttgaacaatcgaatgagatacatcgtctataagagttatagaatgagctacacttacttttagtgcaagtgagagattgcatgttggaatttatgccctaaaaatagtaattaatatatgaaatacaattataaaataaatgatatattaattataagagtataattatctcaaaaaaaattataagagtataattattaaatatcataaaattccttattcgtatggagaaggtataatcttgtaaggatgtacaagagaattaagattatacgatatgaataaaataagtctgtattattaaagtattgagaatctttaatatggagctgttaagtacgatttactatacactatacttctagtgtgtgtaattttgattcggatcacatatgtagatggacatatagtaaaggtactgtgtataattagattatgcacgaatgaaccgatatgtaataaacatctttcatcaaatttgtcgtttaccatgaaaagagtttatcatatcacaatgatgatcattaatagatcagcatgaatcctgagtatatatgagctcttgtttgtgttcattatgttatttgattcactcgttaaaatttctcagagaatatgattcttacaatttctattttgggaacttaataacatgagtggctggaaatatgttatacaatagtgaaatctaaactttcctaacaaatcgaatatgagttcccttgtagtgtcaattcagcaagtgctaacagttgaatctaaatctataataagttatagattaactgtttacattgaattaatggtacataagaaatcaagagattattagaagagtaaaatagtatttttaccaactctaattatgaactaataattggagggcgggctacttaaattgattatatcaatggactacaagtaagaattctgtaaaatatgattctatattgtcaagagtgtaattctatatttatattggagtattaatggacttaataaactatattaatttgtcgatgagattgatggtaatcttgggtttattggagctttgaaatatagatccatggtcttcgagttacttctatacaatactatatatgggaagattttatttgacgaatggatttcaagtggaaataaattcttaagggcaaaatagtaatttaaaaaattattgttttgattaattatgacaattataaattgtataattaatagtatttaactatttagttttatattataaaactatattaattagttaaatataatattattatttaataatattgaagatagaaatagattattttagaaaaaaataatatttattttaatccttgtgaaataagagattaatgagaattaattaattattatttattggcagaataaataataaatcttatttttggcaaaattgagaaattaattttggaccttgaaatatgacccacacgtataggactattctacacttgtaaaatgacatataaatgtccatgattaatttaatttaattattttattaagttaaaataatatttttttttaatattaaaaaaaagttaaactaatattaattaaattcaattaattatttttcaattattaattaaatatattattggatgataatttaattaaaaaggataattatttaaataaaagatctactgatattttgatattcaattattagatatttgtatttgaatttgaattcagaatttaatcaaactagatatttatcttttatttaaaataaagaattaaaatagtttatatataacactatatatagggatacatagtatcataattataggaatatatagtatcataattaagcatctagaaataacaaaaaataaagagctgaaaggagagaaaacatgattgatattttctcactcctctatctctttctcctcacaccatctctctcttctctagtctcagccacttttaaatgtatgtgagattagtccttaatttcattacagtgtctcatgaattgagtacacactgtaatacctaaatttgatcatcttttaagatctaatagtccactctattcctgagtgttgaggttggcttagaagatcaagatgtagatttttcaatcaagttcttggattgtatgttcaattgtaatacgaaaagaatcaaggataccctaataggcatcaaaaggtaattgaatttctttcattagattagatttaatctatattcattatgttgacactcttggacttatggttcatattagataaaaattgtttattcaaaattctgtttctgcttttataactctgatatggaccataaaaaccaacaagcataacacattcaacgaataattttaatctcataattatctaataaggcagttatacatttttttatttctagcaaattctactattgaaaaatcaattaaatattaacaataattttttttttatatatatataataaatgcacaaactatgatcattattttattacacatttttcacagtatatatcccgatagaattcataataataacaataataaaattcacacaaaattctcaaatatcaccaagggcatatatatataataaaattataaaatgataattaaatgaaaaatagccttgtatgagattaaattaatcgacaataaatttatcacaattctcacgtatttatgattaacaaaattgacatgtttaaactcacaataagtgagtacataaacacgcaattaattattcactaacataattatattataaaaaaaaaatcaatcatctattcaaataattttatggcatgaaaaaattctgttttcatccaatgaaaaaaaacaaaaataaaattgtgaaaaaaaaactatttagttcaaattaactatgtgattatgtgtcaattaacaattttaattgaccaaacccaaaatgtaatcacacaattaaatgaaaaaattaaaatggtaaaaaatttggtctgaaatggactcttcatgcgcccccatgtgcccaaattttttttttattattttcttgcggaaaaactattaaaactacatgtagtttgtaataaatgacatgtagtttatgggaaaacaacatgtaatttatgggaaaacgacatgtagtttgtctggaaaagacgtagtatatccataaaatgatatatagtttcccaaaaaaaaaaaaacgacatttaatttatcagccaagtcaaaaatgacatgtagtttatcaatcaagccaaaaatgaaaacaatactgaaaaaaggacatatagaggttgaaaccatacaaaaacgacaagtatttttttgggtcatcttaaacctcttgatgggccatgctaaccatgtttgacctatttattttggatctgatcactgatccaattaggttttagccttcggtacactgtttttgatgtcgtttgggggggttttggtccaattttcatgatctttcaatttcccatacctattttcgataaaaaaaaaaaaatataaaacctaaaaaacattagacccatttaccactattagtaaagcttgaaaagtttgttgttcaccgaatttttgacaagaagaaacataaaatatagtcccaatcattgataaactctatactcatcatctcatctgattttttttttagcattaaacacaaatcaaaaaaattatgtgtcaaaaaatttagatttgaaaaaaaaaagattgaacccaaatgtaagctctaaaatcaaatgagatgactctagatactaactgttaaaaatcactacacaaagagcatgcaattatcaataataatcaatacaaactcatgctcatctcatccaagatcaaatatttaattttaaagctttaactttacaattagtaaacataccttatttaatatttggtattgaatttttaagagctatgaaccattgttgatttcataaacctctttgatttacacacataaagcaaaacaagaaagtttgggtgtaatgaacactactctttcattctctcacataccattgtccacaccgatctcacatcaccataaataaaagacaaactcttatatgagagattatgggctaattgggccaagaggtccaatttaagagaattagttgttttggcccaatgggctaaataaaaacgtttttgagtgtgttcatgagccctaagcacgttaatacattatgtctattttattatagcattatgtctattttattatagcatgatgataataccatggaatactaattatatactggtcttgagtgaacaatacttaattatgttagtttacataaaatattctaacataaaaaaaatctaaaacaaatgcaaatttttatttgagagaaaaaaaagaaaagaacaagaaaagaccatgttgaaataagttataataaattgaaaaatgtaatgaattgatggcaatcccacttatagaaacctcatgttgtaacaagaaaaatatggcggcaaagaggatgtatcaaaaatcaaagaggttgttaggtattgaaattaagttgagtgtttt

SEQ ID NO: 43806 - DNA, 4131 bp, Cannabis sativa
acgaagaagagagaacctagaactagagatgggtttagtgaggcaatcgacaatttgatgtttagcaggaacatgttgaacaagtatctctttattcaacactttgtcacgaacataatggatgtcaatgtctatatgctttgtgcgtgcatgaaaattggattggctgaaagttgcacaacactaaggttatcacaccaaataaccgggagagtagttggagactgttgcagttcagatagaagagactgcagccaactgatttcagtgacaacagcagcaaggctgcgatattcagcctcagtcaaggatcgggagaccgtttgttgctttttggattgccatccaacaagattgccaccaaagtaaatgtagtagccagtggttgagcgtcgatcatcgggatcagatgcccaatcagcattacaaaaggcttcaatttgcatgttcgtggggcatttcatgtgtaagccatagtcaagagtgccggctaagtatctgataattcttttgacagccagaagatgggattgaagtggggactgcataaactagcacactttatttacactgaacgcaatatttggcctggttaaagttgcatattgtaatgcaccaactaaagatctgtaagccgttgcatcagctactggttcactcccaaaattaggcaatcggaggccactgttcataggagaactttgtgtcttaactccctgcatttcagccttgtaaatttgtcttggatatacttttgttgagaaagaatgacaccatttgttgtaggaacaacctgaatcttaagaaagaaatccatgatgcccaaatcctttaaagcaaactgagagctgaggtcagatactaatttggagacaaggttgttgttgttgccagtaattaatatatcatctacatagatgagtatatagatggtggtagtgggagtgatgagagtgaacaaggattgatcggttttggctgaggaaaaaccaagctgaagcaaaacattggacaatttttcaaaccaagctctaggagcttgtttgagtccataaattgcattgtgtaatttgtaggtttagttggatgatcgggatcaacgaaaccaggtggctgaaccatgtaaatgtcttcatgaagatccccattgagaaagacattgttgacatcaagttgcctaatggtccaacgttttgataaagcaatagtgtgcacaacacgaatagtgacaggtttgacaatcgggctaaaggtttcatgaaaatcaaagccagcttgttgatgataacccttggccactagtcttgcttttagtctacttacagaaccatctgaattctactttatcttgaaaatccatttacagccgattggctctctatttggtagtaaattcacaagagtgtaggtcttgttctttttgagagccacattctcttcagacatagctacatgccatttaggatcatccaaggcctttttgactgatgtgggaagtagagaagccatgagaactctaggtttcttaatgcccgatttagctcttgttttcataggatgtgtgttggcaacagtagttggctcaatggtgctgaaacccgtggcagcaggtggcacaacctgatctgtaactacctcaagaggagatgctgctggtgtggtaacagcagtatcttgtataattgctgtagtgggtgctgtagcatcagtaacacctggtataactgctgagcaagtgcagcagcaggtggggatagggaaacaacagtagcagtacctgggagagaactatctgcaataatagtgttagcagggacaatggtagtaggagaagcaacattcaaaacatcagtagagtaaggtctttgcacaggagcagggggaaaattaaaacctggtggaggatgtaattggctaagtctaacaggtctgctagatacagagttgaactgctgattgagagtggaataatgagtattgtttgcttcaagagcaaaagaaaatatgagttcatcaaatagaacatctcgagaaatgtaaactcttccatccttagagaggcatttgtaccctttgtgagctaggctataacctagaaaagtacaaggttgagacctaaattggagtttgactttcttgtaaggccttagattgggatagcatagacaaccaaacacctttaaggaggtataggctggtttgacatggaagagtatcgctattggtgacagattgttcaatttgggtgagggcattctattaattaagaaaatagtagcacgataagcctcaacccaaaactttaaaggcatgctagcttgagctaacaaggttagaccactctcaactatgcgcctatgtttcctctcaaccacaccattttgctcatgtgtgggaggacatgagaccttgtgaactatacatgtttgttgaagataatgagtgaaagcttggtactcacctccccaatcagactgaattcgtttgattcgaaggccaagttaaagctcaacctcagttttgaaggtgataaatgtggaaagagcctcatttttagttcttaacatgtatatccaagtatgtcttgagaaagaatcaataaagctaatataatatcgatatccacttgaagaattgataggggcaggaccccacaaatccgaatgtaacagttgcaagggagcagtataaacagtaggggatagggaatggtagcttatgaagtttcccaaggcaacaagcagaacaaagagtattagaaatatctatgtttttattgcttgtttggatattacaagagtttagcacttgctgaactattttatggtgtggatggcctaatcttttgtgccacaaagcaaaagtattacatgaagatgatagagtgctagtgttacattgagttgactgaggattacaaggactttggagggtggcagagttggactcgacagtaagaagagagcacgatgaaattgttgctggaaccaggagcagtggtgttttgtgcctttccttacttgagatttagtgtgagctaagttggcttcatttttggagatgtcaagatctttagcagctttatctaattgaacctcctgagccattaagagagcttcaatttcagcaacactataggcatcgattttggtgttgagtgaagtgatgaatacattgtattcggctggcagaccattaaagattgcttctatgtgatcttgaggagttgtaggatgaccgattgatgcaagagtgtcaatgatactcttgattttgagtagatagtcactcagggaggactgcattttcgtgttgcaaaaaagtgtcttgaactgaccgatcttggcacgattaagcgaggtgtagtattcacgcagattggtccagatttgggcagcggaatcaaatccaaccattctggtgagtaccttctcggacatagatgagagaagccaagaaacgagtatgttgtcttgttgttcccagtcctcaaactccggattcactctgttctgtcatcgatcttcgatggtgagatattgaggccgagcaaggtttggatcgagatatctctacaatcgactccctttgatttctacaagcacttgatgcttccatggaaggtagttgaattcatccaaccgaactgaaagtgaatgagaaaaagaaacaagattagttttgggaagagagatttggtgagacgaaactggaggtgtcaacgatcctccattgttgccagctgaagaatgctccatgatagggatgactaaagctctgataccatgttatagttcaaaaacagagagaatgaaacagagagaacaaaagagaggaaagatagaatcattcattatgaatcaagattacagagatacaatctttatataagcactgaacataaaacccataacagaaagacagttagaactaatacagctgtcctaacaacctttaactaactcctctaacagctaacgaactaggtactcttaagaaaaataacatagtaatatattgaaattttaacacactcattgttctcattatactactctaaaattcaatttagtggttttctttcaagatttttcataaaattatctgaaaacactaaaaatatatgtgaat

SEQ ID NO: 43807 - DNA, 1881 bp, Cannabis sativa
  modified_base (1830)..(1856): a, c, t, g, unknown or other
atatatatatacaatccggttctcctttttctcttttgctaaatgcatggttttctgtctcaatgcttttgtattgtgaacgttccaattatccatcattatcaatatttgtctagtccaaaggataagccctctaagattgaaacccgagtaagcccacagtgtcattctagatactatcaatgtactaaaagactttttcacattttaacatgacttgtaggcggaaagcataaatagtttggtttcagaacttgctgttgtagcagctcgggagaaagcaatgcttgacgcatgtgaaactttattggcttcgacaacagctatgcaggtaaaaagcaatgatgaagtattttttctctaaaatctctttaccgcttctttcactaaccgctcgtaagattaatggaaaactatatgatccaattgcatcgacaacatgttctttaaattcttcttatctagtgtttaaggctttttcaaatgttagtagtagtatttctatctctaatcactaattgactcgaaacaggtggaggaatttagtctaaggacacatctcatacaaataaaagaagatttgggaaggttaagtagccaattttggcaatcaagacatccttataatcctcactagttgcggcgaagagatcagcggtgtctcctccgttctctgtatgtaaattgaggttttagtgttatcttttttctttttgttccctcccttaattttttttttttttctagaacttaaatggattattttctttttctaatcaatcccttttttctttttaacaaagcaaagagtgattagcttagcttaatcgctctgtcttttcccacttgtaattctttttcttcttgtattaagtaactaaaaaaaaggaaaattcaaagagagatatatatatagagtgagagataggaaaatgttgagtttcattattgtacatgcaaatccagaaatgggaaagaaaatggtgtagaaaaacagggttctgttttgtacatgtgtttttgagttaaattttgagttgatatatacttaggattggacataacatatctaacatttcttatcattgaaatgaagaaatggaaacatcccaatttgctattgtctttcaacttgggatgcatacagtttatgctcaaatattacacttaacaagtttgagtttatttattttgctgaagaatattggttcaaaaaaaaaaaagccacgtgtaatgcttgattgtaaaataaaatccaaacactgcaaacaacagattatggtaccgatattgtttatgttaatatgataagcagaatacaacatattttttttttttggaatggtaacaacagaaatgatatattttcaatagttgcaataattttgtattgtagtcgtattgcctggttttcatgatacttcttttgtttgttgttctagaattgttaatgggggtggctcttatcattttgtttgactgtgtttggtggcttggtttttgtggttgtatgaagcccttcatcgaagctgagatctcctattaatgatatcttctgttaaaaatatgaaaattatgatggtttaccagagatcactcaccataacaattaacaagtaggttgaatagtcaagttgacaagagatgagtgagagcatgttttttttaaagtgtttcaatttgaaaaaatatatattaggtaaaaataactctaaggccgaccatacaaaggatcttacaattttgccattttattttaattaattattcttcttccaataatatgatattttccaattcaatcatataaatgtcaaaattatttatttnnnnnnnnnnnnnnnnnnnnnnnnnnnattatcatttatattatttattaat

SEQ ID NO: 43808 - DNA, 2996 bp, Cannabis sativa
atgttagttagggtgttacatccctgcttcttcttcaacttctgaaaaggagtagtctaggaaaagaagtaaagaagttaaggtcgcttcccctgtccaggatcttggaaaagggaagtccaaagttattgaggctggcgagggatctcttgcatctccacttgacatttttttggatggtgctaataatggtactccaaatccttgttcggattttgtggagcagctgcatgcatagagcacgtggtttcttgttagtggagatgccttgatcaaatccaaggctgagaacatttcattgaggaaactggttatatacaagcctccatgtgtcaatactctaagatgcttcattgatatctttggggcaacaataatttcttgtattgtctttagctgactttcttatatttaccattaactggctcattttctttgcttttagacttccgttggttacgcctacaccatggagaatgaacataagaaggtttttgagcttcttgagaaactttcagctatagagaagtgtgccaccgttgcaaagaactaggtggttaacttagaagaagtcagtagtgacttggagagtagtgtattaagtaattaaggagtggctgacaatgctaaagcttgagataatagcttaaagaaagatctaaatgctacttagaaataaactttcgaggttgaagactcttttcgtcagtcacttaatgagaagactctaagcactggttagctagagcactaggttcaatgtcttgggagccaagtgactgagttggagtagaaagcaacaactgatgtttccttctatgatggcttacgctttgatgtcatctatcattcctagttgtctaatggaagtgcacaatcattcaactagatggccttctctcgagataaagttccattcattatagagcattgggagcaacatttaattgttgatgctgttcaaaggattaattttgacttgaatggtggtgaaccggtggttgaagaagctacgaggggagaaggctacaaccttaagcatcctaacattcctcctcctactgatgcgccaccaatagagaacgaggaacaaattgaatctattgttgacttagatagctttttagcttctgaggacatagtcttagtccttcttcttatcttttttagcttttagctttagtgtatcagttggtcgtctcgagcggccttttagtgtggataagccatagtaaaatgttatcagacttgtttgaatgaaattagaaattactccaagttaataaaaactttctggtgatgtttttttttttttttatctattattgcttgacctcttaacacttacacataattccatgtcttaaaaaattcggttacaggaagtaacgtcaatgttactgaaagttgtcttgaccataaaagtacttacttgggcgtgattttttttgaatgctcatgtaacatgtgactctcttatactataacataacctatgtgctcccaaagtgataaaataagtgcctttattggtcacttgccataccaaatcctattgagatttcttgatcatgactcttagggaactataacacatgagagcactcacccactttgtaatatgccaagagtttaattttgataattagggaatattttatgaaatatgaataaataagcataatttatcaattacggagaatttattggaatatgtcaaaatgaaatatggtaatggtgaaataaaaaaatttcaggtttagcaactacggagacccgatcggtggccagaaatgtcacaacaatatatgtttgaattttttgtgggttttctccatcatttcaaatcaattttagggaaggtctagtcgattttctataattagtagctagaattttcaaggtactcctctcttcttagctctttattttctagtttggaagtttggtttaaggtttgaaattgcatgttttggtttgtatgggtttaattatgtttctaagttagaagtaaggttatgttgagaccttattaagcttagattacagctggctatttggagttaagcttgagtttatgaactcaaagcttgagctctaacggcagattttgattggtaatatttagaagttgtttgggttgtaatatctattataatttttttttagactgttatgtcaattttggttgaaattggttgagtttggaagggtttgtgaggcttaaaactcgaagtgtttgtttcctacagaaaatggtagaccattttctcagaaatggtctaccatttttctggtacactcctgacagtgtctatcaacttggatatttcattcatctgagtagctcctcgtgtaggtattggcctatgacactctgttttcgggtctgaatctgatcctgaacctgagttgaccatatcgacatcattaacaaacaaaatttaaagttagctgtataacaagtaatctatacaaaatattaaatggatgaacaaacattttgtattcagcataaacaaacattatgtattcatcataaacaaacaaaatataaagtaagctatatatcaagttaccaattagacacatcttctttactttttttatttttttgtttatgtctgcctgaatcacaattgacccatattccctcattgatatcgtttctaatgtatttagcatcgtcttcctcaattttacgatcaattccaataactttttcatgaattggttgcccaacactgaagtcatcataacataaatcaacattctcttcatcctcttcattctctaagaacctcctctctggtgtcgataaaacaacagaccatttatcattatctggatcaaaaatgtaaaaaacatgaactgcttggctagccatgatgaatggatcattcttgcttcctctcttacttaaatcaaccaaagtaaaaccaagctcgtcagtttttactccaacgttgttatcaacccaagaacatttaaaaagt

SEQ ID NO: 43809 - DNA, 1716 bp, Cannabis sativa
taaatctgtttctgtttgttttgagggcttttccaatagaacactaaaattctaaaaattgtgaaatttaaacacaaaattacttcaataaaacactaaatgctattccatatatgtgggagtctatagtgtcctactatttttaatgtaacattatagactacaccaaattatattttttttaacatttaaaaaatatgttaatgattaaatttttatatttatatacatattatagtgtgaaataatttaataaaataatataataataaaaaatatatttttaatgttagagttggaattagaaaaaaaagtagtgttaaaattatattttttttagtgttaatttatcactaaattttagtctctctattaattagagttgcccttcgtaacactatagtataatttaatattagattcctaatatattttaaattaataatttttataattctctctaaaaaaaataaattattaatattcatataaaacgcgtcactttatagcattgttggactcggacatcacctggaaaattctcattctacttccatgttatttcatattactttggctacaagaaacaccaatggtttaattagtcacgaaattatactaatataataatattattagtagtaatcaaagctaaaaggagaaaaaaaacaaaagggattattaacataaatcccacaccacaccagacaacctaacaaagacatgagcatgagtctatcaagttggacaaaaagttgctttagtgtcaaggatgacagtgactaaaaagccactgctgctggaattgatcaaaattagggtttgggaatacacctggaatagaaaaggagccaaacaggaacccataaaagatttaagattgtgttgtgggacaaatctttttaatttttctttgttcatacaacattattatattatattgttacattgaaaagccaaaggaaaaagaaagagtgggaatgagaaacccaaatggaaaggttttacatatattattaaagcattttatagtagtagtgaccctgttatgaataattggcttctttttcttcttctaattttcatatgtattatttggtgttaaaccaaaacaaacaaaaaaaagacagaaagcaataagacaaaaagaaaccgattagatgggctataaatgataagagtactatggagtgttagggtcaagggtcttcagccttttatcacatcaaacttaaggtccaaaacataattgggctaaagctggtttgggttcaagttaacccaaccagtacagacatattttgttgtgaagctgaaatttcccagattcgttttcagtacattagtgcctttttcaaaatatctaaccggcctatgcattgcccaatgttgatgacataaaattgggagttaaaaaaattagggaaacttacgcaaacactatttttggttaaatttttacaaaaatactgccacacttcagaaattattttatactgtcttgatcaattttttttttttcttttacgctgtaaacacgaaaaaaaaagaggcttccatcttccacattcacggagagaaccaccacaaaaaataacagaataatcgaaaaacaaccattaattccgatgagattaagaaaagaaaaagagaaatcgacgtcaaataaataatcatggcaaaacaagtgttaaataactgtaaaacaacactaaa

SEQ ID NO: 43810 - DNA, 1914 bp, Cannabis sativa
aagcatttaataaaaatataaagttgcttgtacattgttatactatccaatagcatcagggaattagttagagcatgtgtatgattaaataattataaggatttacattataattattatttttttcacagatggattacaattgccagagaacgctagcttaaaaaagactataatatccaaaaagggaaggaaattcaacaaaacacatgaacttaaaaaaccatcatcaacaacttctaacacagttgctcctctctcaaaattgaggacgcttcatatcattaacatgtccaattgtgatccaaatatgtggcagtcttttaatatcatatgttcatatcatttaaatcaagggttcaaataaaaattaaggaattatattttgcattcccaatcatcttagaaattagttattgaactatgttaggaatgcactgacctctctatctagtgtccagtggcaggtaatgcgtcaatggatctgacattatatcttcacaatctctctcctcatgttccctttaataattcataacttcacattatcgcaagtggcattatgattcttatttctttgttcaaagagataaaaattagaggttcatcaaatgtaaatcaagaaactacgagacagaagtgaatgatgccattgctgctctcgatagaaaggtgaacaacccactctcccattttattttcaggtgcatttgacattatacttgacatttaaaaaccaaaatgagtcatttgtctatcacatttctttgcccaattcaatttctttttggtttttagagtttggatggaagattaattagagtaaatgttgttgaacagaggctgagatacaccttgttttcgtatcaaaaagattgttgatccaggattcatatgaaccctaccaattgaatttgaagtacaaatttgagagagagtgaaagaaagagaggttctacatttttctacctatttgattgttgttctagtaatgtatattgtaactggaaagcctgatttagagggataaaaatagtttcaaaaacatgcataaggttgttgatgagggtagctataaattctttagttttatacactactagaaaaactcgttttagtgacacacattgagtaactctaaaactatttagtgacacttcaacacgcgtcattgatgagggtgactggaaagacagtttttagtgacacttcacacgtgtcactgaaccctttatattcactttttgcgcgtcactataggcttatagagtcaggttttgtcagactaaaaaggtaacaaccacacacatgaagtgtcactatatcctttttttttcttttttttttatttttaattaatatttttgaagatatagtgacacacaaaaagtcactatacttattcatttatttattttaataaattttttgagattgggttttattttatttatttatttatttatttattttaataattaatatacttatacatcagatttgttttattttaattttcatataaaaaagacataaaaagtgtataaatacaattacattcaataaccaaaaattaatttacagaaagtaaaaataaaaaaaaataaagtatattgaacaaaaaatattccgttgaaaaaatacaaagccttgttcaaaaaatttaatcattaagaaacacagcaaataaacctaacaagtattgacaaatatccattgaaacataaaacatttttttgaaaaatacccaaaaatatcgcaagagtagatattccaaggttgttgaggagggctgccctcaattgagagaggtagattgatctcttgaggatgagagggcatgatttggcgattcatctgatataacctgctgcctcaattactcaataacagattaacaatagaaaatagaag

SEQ ID NO: 43811 - DNA, 2485 bp, Cannabis sativa
aaaaaatacttgtctaatttacttactattttatttatttctcaagctcgaatttaattagtttccaaaaatctcaataaataatcacaatatattatatttattttgctcatatcattactctaaatataaaattaatggaagaggttgacaatatctgaaaccatgtgaatagagtaatgtgatatatgctcaaagtatttgccaaaatattatacacaataaattgatagttttttcaacaaatcacatttatctaaaatgtgagcgacattgtagtgttaaaaataattatgtataatatttgagtgtatattttcattgagaataaaaaaaaagccacatataaatgtgtgtacaataatttgatgatgtgattcaagtttctgttattcttgaaataccaaattatatttactaaaaattatctcacttttcctacacaacgtctgttgagacttgttggatggaactactactgcttgtactagtggtacttgtttgtactgggtgaacaacctttgagactggcaactcctcattgtgagctaagtcatgttgttgaatgactagaacagaacaggttaggccttgccctggtgaagccaaaatgtccccaattggccccaattctgggtgttctgcatgtcgttctgctaattctgccaccatgtttgatgggaatcgacccttcccaacaactataaggtcataatcaatattgcgccctatggctaagacctcctttatcatgttgcttgtcgcaactttctctgtgtactcaactattccaatgtcccacctacttctgaactctgtcactgctgtctcatctagttcctgtatgcatcacaaaatgttttggtaaaaattcgttcaagtaacaactaattaatctagtaaaatatatcatatggtcaagtgacaatgagctcattaacagttagtacttaccttttcaactggtctgttcattgtggcggtggaaaagctatagctaatctcagtgcttttgttcggtgacggcattagtgttaccctatctccattcaatccctccttattaacaaacctgacaacagttaccttaactgcaggatgctctgccatccgactacccaactctaaggcctcgcgatcatcgggtccaccaaagaaaactatgcagaccctttgggtcacaacagtaatgggaccaggagtttgaatgcctgagccaccaaagccacgatctaccaacacagccacagagcaaggcgagtgcttgagtaccatttggttgacccctctccaaccatggcccatgttttgcaaggactcatcatcagcaccattccattgtttgtggaagggcagaataatcatggcaacacgtttttcttcagccacatggcatatatcctggtgcatggtggagagtgccgagatggcggtagtgggtcgaactgagactcgcccgagttggccataagtttgaaacgctccagcaacacgactgtgccaatcgccacgacgaaaaacattgaagaaagggagaccgttctttcggacacgatggaccataataatggaagaggatcgctccgtcagctctacaagctgcatgataaaaagcttgagcatcgacttcttcgtgctacgcgaggactcgaccaggctgatgagggatgctgcgttgctaggaccgtgaacacaagccaagattctgagctcatcttggaattcttcggtcatggacaaatcacggagcttgcgatgggttcgaatagagttgccaccacgagatggcttgtagatggccatcacagttggtgttgtgatgaaagttgtaaagagggccatcaagactagtatagcaaaaatttcgtcgttgagtacctgtttcattcattaatctatatttagtaaataaaacaaaaatgagctaattttgatgtttattttgtggaccaagtaatgatttctacaccaaaaaaaaaaaaaaaattaatgcacacaaattgggctagaaatttaaagtaatcatatttatttaatattgacccacttgttagatatgtcacaaagatatgtgccatgtaatttgtcacataccattaatacatgacatattattattattaagagaatggctaattaaagagtgtaagcgtttaagttataatagattgatgaaattaaatattaattcttgtatatttttttatatataaatttcttatatttaatttaacaactaaaaaaaataagtcataaatctcacctcaagtggagttgtgctgaagtacttaataataaaaatgctttaatatgaatgcgaataccaaattaagttgtcatgaataatcctaaaattgtggtggacatcatattaccgtcgcaatgctcaagttaaattagttaaatttaaatgcgacaatgctcaactaaattcaaatttagttttcagaaagaaaaaaaataattagttagttttttttttttt

SEQ ID NO: 43812 - DNA, 5179 bp, Cannabis sativa
aattaagataaaccttaataaggccttatgtaataaaaagatgtgtgagtgtatcacgtagtacctatacaatatagacttaggatacggtggcatcattataagtgcagtggtgtgttatattagtgcgatgacacgattatttgcacatcatcatattatgtgtgatatgtatgctatatgttatacttggtttgattatgctttcttgcttggtcttggttcacaggtgctctattgtgcagcaagggtaaaatagtgtcaggccagccatgagttcagaggttgtacatgttcctaccaagctagaccacgagagttgggtctagcaggaaaattgtttagaaatcttagttttgtcgcttaggtcagcttgtatataaacaacttgtaatattttttaagaaaattatgggatcccgaatatgtaactatattattttgattttaattaaaggttcttactattattacaagctattttattatttaagttaaaattgttttaatcacttggcttattagatcccaattaatgagactagcacaatataatcacgacatgtgtcgttcctttaattaggacattatagttatctcgtgagttctcttatctatctcaaggaagttgacgtaagttgtgagttgaagagtgacttggaggtgcccctaggttgggacctttatcgaactggttattgtggtggtggagcgttagtacgaggaggctcaagatatataatttttgatggagggaacctcattgaagatagagggttccatccataattccttcctccttcatcaacgttaatatctctagaagcaatggatggttgagaagatggaaccgtgttattgcatctcacgcaagttttgtcgtggaggaggtggaacattgttttgaggggcagcatgcttttgcatgtccctctaggtcttattttgcatatgaggaggttcattgttctttctattctcacggcccagggtggttgcccattaacattgttgtgacgaaggacgctcattcctcccaccatgggtgttgttctcacgagaaggtcgttgtggtacggtattacaagtagtatctcgactttgggtcgtcattttttgtgacctctcttggctttcgaaagggtaacaagtcaagtgactcccacaaggttgtcctcatcttgttgtactagggcgcctctcaacacgagctctacatcgtggtggtcttgcggtttcatgggcattatgcttctcttgccattctctattgagtctaagagtctcttttaagcattggtgtagcacctcgttctccacgaacacctcatggacattagcggtctgtcgtacaccatgggatgtcaacaacgaactctcagcatcttagacttgacctttgttgttgggcatgggtacttgcctggacgttgagaggtcccttccctagtgggctcatcaagttgaaattcttgttggtggtccatggtgttttcttcgttcaaggggacctcagtgtcctcttccttatagtttgttcaccttgtactcaccatggtctcaagtggtgattaactcttgtgttcattgttcttaatgaaagcaccaaattgttggcataattttttgtcaacgaacctaagaagatcgtaaacaagaaagatgaacttaagtaattatcgatcaaagcaaattaatttgtagaaaagaaaactaacaatgatgaacacaatatttgatattttgtgttcaccccctttcagcggtaatagactatccacttagagttttattgatctcaatgcttgaaaagaattctccaagagtttagttctcaagtgagtttttagagtgaaagaagtgtaagtcagagagagagagagcgtatgtgtcttttaatgccctttacaactgatttcataacctttatataggtttgcctcatagggcttagggtttcttaacccaatatatctattttttaaaaaatttaagtttaaaatataaaaaaaagtattaaaataatattttaaaataaatatcttcaaacaatgataacttgttgtagatattttttggactagctctaatggcatgtgtctagcacgagattaccttccacatgagtgtatggtcttggcgagttttgaggatgggcccaatggggagcactgaaggttggcttggtgcgcgtggtggaacactttggacgcagcttcactttggtcatgagtggatctccactttcgtaaattagtatatatctatttatactaatttacacttaattgtggaattgaggtaagattagtataaatagatacatatgtgtatacatgtttagcgtgcatttttagatgccattagattagcatatcaagatattggtgaaatgtacatagatctgcactgaaatatcaatagatatatactggcaaaacagtagccatcagattagcataacagagtgtcggtgaagtgtacatagagctgcactgtggtaccaatagatatatgctaggctttttatcaagaacattcctaacctagttttagacctgtaagtaggtgtgtgggagcctggttacaggtcgattatatgtttatgttttatgcttttgttactgagtttgtcgactcactgttattatttgcatgtgcatgtaagagccaggactgaactggaatgagtttagagttgaatgaagattgtacatatagagacaattaagcctggagtgttagagtcatcaaggtagtttagactcacattttgttagtcgctagacgataacttttgtataaaatatatttcgaaaatacttgtaaacttttaacgggatctaggacttatgtaaattatgtttaattatttaagtttaagttttttaaaaaatttcaattaatcatattttttcaataaatcctttaattatcaaaggagtgcacagtaattaaaaaaaatactgtagcgcgcctaaactagtatggcgttacaatttggcatcagagtcgccaggttgttctccaaagatcgtcaatatatgtacaataaccatcagagttaagctcaactcacgattcagcaagcttttgcgtgctttagtagtttaaatttattatgcattattagaaaattttgataggaagcatgttagtagactgataattgagtaagagtgtattatgttcccatgtaagcagtgagtagattacaattttgatcgctgcctgaccaattgctgactcatgaatttgtaggcttgtcctatagaatagatgcttgacaaaacacaagaagttgggaggatgtggtcaagactggtggcgattggagagatttggattcccctcatccccgtgaccaggacagaggctgtggaatgactaacggaggtgtattacagcataccaaacaaactgtgtaagatgcacataagcttatgactataattgttaatattgtcaaaataaaacataaagagtcctaactatatagctgtgaatacgtatgtatcgtgtcgatccgaccaacccatattttgaaaagcccgctataatatgggtcatgttgtactaatattttaaagggtaagctcgacacagcctgtaaacccacattttcatgttgtgcatagactcatgtcgtgctttactcgggccaactttttttttataaataggtcaacctgttttcttatacaagtcaaactcgagctttacttatttactatttttttaacaattaatgagttaatcattaaattatatgtattttttatagttttaattatttttatataatatttcaataatacgttgtacataattatacaaaaaattattagaatgactaaaatttgaatattcattagttaacatatatattattattatcaaattgtaagaatttttaacgcattctgtttttgagttagtctatttatacttatgtatcgtgtcttcgtgcttgttatgtcatgtcgtttattagaatgattaaattgaatatttattagttaacatatattattattattaaattgtaagaatttttaacgaaatctgtttttgagttagtctatttatgcttatgtattgtgtcttcgggcttataatatcatgtcgtggctaaacttatttttttatgtgtcgtatcatgttaatttataatatcaatacatattttgtcatgtcctaaggtcatatatttttttttttttggtgttgggtcatactcatactcatgttaaatttgtactatgtcaaaaatacgacacatatttaacaactctaatcctatctatcatatatggccaaaatctttccatacatcgttacattacatatatataatatccctttcataaataaaatgaaaaaactcttggtatatgtatatatatagaattaattataattatattttataaatactattaattatattaataaatactccctgatcaataaaaattaaaaatattaatatgtattagcagtgtttagtacttttttatatattatattttacaattaaatattaaatcttatataatttaatttattattaacatttaaaaagtatcaataaccaattataagacaatacttctaaaaggcgttaggtacgactaatattttcaatgctaaaaaaaattaaggtaaagaaacttggcaaaattactaagtgtagctctcacgtgcattattaaaataataatgcagaaaattcaatactccatacaattcaattcagataatttttttattcaaataagtggcacatatacatacacacatgatatgataatgatatatatatatataaatagtacatataaatagtacgaggatgaatgagagtgggatggatcatttgatcataaatcacaatcatatatatataaatatataaggatattatatattctgtgatgtacggcagtcgttagatgagcgagttatttgatctgaatgctgaaattgatctaggggtaattagggttaaaaaatagtaacgtaccccgagacccattattacgtaccctgagactcatctaatgtattccgtacatcacgaaatacagtccgtaaaagtatatcactggacaaaatcgtgtccctaaatatataggtatatatatattataagttatacaatcttatcatataattg

SEQ ID NO: 43813 - DNA, 1448 bp, Cannabis sativa
gaaaaatgtgtgcttccctcaaagttatatgctttgtaagtggcatattcttagctggaaggaattgttttttcaaaatttatgtgctttgtctttcttgtagcttttaattgcagtttggtagtgttcatttcttttcttcttttaatcaatgagtctttgtttcttattccaataatgaggagagagcttttgcaatgtaacttcttttagagacatttttgttgcactataggaaagtatttgctttaatgttcacttttgcaccgagagaggaccaaagtgggttgctttgtaaccttcatttttttagaatttgccttgaacttgacaaatcagcgagccaatgctgaataattattcttcacctacgttttttcagcttgtaaatccgaacaacaagaccatccgggatatacctggattagcccctcccgcaggccgaaaattactctggtaccttacctagaaagaaaatcgaactacaattcacgcagggttttcgggtaatttgcacctagtttggatgaaggttccgattccacagatattcagagctgattaagtcaggtgatggaactatttctggtagtttttgctttagagagtggctgagatgatgaaatgctagtttctttctactcttgtgtcatgacttggtgagaaggttggaatgggtgagatgtgtaacatcatattcttttgactccccccagattataaatttttatgccctatttaagtgagggagacacttttgattgtctcccttgaagaggtttatattgtttcatatcttgtaaattagcagttgttttatttgttattggtcacttgttttcaaaattattgtgtattgcttctgtcactaccatttatttggaaaatatactttagaaacaaacattcctatttcctagtggagacataataagctttcttgcattgctttgtgttttcttgttcaaatagctcagttcataaagttgggtttatatttgggacccaacacaagtttcaacacttttgattattatttttttatttgagctggttttacatcaactacctgttttttagttggagttttatacatattttacttgacagaaaactaataattcatatccattagaattaactaacttggttggtcaatgtaattgatttttaaataattaaaaatttgttttaagataaaaattaaattataaaaagctgatttaaacctttttttaagaaaataacttttaacttattaaactttacaaaaaaataaaaatgtgtttcttttcataaattgctaaggaaaatttgattatttatgcatacttatacattttaaaattttaaaaataggtcaccgttacattaaatccaaaaataccactctcatttttcaaaccctacttctctctctacacctctgctctctctctctctctctc

SEQ ID NO: 43814 - DNA, 2593 bp, Cannabis sativa
  modified_base (35)..(64): a, c, t, g, unknown or other
ataaaaatataatatataatccaattcaatataannnnnnnnnnnnnnnnnnnnnnnnnnnnnncgttccaaacgagcccttaaattacttgttaatgagaagagttgtggccctcccataatggccatgtatattcaatacataattaatgtgtgggcacacatgtatttaatacagccgtgatgtaattaataaatacatttatatatggcacagcataaaaaaaagaagagaaatactagagggtaccagtggtgtctagcacttttctatgtgtcaatatcgctattggtctaatttagtatagggtcccatataatttaatataatcgcttttagggagtatcgctaaccaatcgcaatgcgacatgtcgagaaagtgctaggcaccactagtgcctaatagcaatgctcaaaaagaaatatgaataatttcatatacataatacattctaaatgtgttattttaagattacaattaattaaaaattattaaattaaattatataaaactccatatttaattccactgttatattattgacaccagaattaatcatttatcatatttacagacaaatatatacaacgttatttgctcatctctgagcattcaaatcaaacatattatgtgagtgaccaaattgctaatccatgaccacaaaacttttattacttttattattattatttatttaccttcgcaaactaagctattagaacaagacttcaagcttctactctcacctattaattgatcttctccttataatttttttaattaaggaaagaccattttattacatatattaatacataattaatatctaaattttgatgcatgatatcatgaatgatcaggagagaagccatgcaaccatagcattttctttatcagaggtaatctcttgacatttgttaggaacattattattattattattattattgcttttatcttgtaactcccaactgctgctgttatcactattatcccatagcaaagacaacagtttctctttctcattatcccacatattcttctgttcttgaacttgatcttgttcttgttcttgggtaacagtagtagtagtcgaactctcccaactccaaaagtcaactccaacgacgtcgtctatccagtactgatcatcgtgatcatcactaatagcataatctccgttattattgcagctcagcatcatcaagttattgttataatcatcattagtagtaatagtagtattattacaagtagtcttgtcaatctgatcagctgccccaccttcattaagggtatcttctcttaaagtcaaaacctcatttggatttagcaagtggctatctattatgtcatcaaagcacaacaacatcccttcatcaacagctgctactgatgcagatgcttcatcttcttcttcttcttcttcctcttctttatgatgatgataatcgtacggtcctgaaacttcgtcaccattttccttattattattattaaagttcaccactgatgaaatttctgtcgtttttttctcagaacaacacaacaacaacagttgatcatgaccacccaacatgtcttcatcacaacttgatgagcccccagctgcagcagtagcagtagcaggaacaggagatactgaccctagcatcattactactgtctcaccacaaccaccacttccttcttcttcttcttctttttctaaacgacaacgacataattgtcgtttctgcttatcatcaagattaataatatgatcagtactgacagtaactttctcattatgaaatgatgatgttgctgtagttgttgatgatgttgttgttgttgatgatgatgatgatacgatgtcgtttttgatgatattattactgttgttgttcttattattactagttgatttgttcttcttcatggctaaacgactagttcgaccaccctttcgctttggggttggaaggtttactttggttatagccaccagatttgggagagtagtaggagcttgatcacgatgaatatgatgagtagtattacatcttctgaatgtgtgaatttttcggctcaaatgagaattccaatagttctttatctcgttgtctgttcttcctggcaagtgactagctatcaaggaccacctacaattacaaataaataaatttgtaattttttatcataataataatattctacatttgtatgacatatttttaaaattttggatgcactaaaaatatttctcctaatagggtagtccaaaaaccaaaataattttttaaggcctagggtcaattacaatatatataaaaaaaatttttggcaaatcatgtataggagattacgctataattttatattacaaaaggaagaaagagaaatgttaaagggcactagtagtgcttaacatcctcttatgtgtcaatatcggtattggtctaattaagtattggattttatataatttaatataatagtttttaaagagtatcgctagccaatcgcaaagcgatatgtcgagaagatgctaagcactactggttcctaatagtaatgctcgtctaacaagtttgtcggccgacatgtta

SEQ ID NO: 43815 - DNA, 3127 bp, Cannabis sativa
tcttatttagtttcttagctcattttcacatcattttctcattgttttgacatatttcttttccaatttcagattagagaaagctggagttatcctcccctaaatgatactaccgaagcagcctcaaaggtgcatgaagcacttgctcagcgtggatggagactgcggccatagaaggcatgttgatcgttacagttcgtttgattgtggttggcttgtaacagttttctgaagaaaaaaagggttttgatctttaggtatattcaattcaatagtgcatataggagaagataacctacaaaggatatttttttttgaaattcaatttatttccccttttggggcattgctacgtatggaataaaggattgttcttgctgctcagaggagttggctgcaatgtttgttctataattttttctttttttttttgtaatataaacccacatgtatttttcttctcattgtacaaagatgcaatgtcaagatatattctttcctttgaacatctgtattcaaatgaaacatactgtttggatagttcagtccatttctttggttcattttagtgtatcttcatttttacaatcagccattacaatttacatgaagacttattgtcattgctgatctgattacatacgttagcagcctaattgattaggtgaagaaatataaattgaactctctcaaattgagattgagataaaatgtgtgaaacttgaatcttgtttatagtgctcaaactacagccctacgtaattggttgttgtgtattgcctttagaccaattgctattcataaagtggagcaagttagctattgcaacaactccatagagcttccatttactgaatcctttttctctactctttatataacttctcttcttcattttagtatatttcaagcaaacccattatagaatatacccttttctcttctctctatttgatttgctcagatggactcaaaacagagctcggatgaagctgtccttattccaaaaagcaggtccaagggaaaagcagtagtggatgatgcttcccctgctcctgctcctgctccgcccccagctgcagccgtcgtgagcaacaaaaaagtgactatagctcggagagtaggatggaaaaaaggcattgccatattcgactttgttctaaggctgtgtgcggctgcagccgcctttgctgcttctgttgccgccgcacaagcagaggagattttacctttcttcacgcagttccttcagttccatgctgagtacaatgatcttccaactttacagtaatgcattttatcatttacttcaaataacaaaataataaaacatgcatgcactcacaaaacccatcctacatcccaatttcaaacttgtataaataacaaaattacattagtgaatctcgtacacttacatgttatatacatacaattgcaggttttttgtgatagcaaatgcagcagctggtgcatatcttgtactctcgttacccttttctataatatgcattattcgaccctataaagtaggaccaaggctcctcctcctcatcttagacacggtgaactctatttccttattactttcatgtgtattgtatttttctctcttatcacaaacaaagtaaaaaccaaaagcctattggggtttaaccgtgttctaattggcccgttttatacaattatttctttctttttaatcttataattcccaatgaacttgattttgagattccttgatagagtttgataattttaaattaaatggtctcttcttatagaatctaaagtaaatagtagagcataaagttaattagaatttttgctctttaaattttaacatgtacaaaatcatacttcttgaacttttcaagtcattaaaaattttccatgaactattaaaattgttagatttaaggacttctgtccaatttcatttaattttgcaaatatgtcgattgtcaatgtactaattcatgtcccccgaccctgaactttaacatgtaccaaattgtgcctcataaattttcaggaaaaatttttaacgaccttaaaaattcatgggacatgatttgatacatgtcaaaatttaagaaaaattaacttaataataatatgcttttgtaatttatatatatattttttaatttaagtgtctcaatcattaaatcgtgtgggaacagataatgactactgcgacgataggtgcggcgggtgcatcgagtgcaatcatgtacttggctcataatgggagcgtggatgccaattggttagcaatttgtcagcagtttacggacttttgccagcaaataacgggcggcgttgttgcctcttttgtagcagcagtcattctcattgcacttgttgccatttctgctgttgcacttaaaaaaaccattcactagattcattacattttatgtccttattctactacacttctacatatggtatctacagcttaatatgtgaataaaaaaatctttctttttggaatttcttgcaaaattgtttactttctcctaatcagctcagcaccacacaatatatattcatataggaagagattggatatatatctatacatattaccaaaaaaaaaaaaatcttaatgattctcatttttgctaataatggttcttagtttaactcaaataaatgtaaaaatatttcttttgatattttgtgagtaaatgttgtattaattctggtctgatgatcaaccgatattatcataccttaataagtaaactaatcatcgacaactaattttaggatatattatttatggtatttttttagtatttttctaaaataagataagttacatatttataattgtaaataaataatttaatttggccgtgattttgtaaagatgatttttgtttaaattatatatgattttttttttttttaaaaaaagaacatataatcttcccatcagttacaaattcgataaattattgaacttacaatctaccatatacatataatttagatagtattagagtaccaacaaacaaataaagtaatacattcccatttttatataataagatcaaaaaactgatccaattatatagcttagttatatcccaggactaggagttgtttctggtgg

SEQ ID NO: 43816 - DNA, 3306 bp, Cannabis sativa
tctttgaaacaagggcggtttccttgttctttattactttactggtgtccctgttgctatcttccttctcaaatttcaattttggttaatcttaatcatcatcaacgaaaccaattatgggtaaggtaaagctattgttttttttttttctcctctatcttgtatgtttttatttatcccttctctttacctattttttcttgaataaattgcaaaaggagattcggacagagggaaggtgaaggagaatgaggtcaaggagggagtagcttcaatagcattgttgccatgtgggtccatatctggccacttcatccaacttccccacaatatttgctatggcctccatggaactggtactctctcttttttgttattattatacacatacagttcctgtgttaatttataatttctctaaatataaaaaactgtcatttttgcaactgggttttgtttaaatttcacatttttagactcaaagttgtgtttagggtagtatcaagctatcagtgattgttttctgtatactataataactcaaatacttggttttgatttgttagaactggaatgcgagagagagtgtagcaggggtgaggattaccgtctgatcaagctcacaatcatagattacaaagtaggaactttttctcttcattctttttgctttccctccaaaatagtaagcaattcaaaatccttgcttaattaatttccaatcttttaacagagaaagaaagaaggagatgcttttgtggagtgtagaggtcatgatgctgctcggttaagtagcatagatcatgctcatgggtaagtaaagccagccaccttttatattttccatagaaagctatgataaggagttcatgacatgtatttacacacccatttgtgagcagttgggagaaagatgttgttggtatggttgaagagaaacatgggaagaacaagatagtagtttctttcaactgtgagacactgaaagctgagaaagcagcagaagaccatatcagaaacttcatgcctaaattagccggtcttgacgctgttggtatgttttgttctctccctctgtgaaagttgttctcattgttcttccactgagttctttcttaatgacttgcagtaaacattgggcggatgagcattacagggttggattttgaagatgaggaacttgaatcaaagcagaatttacctgaactctaatgcatgtttctttccctataagagtagtagtattcccatcttggtcaattttgtgattttgagccttattaattcctagttttaaagattgtgatgttggtttggttaaaacttaaaagacaaatcaatataaaatatattacagagatgaaatctactttgtttccggcaattcaaattgacttttatgtattgagtagatatttaatgcaactgtcacaaacaagtgcagatatatattattgcacaaatcaatttgacacacacatgccatacataatgtatacgagatcatatataattcttggatacaacttttttcccgtgcaaagaataacccaaacataatcgtcagcaacagcttcaaccccaactgaaaatatggacatgtcacgactgcgagcttgaagtttcggatcaaattttaatggttaaatttcaacatccgcaggacataagttaacaattgcaacggcacatctgactatccaacttggggaccaaatggataaatctgcagaagaaatttaaaacattacttaacaagttctcataaatcttcacttgaaggtgagaaagctatgttaaaggggtgtgtgactttggggcagtcacttactgacagatatgtaatcttcctttagattacaaagtcaaacacttgtaatctataagaaaagcttcactcgaatcactgtaacatctatgcatacaaagtcaaacacttgtatctgggaaatgataacagaaacattttgttgaagagcatatcatacctgctttacatcctctccctcactccacctcagatgtttcttctgaatcagacaaaggcaaaagagtgcatatgccaagcatgtgcccgttgaggcaaacataatactcgatacaatcttcataagcacccaacctaacactagcactctgtggaatcattttagcttgcagcatgttccacatctttgccttacaataagggcacacctcagttggatgaaactcagccatcctcttaatcagcaccttccgaacctttgacattgcaaacgccttgaaaactccacggaaaaaaccgacatccccatcgtccccttggttaagatgttcacaagggtcagaaacatacaattcatctgttctacactgtggcaagagaaagctcttccctgatgtcctggaaaatcgggtcttgtgaacaaagtgaccaggaatttgaatgttgttaaatagaccacctctttgacaccctgaacagtaaataagtaatttccctagtgccctccagtttccatctacattgtgactcccaccagattgcagatcattcatcatctttggcgcccttgtgtggcaaaattgcttccataatacccgcttagcaagatcatcaaaccatttacaaacacaggaaagagtagcaatcaacttaggattccaattcaacctatcaaatactatgtagatcgcttcttcactcagatgcccttttgtgcattggcagcttgctgagtgtatgcaacgatactgcttgttcagaatcatggtctctacctggatagatatggaggcataaaacaacagatatcttccaagcatgagaaaataaaactggaaaagaaatgaagtattgtacaaacaaaccaaatacagatattgatctatgatagacttagtaaaacaaaataattatgcaattccaaggccaatttgatagtgccatcattatatactatgcacaaatttcatagctcaatcaagtaggactataataagagcactgaactagtactgctgtaattgtaagagaacacattatatataaatcataataatattaattaataataaaataaaaccctctttcataacaatactaaactggaacaattgacatcccaaagcatacagtttactataaaccaaagccattcccattaaaaagtgtatatcagcttctacttcaaatctaaaatctcagatccataaacccttttaagtcaaaacacagggttctggaaaacaaaaaaaaaaaaagaaaaaacacccccttaaacatcaagcagctatctaataaaatcttcaccttaattttac

SEQ ID NO: 43817 - DNA, 4804 bp, Cannabis sativa
tggtgttgtgggggggggggggacggctcaccccatccttataaggtgtagagttcgaacaagatagataaatacttgacgcccttaggagtgaactagtcggacttatgtggtagtaattggccatcttcttgaagtacgcaagtaagggcagcattgcaccctgcttagtgtgagctcccgaccaagcacaataaccctctccagggtcagtagccagttggtcgggggagggaaggaagcattcgacattctctaagagaccgcgctcgaacagattggtcattttcttcatggtcgccatggatggtggagaaattcaccgatctcctagtggacctctcgttctcaaaggatgagcctcggtatactcctcaacaacgtagtcctagccggcctctagaacattgcctacttcagacactggttctccttcatcgttatagccaccaaatggcagcatccgagctaccccttcttcctcatcgcctttagcatcgaaaggagttgtaggacggaccttgccctagtcctccacctcttggatttcaatgtcctcaataatatcttcctcggcagtggcaggacaggcatgttctgccttagctagagtggctagacggtcaatgtgcgggtcagtcaatgaagattgtctatttggttcatgccatcatcctacgcttgggcaaaattttatcagaggtgtgcctggcaatggtcacaacaaaattggcaacaggtttgcccgcagcaccatggtttgggcggccctcgagcagagtgttaatatagttgaataggttatgttcagtcagttaataaagttagttttgtaactgttttttcaactatattctggcttttatttctttgtaactaattttgttgcttgtctccttgttgtatataaatataattgttcattcattaataaagtagttcttgtttttctccttgcttatgctctatttttctttctctcctacctttgctcttttctttcttaaacttcatattctgaggttctacatggtatcagtcgccctagactagcgtcatcaatggagtccacttcctccaatcctgctcctattgctagaactccactttcgactgtgccaacaaaccagatgcaatccaactggaatacgttttctaactctttaacctctgttttaatagtcaaacttgatcgaactaattttttgtcttggaaatctcaggtgatccccactatgatcggccatgaactagataagatcttacttgttggaaatcccccattgcaatttctcgtcacaggagaaccgaaccctgaatacaatcagtggaaatgcaaagaccagctgcttctgtcatggctgcgatcgtcaatgacagaaggtgtccttgcatctattgctagcttctcctcctcccatgcagtctggcatgcacttgaacataaatttttgagccaatccaaagcacggttgcttcaactcaagaatcagttttccacaattcgcaagggaggtcaatccatttctgattatgtggacaagactcaggccattgctgactcccttgcagtcgcaggttctccgattcttgatcaagatctcatcttacagttgctaaatggccttggaccggaatatgatccagttgtctcatggatcactgcaagaagtgatgttctcacctttgaagaggtccaagctctgttgctctgccatgaaagccgtcttgaacatcacagctctgtcaccgacttatcaatgaaacttcaggctaatgttgcgttcacaagctcacgcaatcctctttatcgaccacctcagtcgactaagaatggtggaaaacctggttttcacacccaaaatcaacaaaataggcctctctcccaactctgcctttgatatggacacaccacaccagtttgtcactacagattcgacaaaacttgggttacacccaaaccaggcactaatggcccttccacattgtcaaacaacaataccactcgtgcctacatcactaaacatgagtttgactatgatcctcaagcatttgccacatccttcattcttaacttcgaagatgattcatgctagttcgtggatacgggtgccacgaatcacgtgaaaaatggtcttcacaatcttgaatctacagtgacatatcctggctctgaaggtctcgttgttggagacagtaagaagttactcaaatctaataatggattagcttcattacctgcatatagctctactagtcttaaacttaactctgtacttcatgtccctgcaataacaaaaaatttggttagtgtatctcaactaactaatgacaattgtgtgtttcttgaatttcacaaatcatgttgctttgtcaaggacaagcaaatagggaaggtgatgctcaaggggacacttaaagatggcttatatgtgctagaacaatgctctaaagcatcaaagatggcaggattgcaatagtgtgtgcccagtggtaatagtcctatagctatgacttatactagtcattttcaattacacaatgtaataaatgacaatacttgtaattctactcatatcactaaagacaatattgttcccatgactctctataaccccactactttacaaactatcaccaaaaatcatgttaatgtatggcacaacaaattagggcatccctcccctgctatcttaaccaaaatactacaaaaagttccccacactggtaccattcaccaactggagttttgtcatgcgtgtcaacttggcaaaagtcataaacaacctttccctagcacagatacaaaagccaaccagccccttgaactcgtacatatagatctatggggaccatctcacataaaatccaaggatggatacctttattatattcatttccttgatgattacagcagatacacctggatataccctctcactcaaaaatctcaagcacttgacatgtttctaaaggttaaagccatggtcgaaaaacaattcaatctatcaatcaagaaagtgcaagctgattggggaggggaataaagaccattttctaggttcctaagtgatcagggaatccactttcagcacccatgttccaaaacaagtgagcaaaatgggagggctgagcgcaaacacaaacacataactgaaatgggacttactattcttgctcaatccagtcttactagtggcatgctttcaacactgtagttttcctcattaatagactaccaacaccaattttgaatcttatgtcccctacaaaagtcttacttggccaaaaacctgactaccctattctcaagcctttcggatgtgcctgctaccctcatctcaggccatataattgacacaaaatggaattcaagacacaacaatgcatcttcattggatactcatcctcacacaagggatacttatgtgaaaatattgaaggcagcctgttcataacaaaaaatgttgttttcaatgaacaactatttcctgcagcaacaaataactctgcagcacaggtacactcccccttgacatgtctttttccatctgcagactttattacttctcttactatacctactacagccacgattagcaatatggcaactagtggtccctgccattgtactcagggcttacctgttcaatccataaatactgtatcctctactatgcaacaaccacctaatatagtacctaatcctatcatccctactcccattatacatcctgttgcatcatcacataccattgactcagtacatagtccaaataataccactactttccccacacctacacctaacatagaacaggtatctccaccacaaacatcagtacctaatcctacacctcaggccaatgctcgcgaaccacctgctgccacttgtacatctcgtacccatgttatgcgcactaggtctcaaagtggcatattcaaaacaaatcttatattgcccacaaaacaccatttgcccgaatcattgttacctactgagcctagaacattaaaagctgcattatctaatcacaagtggcatggagctatgaatagtgagctaactgctctcaaaaagctaacatgtgggttctagttccatatgatccctcaatgaatgtaattgggtgtaaatggatacatagggtgaaactcaacaaagatgggtctctcaacaggtataaatcaaggttggttgctaaagggtactaacaagaggctagaattgattttgaagagacttttagcctagttgttaatccaactacagttcgattagtcctctccttggctgtctctcacaactagaatgtatctcagttggatgtgagcaatgcttttctgaatggccctctaaatgagactgtttatatgtgtcaacctcttgggtttgaaaacactaacaacccaactcatgtttgcaagctacaaaaggccatttatggacttaaacaagcccgtcaggcatggaatgataaattgagaaacactttaagattgtgggaatttcatgattccaaagcagacagctccttgtttgtttgtggcaaaggcacaaatcttgtaattcttctagtatatgtcgatgacaaattaattacatgctccaatgtagcactcatctctcatctcatctctgatctaaaaaagtccttctcactaaaagaccttggttaggttcattatttcttaggtgtgcagatatatagagataaaactggcatgtatttgtctcagacaaagaatattactgatctgttagtgaaactacatatggagggtgccaaatcaagtccaaatc

SEQ ID NO: 43818 - DNA, 3200 bp, Cannabis sativa
catatacatccatgtaagttattggttgagcccatcgagcaactctatttagctggtcaatgccaaaaaagccatgacccctatcttcatcaggattttcctccttaaggccaacatcagccggacttattgtgtctgaaatattatcaatgtcactaattataattacaaacgcaaaaccaatattttttaaaagaatagaataactccttaagaataggatctgacgaaatcactaagctgtatgttaagcgcaatggaagaaaataagtaacctgtcaacactgtgatgcataaaaacctgagctatagaaaagtaaaattttgtttcacaaagtcagaaaactcaatattaagcattagtgcaattaaagcttattccacatcaatgcttatcacgtaaaagtaagaacactaattaaattttaagactaaaaagaatgcttcattatgcaccatgcagcaccagattatgaaaacataaatagtttttatggttttaatgcttgagacatagctaaattcttcaactcatcaccgagacaagcaaaacccaaattaaacttatgcacaaaaagtaaaacccagaactcttaaaatgtaaagaaggggatatcagttgtagaaactcttactaaaaaaaatattgagagcagaaaaaggtaatacagtgaaatacccaaaacagagcagatcctctggatggcttctgaggttgggggaggagaccccgaaggcgtaaatgtcttgttacaaaggtcgtaaagtgtctggattttggggttggaagagctattcttcgtcatagtcggtggccttccgaacgctcgacaataatttgttctcttatgtacgaatgtcctaagcttatcagttgctttttggaatttcgaaaacattattagaactttatgaactacgagttcatacagtcacgaagagaggaaggtacccagatagcgttatcagtaatgaatattggaattcagcttttgattaatgggccaggtatgtgaaatggccacatagccgtccaggcctaaatggatggcaaaaataagaaataaaataggctgacatgcaaaatacctctaaattttaaaactaagttagtaaatgtcccattttttaaaaagggatattcgtggtagaagttctcaaaaagttcagtctgatacagataagtccccaatctcgaaaaatagcggtaatagtcctcaaggtcatattttttatttgtctgttagtcataattttaactgagccgttttttttttttaaaattgcgacgtgtcgaaatattattagtccaaattattattttaattttaaaaaatgtaaataaataaataatttctttttttctttttcattcttttcttcttccctgcaagctctgggaatttcagatatggtggatcaatgatttaccaccttgcaagttcaaccatatattaatcaaacaatattcaatcatggaaattccccccatagaataaaactagtaatacccatttagatatataccaaacgttcaaagtattagtaaccgtaagcccaacggatcttaacggcgcgacagtttcgagaacggaggtgccgctagtgacgagatcttcgatgatgaggcagatttggtccagtttgaagtgtccttcgatggctttggcggtgccgtaatccttgacctccttgcgacgaatgagcatggggatgtcattggagattgaaatgcaggtagcgatgggaagagttgtgtagggaacactgcagacgacgtcgtatttggtggaggaagggattgaggagattagggtttgggagatttgacggagaagagaagactatgagacgattagacgaaggtctatgtagagtggggaagaaatgcctgatttgagcttgaagttaccgaatttaacggctgagatttcgtggagctttaggatgagagattccattgacaatggcgatgaaggtaaaggaaaaagctttaggtctggcagtgagaagaagaagaagacgacgaagaagacgaagaagaaaagaaagaaaaagaaaaaaaaagaaattattttaaaattatttatttatttttattattattttttaaaattaaaataataatttggaccaataatatttcgacacgtgaaaattttgaataaataaacggctcagttaaaattaggactaacagactaataaaaaaatgacattgatgactattaccgctatttttcgaggttgggggcttatctatatcaacctgaactttttgaggacatttaccgcaaatttccctttaaaaaattaaaaaaataatcaaatataataaattagctaataaaaattataaaaatacatttgtcacatattttttaaaaaaaaattatataataataaaattcagttatataattttttttagtatagcatattattatattgtaacaaaaatgaataaatatattagatcattaaatatatacagcagtatttgatatatcgtattactaaaaattaataaactgtagttataaaattatataccacaaagaaattataacaatactaaattaatactcgaaacaatatatatatatatcatgctaacaaaaaataaaataaaataaaagagtgtctgcccatgttcatgatatgtggcagttatttatagtttttctcaacttcacctgtttcttccccaacttcccctgtttctccaccatctccaccaattctattgatttccagtagcagttcttacgatttccattagtatatattgctttcttcattttatcctatcgtttttctcatagttccaatgaatccactactaaacaaattgaaagcaaccatgtctctcacagaaaatgaaagtgcaatcttagccattactgatgatggctccgaaatcattccctcacaagaatttgtcctggtggctcgtattctcactaacaagaaagtttggctttccactcttcaaaggcaaatggcagagcattgtgatggaagattcaaagtaaacattaaagagcaccattcagatcttttcttgctttattttaggtgtgaaggtgatcttcttcgtgcactggaaaaggagctgtggtatttccaaaactactacatcgttcttcttcaacctaccttgctgcaaaatgttgcacctgagatcatgatttattctc

SEQ ID NO: 43819 - DNA, 1599 bp, Cannabis sativa
tatatatatatttacacaaaattgatatacaaattcagtaatgaattagaacttaagagcagctaattgaccaatattgatggggtgaacatgttgtttaccaccaccatagagagccatagcagcaagcttataagctgcctcagtgggatgaaattggtcccaaaaaagaaagctatttcgatcttcacacactacagattttgggctacatgcattttctgcattaagatctcctccaccaccacaacaagcactttttgtatttttgaaacctgatgaagatgaaataggattgttgatgagactcaaagtcatgtcaaaggatttagtaatagtatatttcatgtgtagagatttgtcagaactaagtttatgtaagagagcttcaattccaagattaaatgcacgagcatattgattgacagcttcaaaacattgaccatttccaatcttattcttagcacgaagaatagggcaacaccctattgggcctagactaaccacacccaatctttttgctccaagcttcaacaatgttctcagatgattttcataagaagtgagaagactgttgataaaggcttgttgtagttttgggtcagattgtcgagtgaagtttaagatgaaatgctcgaaaagatcgttgcttccaacactgatgagaaagagggagtaggagagtctcttctgcgctgccacaccacctagtattttcttgtaagctttacgaatcgttccgaattgtcgtacttgttccgaaaatggtactacctttttctgtctcacatatatattagtacacaaaaattactttatattcccagccacagtatcaaatattactagttaattacaggacaatatgtttaaaacactactaatgctaaaaaaatgtgtcatttatttacaaaattacattaaaaacgaataattaattagtagaaaaatttagatttgtttttgaatgtaagttactttacaaaataatattttttctacaaatttgctttctacaagagaaattttatgacaagtgtcaagtatgtttgggtgacattttacaatatattgcaaaaatgacataaaaaattataatttttactaattaattactccttaataagccaaaaattaagaatgattgagaaagaaaagattacaaacttacatatgggcctttcccagtaatatcaagaaggccagaccctccagaggcaaagttggtgccattaaggacatttcttgcaaagtttctcttatcatatgttacaaaatacatatatggaggtgggctttctttgaaaccaaggtactgggctagaaagtataacataacataacatatatgttagacacgataacactactcgaatcgaaaaaaaaaagacttagggttatatgtaaatgtaccaagaaaatctacagagttgtaaccgttgctaaatctacccgtcggtttggagccaggataatcaatcccgaaatggggaaagttagctttggctccacacctgcggacgtagttgtttgtgccgacatctgctgtcgagtcaccaaacacgtatatggctggcactgcgggcgcggccgccccta

SEQ ID NO: 43820 - DNA, 2234 bp, Cannabis sativa
aatacaacctccaacacataatatatattaatctcatattaatatataatatgccacattttaatcttcattatatatttattaaataacaaatatataacaggagtttattgtgaataatttataattttatcgtacacatagaacttttttatttaaaaaagaaagcgttaattcaaaattcaattataaatataaatataattaaaacttagaaaccaaaatacaatttataacatctattatataaattaacaatccaaattacaacaactaaataaaaaattaaaagtgatcaaataaataataattatactattaaattcataaaattataaaaaaaaaaacattactaaaatctcaaatgtgttaaaaataatttacagttaacaatatcaactttgaggtcgtcaaaattaagcagtgaatcgtaaaatgggaggatacattcgagatgagggtaagattttctacaagtcttcagtagtcacatctttttcaagctgtccctgtaaagtaataaacataaaaatcacaatgtagtcatggattcgttatatcaaaacaataaagtgatattaacgagtcaaatacctcaaaacattaaatagccaacattcatttttacaagtaaacactagtgtaaagattgaacgatcacacatttaaatttttcacacatgagacaagtacaagttgccatttacgaagaaaagaacatatcacagagtaataatactaaaccaccaagaaaacttacaccaacgagaaaatttaaccacatgaggaagactttattcaaaaaataaagatgaaattatacactaggaagaaaattataataaagatgtaaggataagtcaatcatctttttaatgctttatctatgatatattttgatttagaacatcttataatttcaaagagaaaaaagaaaaggtctctttaaacatgataccttatgatctactaattattagaagtaggtgaaaactaagtacaacaatgaaatgaacgaacatgagataataataataataactaattgagatgcttattccttatctacaacaacccactgatcaagccctccaaagttgggaagaagaagcacctttccaagatctaaaccaaatcaatacagtgaacaaacttaactaatccattgttgtatcattaactaaaacaaattagtttgtttttgttctgttaaaagtagttaaaattagttgtttaaactattgagttagttgttaattgcgtttatttgtagaaaaatttattctttcttgcttttctttatttgcaagtgtaataacattgattatataaagttgctcttaattagaagaggtaaaattttccaaagtttcattcttttctcaatttccctttaaaaactcttttctttagctttgctactactgttgagtttctatatatataaaatctaatcttgaatgtcaacaaaagtaaatttgtatacacagagtcataccatggataaggcagggaagccaatcctcattggaatagtcccttctaatttctcaacatcattcagaagctcacatatgatgaattaaatttctctaccatttacctatgattatgatagattatttgacataaagaacaaacacaacaataaataatagaaagagctatcaaaccaaaaatacattttaatgagctcagaataaataaataaaattaaacgaaaaaaaataagaaatcaaatatagacaagcatatacaaaactatgaatcttagaatcacaaatatgaaaatatatcaattatatttagtgacggatccagaatttttgtttagtgggggcttaaaattaaaaatgtatacattaatatatatatatatatatatgtatatatgattgacatcaaagcatatgagatacgattgtcgctggaagctcaacaaaaaagttataatgatccttcaaaatattacaatcatcaacttaaaaagaaaactacagtcgtcctcgacgttttttcatggcttgaaaacgtttcataataggctcgttatctaccatactgaaaacatctttcaaaatgtaaacaagtaagatattgttcatcaattgatcacccattcgattctgaagcctattttttacaatattcatagctgaaaatactctctccacagttgctgtaaccacaggcaaaagtaatgataaagtcacaagccgataaaccaatggata

SEQ ID NO: 43821 - DNA, 1811 bp, Cannabis sativa
gaaagattagcaaaagcaaacagaagagagagagtgtgtgtgtgattgtacggacatgagatcattcatggctgccactggaactggaacgattccagcttcgtcttcttcacatattctcttctcttccatttctcaacggcgccactatcctcttcttccctgggggaacccaacccacagtacggccccaacttccgccgcctctttccgataccgaacgacgccgaggcctgcggcggtggtgactccgccgacgacagagacgactgatgttggaagcaaaaggagcgaaaaacgtgagttctaccctatcgaacatcttacgacgtggcttttgaagcacgaacaaagcggtgacatcgacgccgagctcaccatcgttctatccagcatctccttggcttgcaaacagatcgcttcgctgcttcagaggtctagcattactaacctcaccggtgctcatggaaccattaacatccaaggcgaagatcagaagaagctcgatgttatctctaatgaggtacgcacttgtcattatttttactcctaattttattttttagtatatgcaaacttatgcgaatagtctttgaatttcagctcattgaatagtctttgaatttgagctgaaattcaaatttaaattcagtctgtgaatttgagctcaatagtttgaatttctcctaatctacggtgcaagaagtgttatgaacaatattacaatatgcaaaaaaatctgtattagagtatgacatagacatattaatgagttagtcctcttatcgctaattggtttttgtgatggaatattatgattctaatcagtgactaaatgtgaatttgagctcagtgaaaatattttctttattgcttatccaaggaagatagaggtcatcgcatacagagaacttgtgagataaacttaccagagttgccattgataaatctttgttgaatgtagaaggattttgtgtgaagctactagtatccatgtaactctttccatagtagattttagaggtagaacccaataactggatgtagggtagggattactcattattgtattcctaatttgaatatttctcggttttgtttatagctaaatttgaataaaaattactgtatgcaaaaatcaagtgtctgctgaatttcattattgaaaattttcttgaatttttggcagctattttgcagttgtttaaggtctagtggccggactgggataatagcttcagaggaggaagatgtgcctgttgcagtagaagaaacttactcaggaaactacattgttgtgtttgaccccattgatggctctgccaatattgatactgccttaactactggctctatctttggcatatacggcccagacaagcaatgccttgttgatcttgatgatgattccccggtaattttcatcttatcttgaatttcaatataaagataaaaaagaaaaaaaaaacttaaaacaaaagcaacccttttagtagagccaaagttgatcttatgctttgtagtcttcaaagcctgctgatttgaaaataagagaaaaacctcattttcaagtgttcctatcaggaccacaggatacagcttctcatttaggatttgtttcgaaactgctgaagagctccaaaaataaatctcttagcctgaaaacaaatgatatcaaacttaaagctacaaccacccttttagagccaatgctgacttgatcttatgttgtgttacttgtgtagtttcaaaatcctaatattttaaaacaatgacaaaaacatcttgtaagcgtttgaatatctctgaag

SEQ ID NO: 43822 - DNA, 1170 bp, Cannabis sativa
ttttatattgttataaattgtgaagagagttaaagttaccattataccctcgtgtcttgagaatttgacaaattagacaacttttaagggcactttttctacggttgcctttttcactttccgtataggcacgtacgtaaatcgtctattctcatttattccaattatttactatatttttatttatttaaaatatacttaaaaaataagaggtatttttataaaggatgatcaggattcaagaattctgttacaaaaaaaatcaaaaatcaaaattaatttttcaacttttcacgtgaaaatgttttccattttcctttttttttctaatattttttttgaagagatcaaaattttcgaaacagaaataaatcaaataaaaataatcatattatttatggatagaaaatggggatagtaatttaagtgaacgactttgtatactatagtactatatactatataaatcaatgtacgattgactgtagtatatattatgtcatagtaattaattattagtggtaaatataaattaatactcaatctacactacaaccactaactatatttgagtgaagtgttaaactaattaattcatcattataactcgaatattttctgaagacatatattaatgttgcttgcattattgatctatatagagaatccaaaaacggtgtatgatacgacgaatattaatgcgtagttatgatgtttatttgtggaaatgaaagtatttttccatttatatttatatatttttttgaacatgtattttatatattaattgatcattttaaatgtaactaattatcaacagattgtcccattgtttatatatagtgcctaatatgaccaatttgattaagatataatgcgttatgcgtatatgaactcatgaatgtatataatataatggttttactattttgttatgataaaggtaataaaacaaaatatgtgaagtccattttttatacaaccattcaatctagtcatatataatttagactagatagatggtacgtgccatggtacgtgccagttaatttcattttagtttttaattttttttaatatcataattttaaaattcataatatccaatgtagtattattgaaatttgaaagtataatagattttattaaaaacaaaaattactattatac

SEQ ID NO: 43823 - DNA, 4393 bp, Cannabis sativa
aacagcggaaagaacattcccgtgcaggcagccattgctgctaaagcaccaccgagagctaatgatccagtatcgcccatgaaaatcgatgctttgtatcgattgtgcagaagaaagccaacacaggctcctgccattgaggccccaaatattgaaagatctgtttcaatcacaacaatacttaacaactgagaatttttccaacaattgaattagcaagataactaaaagccatgattgacatagctaaattatcacatcattatgaatacggtccaaccgataaacaagtaaaatataaaaaattatctaactgttaatattcagacatgttattcttatttcaagaagatccatactaaccgggacatattggaagcactgcaattgacattcccacaaatgctaaggcagcagtccccccagccaacccgtcaagaccgtctgttaaattgactccgtttcccatagaaacaaaacaaaatgaagtcaacaatagataccattttcccagctggacaagacccaaaggtgcaggaaggggaaccaacattttcctgcatcagaaaacataacagaaaaagtcactaatgacaatccttatatgctatattttccataactaattaatcattattatgtgactcaccaaagaaatccaatgcttcttttgtacattctcaatttatttaactaaatcttgtttcaaaactctattctccttacaataatttcctacttgtccatcctagtcttgaatgagtgaatttcaatggtttattttctaagtttgtcttcccaagaacagacatgtgagttaccatcagaaaaatgttgaccagattagttataagaaagtatacatgccgtagggtgacgagacacttctagtattcagccaaaatgaaaagcagatcccaactgctacctgcaaaagaattgcaacttaacattgtgagcaataatcaactcctaattcataaatcattagcatttaaaccacagaaagagtaactagttcaaaagttccacctccaaaagcaatttcattcgagcagataaaccactattgcgattcttgattaggcttaagacatcatcaagtagcccaattgcaccaaaggccagagtagcagcagcagctccagaaacttcagtagatgagaaaccagcaataaattttgccacgatcacacctaccggaacaaaaaacaatccccccattgttggggttctctttttaatagagtgccttgcaggcccttcttttctgagaatttgatacatttttaaaccgtagagtaaaggtacgcaaacgtagccagcacaagaggatattatggctgacaggagaaaggggcgagtcaaatgaaatggttctaaaggaagtctaacaattctccatgcacaccaatctacgtacaccaataacactgtgaagaaaactattaagcctatattgagtaacacaccatatctaatcctgcaaaagcatagtgagcaaagtaatctgatcagaacaaagaatacagaaatattgacatttcaaggtcaatactgaaataacacaagaggctaaaggataaaacattggaacttccatacagaacatcctaattggtctttgaccaaatgagcaaacaattagaaatacatataaacatcaaaatcccagtaaaatcaccaatcaaagaccattgaacatttgaatactacacagagataagtgggctttaggtggctaacattacattaagaataaataggattttcccccaaaattgttgcaaaaattctccctaactatgcaaattgttgcaaatataccctgtcactttaacctatacaaaattcagtttatcgagattaaacatacaaacattagctctaagaatacgtatacatttctgcaacctttttttgatatagttttggggacataactatacaaagggccataattcagggcaaaactaaaccatgattattattattattattattattattattattataagcaagcatttgggggttaatttaaggagtgaagaagacttgcctatgtctcttgtgccctctcccaaccattccaaaccgatgagcagcaagggatacagcatcattattggatacagaggtagaaggcaaatccatatcactaactggagaaagtataaattcagaatcactattttcaccatcactggaagaaagtatatacccatgagtaatcgcactgtcaccccaatcatcaagaacaggtatgtcaaacgaatcctgagaaataacaagatcatcaaaacaacataaccgataaaaaaaacgtaagcttttgcatatcaaatcatcaaaaactgtaaaataaaaccctcacgtacatcattaaacacccttaactccagatttctccggcggcgtaaacgtccaccaccacgaccacgtcgtcgaatgcttgattcataaaactaaaaaagaaaaaagatggggaattcagcatcattacaatctaatatttaacacataaatctatataattgacgacaataaaggttgaaatttattaattgaccttaagagaggaagatgaatgaaaaggttgaaatccaggtagagtagaaaaggagcggaatttggagaagcgagaagaagaagaagaagaaagatgaatcgccattaaagaagtttgttagagaagaagaagaagaagaaggaggccattaaagagatgtgatattcataagcggcgtcttggttttgagcttctttctttgtaatattcttctcttacaaaacaaaacattctctattttttttataaagaaaaaataaatatttgtggcatagttattattatattttttttttaatttacgatataaatatttaagtttaattttaatactttaaagttatattttctgaaattttataggtacttcactgttaaatgttaagtcattatatttaaactaatttttctaaaaaataaaaatttaatgacttggaccaatcaagaattgtcacgtgacagtttacttaacacttaacatctaggtacctatagaaattttagaattataactaagttattattacagtcaaaaaattaaatttaagtatttatttgcaactaggagttaaacttaagtatttataccgcaaattactttttttttatccacaaaagggatcacgtggtacatatacttttcttattccttcagttattttgacaatttcaggaatcacgtgtcagttatggagattttataattggataatggtaactacttcaagggttcccatccgagagatgacaccacatatagcaagctagtctttagaagggtcaagcctttaatccattttaggaggggttgtggtaggttttgaattattgaccccaagtaaggaaggatgccaataaaggcaatcactgccactacactacacaacacgtggtatatttgtagcatagttgctattttttggcaaatagcgacataagtatctaaaattttaagattgtaagaacatctctactaacacgtggtgcataccccttccccacccattcagtcattttgacaatactggggaccacgtgtaagctattggggtctttacctcagtttgctttaattgggtctatcggtaactacttcaaggattctcatcacacaaatgacaccacctacatcaggctaaccttcaaaaagaccaagcatttaatccatttcaagaggggctatggtgaatttcaaattcttgacctaagcaaggaaggatgtcagtaaaggcaatcctttttgtgtcaaaaataacataatttttacatctttcattggagatggtctaagcggcataaacctaatatttttattaacagcataagtactcaacttttataaaattgtaatttttcttcagtattaatacagacttccttttgaatttatctatacaattccgtccaaactcaatgatgtagaatctaagtcttatatgtgcctcgtttgaaataataacaaggtgtgtactgacaaaattaaaaaatatatataattttacaaatattgtacttatagcgctaaaaaattattgagtttataccacttacaaactcaaaactttagatactgttataaattatttttttagggaaatacacaaagatatgtgtttggcttgttggtagtagaaaaataatattttttttttttctgtcatttctaaataagcattgttacgagacacctatggtatctaatactacgatgaaatgtcgatttatcattgattaacgatttttttaatatttattaaaataaaataagtgagacctgatattgagttgcactaatagtaatattacacctcataaaaatac

SEQ ID NO: 43824 - DNA, 3380 bp, Cannabis sativa
agtaaatttctactaaatcttgttcagcatcttaaattgaaattaaaattcaacagtgacattagtttatattcaattcataagtacttcttagttccctatatttcataagataagattcatcaaattctcaggtcatagtgaaaagcaaatgaagcagaaattgacactggcaacggcaacatcatacaatcaaactaaatgcaatagcttctgttgtataattctaaacaccaatcctacatatcctcaatagataaaagtccccagcaaataaaaagtacaaacaaaaaaataaagattaaaaaaagaaaactatataaaaacatactacttcgaaatcaggatattacgcaaaattccaaacaaggaaaatgaaactaaagacacaacaagtaccaacaggggaaaaaatggaagaaaaactctaacagggaatcaccgccctcttaaaagagcttcatccaactcctcatgcgatgatggaaacaattctatatatcgactaccaagagtcattctatcctttgccattgctcccttagaatcttcagctgttggaaactcaacaaatgcttccccagttggcctcccttctgaattcaaggtaaaatgaatagagtcttctatcaacataaaatccttaaaaaactcaataatatcatctttgccagctgaaaatggcaatcccctcaaccttaatatccctgtatgttcagcggtatccttcccttcatcataagatttagatattgggacacttcggcgaggagatgcaccacgagaatctaaaacttcaccagcaattgccttgtaatattcctgcctcttacttctgaacacttcaacatatcgcctgcccatgttctgtctattcctttgaagtgcaaagtcaacttgaagaggatacccaaaaacacagaaagcttcccccgtgaactttccattcttgtggacaaagagaacatcaactatgtctagaccatggaagaattcagccacatgaacttctgtacaatcaaacggcagaccacgaagtttgaccactgggaaaggtggaggttggcctacatacccaaaaggagttgggttgtacataaaacttggaccaggggaagtcccataaaatgaagagccctgttcaactacccgctgacgctttgcacccatttcacgcccatccccaccatcagcatagttactttatgttccatcaatcatcaatcaacagcaaaaagagtggaaagcattaataaatagtgcttactctaaagagatcaataaaatggaactgctggacactgaattgtatcaatacacgtccttcttttttccatatgaaacatctaaaactcataaaacaagtgaaggaaaaaaggtattcccaagtaaacatgaaacttttctagagatctaaacaatctaaaagataactttagaagcagatgacactgatgaaaagtaatcgtataaatttcaaaatagattattcgtgctccatcatatcaaattgaaacgattataaatgaatttattgatacctttgtttctcttaaacatgtggatgtgaacaagaaagcaagaagaccacattacagctgaagcaaccattaccaccaccacaaataacagatattcgaaatgcttcacgacttggttacgggatacgttggttttggctctaaagcacgtatggatattaaaaacagacagattctacagccactcactaaagtccataggatatatcacaactctattcgttttctcatgacttaaaaaaaaaaaagagctcccatttcccatggctataagggtttcacttagttccaaatcatcattattacacaactaaacccactgaaatgaaaaatactaaaatacccacaataattttaatatatgtatccttatgcaaagaaattatccctgaagaaggccaagacctcccaaaagaaactcggttaaagttcaatcatttctaaaataccctatattcccaatattcgaataaaaatcgatgatgagctaacccaaaattaacaacaatatatgaacttaatttcaactttaatcgttcacaggtgattaattccaacttaaccctaaaaaagttaatacggaaaaacattaccataatgaaagtaagaaatccaaatctgggtacaattaacatcaaagaataagagaaaacgaaaaaagaaaaagacataccctctatagaacattgtagttgtttaaactttcaagtttcagaaacgggtttgcgaagaaagcacctgagatgagagctcccttctaagtgtgaattcgtgtctgtattcaaagaaaaagggtaaagagaaacttaatcgaagaatactgtagttctatctatgggtttttgcgtcaagtcgtagtctctttatgcgaccaatttaggcccattttttagtagcctctacggatacagatttttaccacttaatctgacgttttcgtttttttttttttttcttaattttttcagtaactttttggttactaataaatgtggataagaaattaattagttacatttatacaaaaaaaaaaaaaaaaaactttataattatattatataatgtgagatatattttggttatctttaaaatttatttgtataaatagcaattaatttcttatttttatggtagcttataatttaaaatatattttggtaattttaaaaattatttttgaaactaatgagttgacatgtaatgtaacaaacttataaaaaaaatgttaattaagatttaaaaaaaattataaaagagtaactaatcactatattagtaaccaaatagtttctttatagaaatagcaaaaaaagaatatatgcttcctacattttgaaatgttcacattgaaaaatatatcacaatggtacgctttagagtcaatcgagtaacgacttgaccggaaattatttttaaagttaacaaaaagagagaaagagaaaagataaaaagagatgctatgaaagtttgctaagagcatatggagaatgtttgttatgtggattgcttatttagtaaaatacaaatatattaaaccattggagatatataggttctatgatataaaattgtattgacgctatatctttttttaaaaaaattaaaggtaaataaatagtgtgacaatatttacagttaatacaaataatatattaaataataatgtgtgggatcataattatagcatttttgaatggtgttataccattagagtatttttaaaagtaacaactacaagaaatataagttttagctactacaaagttggtagcaaataatctatatttggtagctaatactttttttgctaccaaattttttggtagcaaattggtagtt

SEQ ID NO: 43825 - DNA, 1838 bp, Cannabis sativa
tctattttggtatattcctttaaactagtatgattacctgtaaaatttttacaaaaaatttaaataatttacaatattaaaaataaaatttaaatatttttatatattatcttaaatgaacaagagtggatttttttttcttttgcaaagtggagatttgtttgctagttactcataaaacaaaaaccagatactagtcattactccaacatccataactaataagataaggctacttaaattaataactaatttttcatatttatttttctaccaacactgatcagtctcccaacttctacaagaaaatcccgatgatgccatggctgaagcggcggcaccagacgaggctgaatagacaaaggatcgccttgatctgttggaaagatctttatcatagttagctcttttatgaggatcagacaaggtggaataagctgcgtggattttaatgaactcgttggctgagatttctttctgttcgaaagctaccacatcaggatgacacattcttgctagtttcctataggctgctttaatctcttgtccgtttgcaccaattgaaagcccaagaacatcgtacaacgacgtcgtactagccattttcactgtcgtttaccttttattttataatatttttttatatagatatagtaacttttggttttggtcaaatattatatattatagagctgttctctttgggaggtgggagatcgagtatatatatgtatttatggatgtagcaatgttgagatattaagggtttttgatgagtatgagagtgagtggtcgatgcttgagttatatatatagacttttgaaattaaagtattttactagtgggtggaaaattttaaatcaaataaaaaaattaaacagataaaaaaaaagggttcttttgtgacatttaatatggttgatattcattttggatctttaaagagcttatccataagatgatgtatatatgctgactcagctcactgtttatgtggataaggttaacctgttatttgttgtccataaatgcaggctatatggttatactatatccccaattctcatcgttaagtttttaatggactctcatttttacttttagtagtgataggtcatgaagacctaaggacttggttgataaagttttcttaaagaaacagtcaatacttctatcaatatactttttaataccaatacttgctttggtcataattcattcaaatacatattgatttacatgtgtcaaaatcttatgagagagtactttcaataaatccatatagattctaaaaggaccgtttcgatataacttctcctaagtaaaagcatgattatggtataatgacaaaactaataatggggttttgtttcatatttgacactaaagaaattggcttaaaatcaaggttcatattattgtgtttaagatcgaattggcgcaaaaatgcaaaatcctgggtcttttgtcatttcttcattccctttggataatacatgtggacatttttttcatattttttcaacgaatttttatgattgctaagaaaaagtgaaccacctggaaagaatgggttactggcactgttctatcagacggtttggtcagttttaaaggaggaagtaattcaaatccgcctaagtgtaattctaatgtaagctactttttaaaagtcaataatatccgagccgtcctaaaatataagcatctctttttagagatataaatttacactattatttaatacaaaactgaaatgtaaaatgaacttaaatttaaaagctaaattagtaaatatttttttaaaaagaaaaattaaatataataaattagttaa

SEQ ID NO: 43826 - DNA, 1933 bp, Cannabis sativa
aaattaaaatagtaccaaaggagctaatttaaaaaaatatataaatatatagttgaaaaaactagcagtgatattgattattactatagcacagtttccgagtttgactttcaatttttatggatcgaattcttcgaccattaccaaaaacacaacactcaaaccacccaacaatgtcgtaaccgctctcaactcatctctcaccatccttgcttcatctctcgcctaccaacttcgtctactatatatctttccttaatacccgaaattaaacattttgtatttcttttgtttttttttgggggtttcgtttaatcaatctgggagaaactcagctcagtcatggcggtctccgtcgaaacgagtctctgtcacagtgtcatggagctcaccaaggtggctcagcaaaagggttgcgaccctttactctgggcaattcagttgtcgtcgaatctgagctcggctggcgtgtcgttgccttctgtggaggtcgctaattcattggtttcttatatttgttgggataacaacgtccccattttgtggaagtttctagaaaaggcattggtgttgaagatcgtacctcctttgttcgtacttgctttgctttctacaaggtttgtgtttcatgtcatgggtttctgggaatttttcttttttagtctctgggttgtgtgttctctggttccatgattttctaatagcttttttcgttatatttccttggtggttattagaaataaggatttgggtttggattgaagtttgtgtttttggctttgaatagtgatgtatttattgcttgattgttttttgagttgacttgcttgtactttgttaacgttatttgttctacagggtaattccaagaagaacctctcagccagtggcgtatagactttatatggaacttgttaaacgccatgttttcaatctcaaataccagataaacggaccaaatagtgaaatgtaagctttcagttgtgaaatgtttaagcttgttcctctttgccttaatggagttcagggaacagaatgtgctaatactttattgatcttcaatttctttcactcagggtaatgaaatcaatagatgatatacttcacctctccagttattttggtctgacagctagtgaacctgggattgttgtggttgagtttatcttttcagtggcgtggcagttgcttgatgcagccttggatgatgaagggctgctgaaccatactttggaacagaattccagatgggcagtcacaactcaagaaatggaaatagatggtcatggtagttatgatgagaagtggactgaacataatgagatactgaagactgcaaatactgtcactgccattgagatcgttggagaacttctccacaacaaagttacagcaagaattttgttcttggttcgtcgtcatttgtatgtacctgttctcttaattttgattacttctttgaatttgtgtcggtttccttcttgtattatgtttttttcaaagcatttggttagcaagtagtattcccattccagtacactcaacaacattcttcattatttcccaatagtttactatgttttccttcttatcattgtttcaaattgaagagtgcttgacaatgctctactactttcaggcccacacattgggagaattttcgtcgtagaatacaacttcttggggaaaactcatcagcattaagaaattcaaaaactctgtcacctgaagctcttatgcagctagtttcagattctcgcattgtcttgtctcgagaatgcaaaactagctctctacataagttccatgctgtcatggcttttggatctatgtcttcttcagctggtctttgctatggtgctagccgctctgctctgtggcttcctcttgaccttgtattagaagatgccatggatggatatcaagttgaagc

SEQ ID NO: 43827 - DNA, 1809 bp, Cannabis sativa
attaaaaaataaattaataccattgataatattttattttatttttgtcaatagtattattttattttgttgaagatgaaaatttgaaagataccattatcattatttttattagttttgacttaatatttattcaagccctcactcaactaaatttctagcttcgtcactgactgtcacagtataaaagctgagagattaagagctcgtttggcatgtcgtattaagtcgtatcgtattgtattgtattatattaaattgagttgtatattatatttttataaattactatattatattttaatttattttaaaatattatatatttaggtgtccataaaatttaataccacatatagtttaacataaaaatattgcataaaatacaattcagtataatactttacaaacgagtcatgttagtccctgagttagctcagctatgagttagtctctagtttgtaagaatcagcttaactgtctttgtaacagattttgatatgcttctctggttataaaaagaactcaaagctcacactctgtatcgattgatcagagcatacatttttcattttcacatcaatctctctctccacaaaaccaagtaaaacaaagaaagtaataaaacccacatagatctaatactaatataatgtgaaagaaaaactctatatatttgagatttaaggatagatatctaacgaaaacaagacatatattggtattcttttaataattttttaaaaagttattatttatttaatttgagatcaactgtattaaatttaatttttaattgaataaaatatgtttatatttatttttttcctttttaaaggaaaagttgtttcttgaataaaaaaatgtattgtataatttagtagaaaaaatatattgttacattaactttataaaatttaaattttgacaaaattagagcatttgttgtttttttattagaatagattcaatttagaagaggaaatgatattaccacaactggaatacaattcagaaacacctttgctagagtgcttgcatttgttaattcaattatgcaagttggcttcattcagagtcggttttagaggtaggcgagataggcacgtgtttaggattctcgtcctaccaaggcctcaaaaaaataagtcaattcttttttatataataaaacttaataaataataatacaaaataaaatattcaattaatatagtggcaactacacttgttgaaagccttttctggaccgtaaatttaaatctcagctactacattattttattttaattttattctccattaaaattaaaagaaaagaccataaattctatattacaataggacattttccactaaactaaacttttttattacaatgagacacctacaaaatttatgaagacccccataattttgcctacaaaattttatattaagtgattaagggctccataattttgcttcgccttaggtccctattttctcacgcacggcctcgcctttattttatataatatttattaattttcaattatgcacattctctctaaaatatgttttgtggggagttgagaatcattttttggcttgagccatcttattgaaaagagaaaaagatatatatgaaattcatttattttagttaggaaaaataaaattgtggtgccaaatttctctgtaatagtgcaatactattgttttggttgctgtagtaaaattcaaatacaaatgtgaaactcaagagataaataagagatttcaaaactgtttaatcatgtatattcttaatgaaaatacaaaagaaat

SEQ ID NO: 43828 - DNA, 1915 bp, Cannabis sativa
aatattttcttggtactttttcaggcaccaagagagcccaatacacaaatatgtgagatgataaatgagtcaacaagagtagcaagacttttctgtgagaaaaaattgccaattatggtattcttggattctcaccatccaaacaaacctgaagacccttatccacctcactgtattattggaacagatgaatcaaatttggtacctggtgtgtatatacaataattaattatatatataaatagatatcttttattttttttatttaaaataatatattgatattgtttggtattgttttttttttgtagctttgagatggttagaggaagaggaaaatgtaacaattagaagaaaggattgtttcgatggatattttggttcaatggaggctgatgggtctaatgtttttgtggattgggtgaagcaaaatcatatcaaaactgtgagtataaacactactaattaaacttgtgcttttaatactaaataataatctatatacatatagcaacttttcttgtggtgaagctaatacatataaaaatgtgaaatactaaaatttacaaagtaactttcaacactgtaaatttataatcgttttacaactataatgatttaccatagtcaaatcaatgttaaaacagtttgttgtttgttgtatagcatctaattttttatactcgtgcaaaggctattttaaattctgattcggacactgaaaattattcggaatttatccaaaacttgctaagtgtttgttgactacaataattactctcataaacatttttttttttttgaatgaaagatgatatttattcaaataagcatatgaaggatcatgctcactgaaagaacaatttaacaagaaacaagaccctttagtcatacaagcagtcttgtttgcagactgtttaacaaaaatccttactataaagttaattttttatgagcaccataataaaaatcccaatatatttgtatatatatatatatatatatgtttgattgtggtatggtgggggtgcagttagtagttggtggagtgtgcacagatatatgtgtgctagactttgtttgctcaacaatatcagcaagaaaccgtggttttcttggccctcttcttcaggatgtggttgtttattctactgcttgtgctacctttcatattcctcctcgtgtcactacaaacactaaacaggttttacctcatccacaggtaataataataaagctaaatagtcaaaattttgagtttatgctgtaattctccctaataataatgtcttgttttggagatggtacaattatctattttatgacaattgaaccctcaaatttatatacaacatatatgaaattacattggtgtaggtccactagtgagttacaatgattatttttatatttattaattttggtcattgaatgattttgggttgcaggagtttatgcatcatgtaggattgtacatggccaaagaaagaggagccaagatagctaatgaattgtccttcgttgcagctggaaaggcaatatgaataatgaacaagtagtttattacgatatgtagtagtatttgcatggctatataaataacacccaaacatgatgagatgagagtgagtggaaactacaacaatggggttggttagtttgaaacattgagtgataatactatctagtttgtaatattataataaaccaataataaaatcagtgtattaaaaaaaaatactaaaatagtaaatcagccaatatatccagtttacatatgatgtatcaactcattaaaattttgcaaatttcacatgtaaaagaagaaaaggtcgactactgtaattacacaatataataccacaatttcatgattgttttttcattattagagaactaaagatcaacaaattta

SEQ ID NO: 43829 - DNA, 2805 bp, Cannabis sativa
aaaaaaagcacataaaaactgaaaaacacagaagtagacatacactgctgtggctgaagcagcagcagctggagcaggaactgagccaggagcaggagaaggtgtcacttgctcgccaggtctgataaataattagacaactcagaaataggaagcaggttttaatatctacatttcttttcaaatactgaagaaaagaaaaccaatagaatagatgttcaaacaactgctgcacaactcacgttggttgtgttgctacaggagccggagttgatattggtgtgggagcagctgcaggggcaggagcaggagagggggcacttgtttggggtggctgagatgcaaagtaaaatatccttcagtaattaaggctaacaataacaaacactcgaattcagaccaataacagatacaaacatgaacttgatttcacaagaagatagaatcagcagtaatgttaatcaaaagacaaaactgcaaaaactatacaggtataatcaacaataaaatttcatacaaatgtagtcaaaagtataggttttaacttttaaccaataagcactgagatattattacaatatacacactcaacagtaaaatctagaggtaatacaaacaactcaaaaatgcaacgaaagaaaaaggtatattcagaggactgacaacttttctacacactgaaactgaaacatataccctctgaattattttaaaaaacaatggccaagtattgcagaaggttataatttaaaattagtccatttccaactgattagaaatctaatagcatgaaatcctaatatctttcaggttcaaagaaaaataaactgtagaatgaaatttagaacaaacatttgcatgtcaaaacttacaaagttccaatcaaagaaaagaaaaaataaaagataaactgggaacttataaacttgaatctccagaaactccagcagatgttagcatcaggatttctaaaaatgaacccacaaactggcaactactaactaccacaaaaagatagagaaactaatggttctgtgtaaaaaaagaaacaactgtcagattaccttactaggtgcacttgttgttgagccttcaccagacgagctcttagtctagcaatattgtcggtccataaagtaaataattaggacagaatatcaaccaaataacataatttaaattcacataaagtagagacagattgaaaaacaaaatagtagaataataccttggtcaacattataacaacaaagctattctctgcaactttgttctcctccaatgtagttccatctttaagaactttcccttgatgaatgagcatctgctgagccgcaggatatacatccgaaccttgaacggtctcaatacatttcttcacatcagaaacctgacaactactattgtcagctttaagacatatttcattcaaatatgatttgcaattacaagattaagcatcaaaatgcagcacactagtccagtatgaaagcatcatgaggaattaaaggagaactgaaaaaaaaaaaaaaaaaacatgtcctgattctttcttcctctctaagcaaagaatatcaaaaatcataacccatcaaacacgtaaagtataaataaaaaaaagtttgaaacaacaaaatttctaaaattgaatttaacatagcacaaattttaaaaattaaaccataaattcaaagatttcaactccaatcagtacgaattcaaaacctaaagcactaaccagaattaacaaaaaccctaacatagatttcacaacaacgatccgaattcaaaacaacacatacaaaaatctaaacacagaaacaaaatcaaatagtattcaaatgcacaagagatagagaaagaatccaattggagtgaacattattaccatgtcttcaggttttacttcgatttcaaagtgagtacccttgagagtcttgacaaaaatcttcatcttgaattactggatcgccgttcttaacagccgtgaattttgagtctgaagttccgatctcgaaggattttagaaaccctagaaagaagagtgaagagagaatttgtaagcaaagagaaaggagcttccgcgaacaagaaaatatgaaatggaaaaagggaaagcacaaatttcacctcttatatatttatggatgggtggtactgtctgacacgcgctccggatgggatgttattgcacgcgctgtttagatgagaatgttttgtgacgtggaatgcggatggatcgactgtgagcttcgtaattctaaatagagtttggggtaatcattttctcttctaaatatattgggaaaaataaatttaattttcttattggatgataatcagacaaataaataaataaaaattcttgccctgcaaattcgcttttctattaaaaataatatttggaaactaggaaagtatagtaattgctatgtaagaacaagccataatactcactttgagcttatatgaattgttgtgaaaatagtagtagtaattgccctataattatgtaagtttaatttttaattgtaaataattatttaagtttaattttttacggtaataataatacttaagttataatttgaaacttcagtaggtatctggatattattaagtatttagtaaattgtcatgacaattcttgattggttcagagttattaaattttttattttctttaaaaaaattagtttaaatatactaataagaaaataatatgtgaataataacgtaacatttaacaattagatatctacggagttccaaaaatataatataaatattattatctccgaaaat

SEQ ID NO: 43830 - DNA, 2149 bp, Cannabis sativa
  modified_base (179)..(180): a, c, t, g, unknown or other
tcttaataattctccctaattaatcacacctcctataaaaatcaggctgcctatttagcaagctcctataaaaaccaggctgcctatttaacaagctcctataaaaatcaggctgcttatttagcaagctcctatagaaaccaggctgcctatttagcaagctcctataaaaactaggnngcctatttagcaagctcctataaaaaccaggctgcctatttagcaagctcctataaaaaccaggctgtctatttagcaagctcttataaaaaccaggctgcctatttagcaagctcctataaaaatcaggctgcttatttagcaagctcctatagaaatcaggctgcctatttagcaagctcctataaaaaccaggctgcttatttcataagctttatgaaaaccaaactgttcacactaccttccaacacatcaactcaccaaggttcttctacgaatcataagttcttatattcacagtcatttctttcttcttacaaacgcaattatatggtctgatacacctcccttatctacaaaatacgttaatctaggtagccatatatgcccaagattgatcattttttgtaagaatatagacatcatttgctcttgatccttgtaatatttcattttaataaagatgcacaactgactgtttgctaccgtagacgtaggcaaatacaatttgctgaactacgtaaatttgtgtcttattttttatttaaagtagtatatatatatgatatatgtgtatatttaaagtaatatatatttatattattaaatgtttggctagaacccctgaacaaacttttagaaccaacacacctaagagtgatcacatagtcatcaatggcaccacccttcatcagaaataacaagtacttctccaagaaagaaatactgtctttttccttaaagctaatgtagagatccctaaattaacgcaaaagtattttcattcaataaaatttgagaaaatagacattagataaaactgattttgccttttatatattgaaggagcaaataaaataaaaaaaatgaacaaacgtgagtgactaaatatatttgtgtgatgatgatgatgatttgtataatagttgttggtcttgtgtttgttccatctcctacttttataatcttatcatcagatcaaaatagtgttatgatcaaccgttaaaatggaaaaatggtaagtagcatggatcgtgattttctattggctgtagggtcattagcccctcaaacagaagcgggacgaagcgggattttctactccgagagaagaaggaagagcttcaaaaacagaagcgggacgaagagggcttacacctgttaacccttttgctccaatgtgcagaggcagtatcggcagacaactttgattatgcgagcaagattcttctcaagatttcgaagcagtcgacgctgtttgggacgtcagcgcaacgcgtgacggcttacttctcggaggcaatgtcgactctacttatgagctcgtgtttggggatatacgcgactatggaggtgatggctaaatgagagactaacattaggataaaaagttaaaatatggtattcctagttttatttacaaaattatgacatacaaaaagcccataaaaaagtaaataaaacaaaaaaacccatattctattaagttatttaattatgccataaaaatgtaaacacataaaaaattctcataatttatgtaatttcttcttttaaataataattttaaattttttaatcacttgtttactagtttttaatgatcggcaaatatgatctccaatagtctcattttttttttttaataaaaaattactccaaagtgtaaaacataaatttatacacgaacacgaaaaaaaaagtcttgtctatattgacatggtttatactgtttgattggttttgatcgtttgacatagagttctggtgtgtgttgtggtctgttcgttatggcttcgtcaagcagagatgcagaggaattggaggttcgatgggatgatttgcagatcgatgaggaagaaggaggagtcttatttgataatccttctgaattggaggatgaggttgatgcaagatggtgtctggtggggagattgctcacggatcgtgtgtccgattttgatacagt

SEQ ID NO: 43831 - DNA, 1711 bp, Cannabis sativa
  modified_base (1648)..(1650): a, c, t, g, unknown or other
aattcattttttctcccaaaggcaaggacctaagataagctttctgcaaattccccctattcacacacaaagggtaattcacttttcattccttatatgctcctcatcctttaaatagcaacaacacaacttaatagcacattcagaaaaaattaaaatttaaaatttcaacgaaaacaaaaacaacatacaatatgatagaatttcattatagcagaaaaaaatgtcaagcaaagtaacataagaacatttcaagagaagttagattgaaattgagctcctaagttatcagccacattatactttcaatctgaataaattgttacaatgaaattttattatttgatccttatgatcttgacataagccccacaactgaaaatcctgacctaatcctacataaacaaacaacacattcttctccatcatcaaaaacccagtagaacctaagaaatttccagaaggtttcagctgaattccaattaatcaagaaatttcattgcactgatcaaggtccctaaattttgacattaagaaacaatacgtagcaacgtaacaaattacagaaaaggacaaagataacccaaaaactaaaattcatttcaaatttaaatcttaatggaatttggccttacaaaattgttgatccaaacgtctgcaaaacacctcagagctaaatccagctcagaaattcatcattagaccataaccaaagattataaaaacagcccaattggctaaataaatcccagaagctgaattaatatttttgggttaaaatcctcgtgaaattttcatttatttcaattaattttaataataataataattattattatgaatccggttgagcagatccaaccctagccctaaccctaaccctaatactaacaagaaccctagaatagaaagcccaaaaacagtattctattcgctacagaagaattggtgtaataggattagcaacaccaacctttcaaaatatccagaaaatcatcaaaggtactactggactgggtattcaagaaatcacagatggataagggtaaatctggaagaaaactatattgaagaaacttaaatttagggaataaaattgggaattaatcccaaagttctagaaaccctagcccaagaacagaaatataacttatatcatcaacaaaaaactatattaaaatcttttttaataaaaaaaaaatggtaacaaaattttgagtagatagctgattatggtttctttctttacttagaggtactaaaataaatacctttcctttaagctgtgcctaaactaactaattaaaccatctaataatagttaagtaaaaaaaaacatctaataataatataaataaatttttttggaccaaatttacgtaacgtaagctcatccaaaacaaaacatagccccgttcaaaaccattttcttgctgaattttttattattattattatttgtgccaataaaattaatgggtcggtgattttctttgtgttattttaaagaaaaagatatgtatattatagggaaatttcaccctcttaaaatggatatattgatgcatgcttatttgttttagtactagaaataattttgtagttaatttttttttattatcttatacgttatagttatttaagacannntgcaaaattttaagaaatttagatatgttgcacgcgtaactattttattttatacgcgtgt

SEQ ID NO: 43832 - DNA, 2015 bp, Cannabis sativa
  modified_base (39)..(66): a, c, t, g, unknown or other
  modified_base (1573)..(1576): a, c, t, g, unknown or other
  modified_base (1914)..(1932): a, c, t, g, unknown or other
atgcaacataaaatgtgatttctgatctttattagtaannnnnnnnnnnnnnnnnnnnnnnnnnnntagggcacaaaatccaacagaagctccccagttctggaagcttccccattctgaaagctctctcatttctgaagatcccccattttggaagctctccctatccagaaagtctccaattccagaagctcctactcgcaacaagggctaaaaaatttccaatttttagccccaagaactagctcccaacctaactaaaagctaccaaaatctccagtacaattttttggggtattctaaagataaacaacaatccaaaagcatctaaaataacatgcaatcaaatttaccatggatgaccaaagcatgagtttaaaaaactcaaacttcctcaaatcttgctacaacttataaaaaccagcctttaattactaaattcaagctttaaactagtttctaacatagtttaacctcaaataaaactatacttccaaaatcattatatagaaccaagtttaaatcatgaaattcgaagaagaaagaaaactaggattacctttgataaatttctcaattcctactcaaactatagctgaaatcttagttggatgatgaagaaactgatgaacaaaatggttaaatctccttggtttgcttcagtagaatgatatagaaaaggaaaaagtttggtggaacttttttttattttgcaaaaaatgagataaaacctttcatttcctttttcttaatctatttactcaaatcatcagaataatgagggtattctacacaattcactaaaaccaaaaccctttttaataggcaaaattacaatttttcctttacttcacccttaaaaaatctaagagcttaggggtaaaattgtctaataccgtagcaccgcccaatttcgatattccaaataccacttatggtcatcccacaaaataaggattctaaatcttactcatgtgactctaatggcaaagatattgcatttccatagtttttgagcaaaaatcacataaataataaatttcaaatgtagcatatataattcttgttgagtttaataaatttttaaaattgagaaattataactctaatgcctaattcttcaaaataggtcacacaacatatataatcaattataatcataaaatataattagttaatgctaattaccctactaatctatattctaagtgttggaatatcttttacgaggacctagatttactaacaagtatatttttaacatcccaaatatgaatctttaaaacgataaaaataaacacatagaaggtatgagaaaccttacatcggttgcagcggaattaaatgactccttccgcttagatctctaacccttgtatcctttttgtcacagagtatcaccaagatccgagcccgaacctccttaagttatttggattcttcacagtcttacgcactatgattaaggactaacttgctatggatgggcatgcactcaatcactaaatgctgaaactgttttgtgaagaaggctatagaatttgaattagaagaagagaaaagaagaagaagnnnnagtctcaaactcactagttgtctcacaagaagaaaattaggtcaagagttaatatttgcactcgttggatagtgagactttcttttctttttatactaattcacttagggttaggattgatttatttggaataaaaaaatgataaaaatagagcaaaaataggcactagtggccggccatgaagtgggcccaacactagttaaatttttgttgggcaaaaatgataaaacgaaggaaatcatagtttgacttctatgtctagatagaagctatagattctgtacctatgattagcactcccactcaattgaattaccatgtccttaatctatatgtcnnnnnnnnnnnnnnnnnnngactttaacgaatagattgaagaagacgaataatacaattgaactagaacctaactatctcatgattgagatcatttgatcta

SEQ ID NO: 43833 - DNA, 2165 bp, Cannabis sativa
atgggagaccatattttaaaatttattgccccttttttctatgtgtatatctacattttatttattaaaaaaataaataaagtataaggttcaaactagacacaaacttatgaccactagaataggaggatgcttaaaccatcattccacttaaatttagctagttttttttttttattattttggattgtattaaatgtataactaagcctaccctgaaattcaatcctgggttcgccactatccattgtcacaggggaacttcatacacaaatgatgtattgaagtcattgctttaaaattcactaagatagagcgtcccagtattgcattctacgttgtggggaaatccactaccataaatgtataatgcttgaaagcgttgacattgttttcacctctgagggtgacaggtagctggatctttcccattggtgtcagggcatccccattaaggccatacagctggatgggacaaggtgacaagttcgcttcggcgagtccaattgctaaaaaggcatgtttggacaggatactcacgaagcttctgttatccaccaggactttaggcaccctcttgttcgctatctaagcttcaatgaccaatgggccatgatgaggaaaattcacatgtatggcatcatcctctatgaaagtaattggtggatttgttgtccgagaacattgggctggtgatcctatcaacgcgcatgtccttctttctctacctaatcctctcagatgtctcctttgaaaatttttggagcttcctgcaaggtgcagtccacccgagattgtcgctacatgcccgtcaaccggtggtggtgctagccctgggggatatgtaggtcttggagccattaaagccactgcagctagagctggcggagcggggagtgccaaaggatatgtttcgggaacttgagggtgactcacttcatgtggaggatttatagtaccctactgtgtggaaataatcacctgttcgtgaatgaccccctgtccgagatatatgatgggaatccagacccattaccccaaatgtcctgttcatatcaacgtttcaatttcatccttcaagaagtcacacttattcgttgtatgttccacatcttcgtggtattcacaatgcttttttaggtctattcggagttttccttcttgaggcattctagtaggggacttcctatagtgaaccatgttacacgttaccttgtatacatttttacgagtgtccacaagactggagtactcagtgtatctaggatcgtactccttctcaaatttatttgaagcttctcctcgtcctggaccttttcctcctctcttgcttcaagagttacttaagtcttgctctggtacctcatttcaattgtttgggagccacactgtacccagtctgtgccgcttcgtacccagagttatgggtttgtgtagatatgggcacagacggagaaggtccgtagattgtaggggtgtatggcattcttggaacgggagcaaacaaggtaaatccaggaactgaggttaccggggctggtgttggagggaccccaaatgcctgttggtaagcatcttctaaactaatgaagccttgtgcctggaccatgaactcaaagagggtttcagccctctttctttgcatttctccccataacaaggagccagctgcgagtccaaattgcaaggctatgagattcatatcgtcggttaccttagttttggcagtgacttccatcattcgctaaatgaagctttttaggatttcccctacttgttgcttgatactgtgatagaccccatctccaagtcgtactctcgggtcgctatgaactgctttcaaaatatggattgtaaatcttttcaagagtaaatcaatccgggagttagccttttccactagtctttaacagaccttatgagggtcaatgagaagcacagacatttggcgtcatcactcactggccacctgcattatcttattatgaaaaagaatttcttaaaaataaaaaattaaacaaaagaaagaaaaaacctacctataagattgactttcaaaataaatatataaagttaggcactaataaataaattcaattttttttttttaatttaaaaaagggaaatttgagtttctatgcattttttatacccaaattaattat

SEQ ID NO: 43834 - DNA, 2800 bp, Cannabis sativa
  modified_base (2090)..(2090): a, c, t, g, unknown or other
aatatattaaaaaattatgccataaaaagtaaattaattcttaattttttcctatgtaatttctacttgaattagattggatgtgatcgccaccattcagttacatgatcatgctcattttcttaagttctatttcttttgacgaggtttttatccgtaaattttgatcaatactaaattttaaacaaattgagattattccttatttatcgaaattttcagaaacagatttaaaaataagattagaactaaagaaaggattaagaagaaataacacaagatttttatgtgatcgggtgttaacaagtcttagttcacaagtcaatattatttgagctttaagaaaaaaacccaatgcaaagtatttggagcccaatctcagaaattgtagggaaattcacaaaaaaaatatggaataagttaaaaaatacatcttttttgtattcatttattaaaaatacccttatattataatatattaaaatatactcacttttttgagtgagttgcctaatatactctcactcaaaaaagtgagtatattatagttaaataaattaactgttacaaaaattataatagggttttaaatataaaaataaaattatttataaatattatttgttacgaagagtcttgtcaaatatttaaatcaaaaattaatttttgtaaaaaaaaatagttaattataataattttaattctaaaaaagaaattttcacctattggtaacatgctataacatgtaaagaaaatgtaactatcatgtttacaataaatgtaactattaaataattacccatataaaaatacttattaattataatatttaattatagaacattaacattttttataccagatatctattgacaaaaattatgggattctaccttagagtaaatggttataagtagaatagtctatgctcgatcaatatttttacatttattttatgtgccaaaatatattaggggagccataattttatgtcgctttgagcctccatttccctaggcacggatagtatatgagcattgctattggacaccagtggtgtctagcacctctaaacatgtcttcttgcgattgattagcgatactccttaaaaattattacattaaactatatgagacccaatacttaattgaaataatagcaatattgacacataagaacaccactggtgccttttatatagtacattgattatatatatattgtgaagttaattaaacttaatttgatattcttcatttgaatagtctacttttaacacactttgcagaagcctacttggctgatgaccacagtgttacccaaagatttgtgttggttcaaaacaagtttggaaagtgtacacgatctcaatggtagtgatgataacaaattagtaccgaaagagaaagaggggcttgtttcacctgagtctaaacaacaaagaagcaatagagaaattatgagtgccaacttaattgtggcaacaatcatagcaagcatcacatatgcagccggtatccaaaatcctggtggatacgacgacgaaggcatggccaacttagctgacttcgtagtgtttaaatgctttatcgtatttaactcattgggtttcggtttgtcatcagcctcgatattgctcacatttctatcagtgctctacagtaccagtaaaagatttcgagaatcaatctccttcattctcttgaaaactgtcattgtcctaactatgtcatcctttgtttcgtcggtaatagcttacttgtttgctacagaatccacaacggccgacgacatgtggctatttgcttcttctgcgtttgccatccccgtgttgtacgtatgttctcatgtttttatgcatagagttagggtcagttatgatcaaaaaagaaaaataattagggccagtttcacacatcatttcaaaaagctaaaagtatttttttcttaaaaaaactgttataaaaagatatttggtaagcagttaaaaaacaacttagggctcgtttggtacgtcgtattttattgtattgtattgtattgtgttggattgtattgcattgcattgtattagtattatttaatacantactatgtttggtattgacttgtaaagttataatatattttcaataaacttgaccccaacactgaattcgggtcgtgtccaggttcgagttgggtctaggattcgagtccagtttaagtcccgtgtgttagggtttatgtcctgaaagtcctctaaagacatttctataaagagttgaacattttgatatatgcttgaatattagtaattttctagtaattgaattgattgctgtatgctaatttgatatgtggaaagttgtttggaaaattctaaaacttgcttgctatttgagatgaaataataaattatgcatgactaggaaagtgatttaggcattttttggatcgattgtgcttttcaagtcatccctgtaattttatcatagttacccattatgagtattaacatattctttatttgtacacatattgagcctaaaaaaagataaacccatgaatatccaaaaatttaaccctaattataccataagtagatctttagtttggggaaatttagatagaaaatttgttgtatgtgtgtgagaaagagtgtgaaaattgagagaatattaaaaaaatttagatatgacagcaacttgaaaaaaagaaaagaaagaaaaacttgacaaccagtgtcaaatcgagaaaaaaaaagataaatataaagttgttgcaagcttgttgaaaaaaaaatatatctcatgtaat

SEQ ID NO: 43835 - DNA, 1686 bp, Cannabis sativa
cgctatttttggaccttggggactaatcagcatcaacgtgaactttttggggacttttgccgcaaatttccctaatatatatgtgcatatataataaaaaatggaaattttccaattgttgatttggtgtgtgaaatgagaaaatgttaaccaattgaacaaatcaaatgaaaacttgttcgagagaaagtgaccttttgtgtgacttgtgaggatttaacgtaaaattgtctacaaaatagccttgaaatccaattagcaagccgttaaatgtgggttattgcttacaagaaacatattaataccaaataattcatcaaaatgttgtactacttttgtgagacataatggtagtacttctaattgtaagcctacaatacagaatatatactcatatttatgaattatgaactgccttgctagacttgttacacaagaaattgtgttacccctctctcacgaaatagaaactatgtaatagcaacaaagtggagtaaaatatgaactgtgtgagtagctgttaacaactttctagtataattttctattaagggtgtaggtatttttaatttattatcaatcaacatgcccattttttatatcattagcgtataaaaagaagattattctacattaggagaaataaactagaaaaaggtgactaatgaatcaaattgaaccaaatctcaactttcaatggatgtgtcagtgtcttctatgccagaacatatatattcaatgactgaatgataggaagataggatcatcgatggatttggggccaagtgtttgtttggtgaaaaggaaaatacaaaagaaaaaaagtaactgtaaaggaaattaagaggtaaaagagtaaggtatttgtagagagagtgagagagagaaataaaaattacaagataatacaaatgagcattattgttccttggtgtcttttttttcttttccatataatatagttataatttaaatagtttgataagcacaagtaattatttgtttgcaaaaaaaaaatatttaaatcatgatttgaatttttcttttttatttttattatttataaggatgatttcaatattttaaatcatctaatatttctttaaaaaattgtagaaagcctccattaactatagaaaattaaataataactcattcatagagaatattttataaataataatgaaaaactatcacactacttaattaaaataattagtaattttatcccctaaactttcgacattctgatcttaccccttaaaatatactggttgttaaaaattctccctcaacttttacatttacaaaaatttttcttattaggtttcgtttcgttattccgtttaaatgcatacgtgtcttggtaaattaataattttttcccataaactttggcaactatcaaatcatacccctctaaataaaaatgagaatattcaacatttttttagtaaatcttaaaatattaatttagatcttaaaaaaattattttgaatgattaataaaattaaagaaataaaattttaaaattaattaagtgatttaaaaaatccatttagatataaaaacactattaaaaatttaatttttgtaaaaactaaggtgacgtttggtaatacttttttaattagttttctgtttttaaaagtggaaaagtagaaatatttttcaaaaacatgttc

SEQ ID NO: 43836 - DNA, 2454 bp, Cannabis sativa
ggggagaaaaatttctaattagccattatttaatatatacaaaggtttgttgagtagactttaactagacctaattatccctttatattttatggaaattttagaatgtactctttttaaaaaaaaatgtatatacttttatttattttgatatctggataaattttttaatttaatttcttttatattcgtgtatataggttgtagtttacaatattttgagatattcgaaacaatttaacatgtcaaaaatatgattcaaacagtcttctgcacgtgtgattcttttattttatacgcgtgtgaaataaattatttgaacattgtatgttgtaaattattcaaaatttattaaaattttgcagaatatcttaaataactataacgtatacaaccataaaaaaatttaggctaaaaatttctttcaaatgtcgaaataaatagaaatacattgataaactcttcttaggaacatggattgtagagtagggagaagttgaaaaatacacctcactctacaagaattacaaaaattagggatctgccggtaataagagtaaattcgaccgatattagtgattaccttcttagaagcgtcgctggcgaagacggagcacttcacggacaggcgaaggttgagtggccggaggtggtttatgaattttcaatgaggggaaaaaatggaaagagaaacaaaatgagaaaaccaggggcggaagggtttatatagaggaatattactagcggaggtccgccagtaataaaggtctccgctggtaatataataaatttattttaatattttatttgtgagcggcgaatctccactagtaaagatctgccgctacaaataatttgaataaataggcaaaaaatttctagcattaaaccactctattaatactggcgcgatattaattaattatccaccagtaataatcattttaatatatatttttaattttttatatttattttaaaactaataatggcgggctccctaaatccgccagtaataacctcagtattaggggcggaccttccccgccagtaataggtccgcccctattaacaaaaaatgttgtagtgtctttttttatacattaactaaatttatttgtaaataaaatttaattcaaatataattctttttattagtattgtacttaaattattctcacccactcatataactaacatataatttcaaacataatagagttgtgttctttgtagatagatgtgtaggcttgaggaaaaattggggtaagattttgattagagaatgatgaaaactatcataatatgatagaggtaaaattggtaaaattatttaacaaaaaaagtaaaaataataaattttgaaagagaaaataaaattaaaaatattaaattaaaagaagtatatagtataatttcttctaaataattatatttgtaaagaaaataattaagggtttggtagatgattaggtacgaaaacgaaaactaccatataaatatatttatatagagagagataataaagataaatgaaaaaacaaagaataatttacaaaaatggaaaagaaaaaaaaaagaacaaaacatagaattagataagataagatataattaatgtattatttagtattttagttatacatatgacttttttgaattttaattaagtttaagattttaagaaagttttgagaatcagaaaggattgtttcaatattataatttgcaaatatatagagacatttttagagggaccaagtcaggagccacttcattaaggaaaacaagtcaccatccactaataaaattataacctttcttttcttaaattttttagttttttttttaagaaattatttttaattttgtttcaatggactttttttatcaacacacatgctatgctacgttataattaatattatagataattacataaaatattactttttataaattttttacatttttattatgttcaaatatttttttatattaataaaaataatacaaaaatacataaaaatacataaaaataacaaaaaaataatattaaaacactatacaaaataacatactaataacgaaaatcaacaacaaaataacacgagtacaacatataagtacattaaaagacttcattttttgtatacaaaatcataaaaagtataaaaaatatttaaaatttttgtagaactgtatttttgtaatttttttttattgttgtatatttatgaaataatcccttaatattatcatctacatatatgtatagatgggtcaatgcttaagagcccatgggtctgttgcaaagtttgggctttttatttcgaaatgataacgtgtagcaaccaaaaaatccaactgttttcaaaaataccggcccaactttatttacagaaaaatcacacaatttcaaacccgaccctcttttttaaagtttatcatttt

SEQ ID NO: 43837 - DNA, 2138 bp, Cannabis sativa
attatttgtagcttcaaggagtgctaggatggttagtgctttatctagaactcgactacaagatggttatgtttcctatccatgggagagaaggatgcaggagttactatcggttcccaactctagctccttcttttctcttcttcttcttcccaaagcttctgatcgagttgcttctcgctacaatgaccttgaggacactcttgccagggcaaatgcttggcttaatgcttctcaggcctctggagtccctgttgtcttcatgaacatacagaccgaatccctcctcactaaggtaaaacttcatcaacgcattaatccacatactatgaatcatttcattttattgtcaccatgtatcaaaactcacttgttcaaacgagcattcattccaaaatatagaaaaactaaaagagattgggttcaaagttagtgcttgggaaaatcctgaatggtatcttaagtaggctaaggctaataataagtgccaatgtaacagatatcaggagagacggcttcttccactgtgaatgcagggtcattatccgatctggcgacccttgctaatgcaagtttatacggttttgaggattaccatggggttgacataggtgttgttcgagctgttcgtctatggtatgcccccttaggaggagaaatcgccattgaaataaagatacaagaagacgataccaaacttggatttgcaatcagccgcactgaagaggtattatatatattctatacaatattcttttcatacaactcatgagtacagagtataccaaatcattgtcttgctcatttcatcatctttttgtgattgataacagggatttatttacgtgtcatcagtcatggaaggcaatgagaacgtaccctcaagccgatcagggctgagagatttatacagagaaggagtggagacatctaggctgctggtcgtgtcaagagtatccaaccaaaaggtccttccttggatggtttcatcaacaggagcaatgcgatgctttgatacggtctcactcagccaaaagctgtcattacatcgacacgccaaggttcctatcttcatacatgtcttcttatgggacagggcattagtatcagctgcagctgcagctgcaagcataaaccagacccggctaagagctccatcttcaccaccacccgccatgccattaccccctgaggttcaactagtgcgccagccaagcgacaggcaagtactacctttgccttctgatactcaagatggtggtggagccagtagtaataggactactgagcaaagactcattcgtgacacagccggggagctctcgtttaggttccatgattttgctctctctagcaactgggtttgatattaattattgagtactgtcttctctattttattatttttgattgttttggatggagggaatttttattagtcaagattgttcatgtgttatagagagtttagaaataaaaggttagcaatgaaaagtagatgttaagtcatggcctggtcctattttcatgtggtttgtatatttaagaaacatgtaaaagaatattttgcctcacaaaatatgaaaaatacatattacttttaattaagcggactaattatcatttaattattgctcgaaaataagtgttcaaatatttataacaacaggatatgttttcaagatttgtgttctcctttgtgagtagataaaaatctcaactatattcttttgatctcattaatatgctcaaaataattttaggatcgaattgtcactgaagttactaaaaatatcattcaagaatatcgcattttatttatattgagtaattattcaaatttgattggaatcaaagatattctaataataatggtataagcattgttattcggtattttaatgtatttgtaagtgtttagtgatttcttatattatttattaaattaaaatgtgtgaaaactaatattattatatttatagcacatcacttcttatattatttattaaattaaaatgtgtaaaaactaatattattatatttatagcacaccacttcttataatgcttgacatttgtgcaataagattagattattctgtgggctacatgtattttggagaaattaaagaatatttt

SEQ ID NO: 43838 - DNA, 3210 bp, Cannabis sativa
gtcaagcaagcaacttattaaaagttggagacaatctatgcgaataagtggactagagcgcatgtcttcatttgtttgaacaacacatgtaatcagtgttcaaacaaaacatgcatgaactcctcaagtacaattagttctggcctaaataatctataaaacagtagcacacacctttttttctgaagaatttaatcaacacgttcctactaaaaaaatatactactgacaagatgattgtaaaaataaatcaagtgatcgctcaaaatgttcaacaaaaacatcaaatttagaacagtgaaaattcataactttcttcctgcaatactctttccctcattcccatatgaggctcccaaaaacagtagcatgctagaataactaatgacaatcatgaggaattggagaaggggggaaagagtggaagatgcatttacactaattcttttgcgaaggttatctcacaaagaaagcaaacacaaaaagaactagagatatacgagtcaaaatgtaatgaaatttacaaaaggggatgaaaaaatcataccacatttatgaaattctgaataaagcaactaagacacatacagttcctgtatatagaactgtttggattcacgtaatcttcaaaatcgtccacattcaagcagcaacaaacagaacccattatgccagcttcacactactcaaaatccaacacaacaattcttcaactcattgaaagaaaacaaacgcggtcaaactattaatccaacattcctctaaaacagcttaatactcctttcaaagaaggagagaggacccaaagctcgcagaagtagcctccacgaacaagtaccctccctcttccctcctctgaaatgccctttaagattgaggccgattcctttcttcacctgtatgcagaacacaacaacattaaacaaccgcgatcaaattcccaataacaaacaccaaaatgctctttcttcaacaaactcgtaaccaaattaactataacgtatgccacatgcacccaagctaattgtttgactgaaatagatagctaaacacttcagattatacaactaactcaaaattatatattaaatatccagcaaataattgagtacttatacaaaagttgccatgcagttaattgttccattgggttttttatttttgttcattttttttaaaataaaaaatagaaagtaaagaattttgacaaacttatcaccatttaagcctttgaaagagatcatccatacccacaacctccccaaaccccctgcaattttctctttgtcataaaaaggaacactatagttcggcccatatggaaatcaggagaaattatttccgttaaagctaagggaaaaagaaatacggatactcagcccatagaaaaatatactactcatttagaatatagtgcaagtaacaaaacgttttcataaatgttagaccaataaaacaaacacccattctttccagctaaaaacaaataacatgcgtttcagaagaagaaaaaattaacatgaacaaggtaaaaaagataatcgatgatcaattttaccaaaaccccatgtataaatcaatcatcaaaacaaaaagccgtactaaatcgatcaaacccgatataccctttgaagaaaaaaaaatatatatcaatttcgcagcaaagttatcaaattctggtcaaatcaaaaggtcaacagtacatgagaaatacacacatacatatatatataaaaatataaaatagataaatatatttatatacagagagataagagaagaaaagagaaagtacctagatgaaggtgatcgatcaggggagggaaagagttgtgaataaaagaaggtatgaaataggattggggaagtcttggaattgagaaaagaagattgtgaaaatggtattctaaaaatggttttggggatttggattctgaggcgacaaaagctatgaatgggcgcaactaaagctcgcctcaccttccctgcgtttctctttgccggtgggtgcacttgcaaagaaagaatctatatattatataatccccttttttacttttattattattattattattattttcatctataacaataattctaataatttcttttatatatcctatcgggaatgattttaatataaaattatttttttaaaaaaaaaagtaattttaatacaaaattcaaatatcttacaaaagaaagcaattttaatacaaaattcaaatatcatattttcttttctgaagaaaaacaaaaaaaaaaactattgaatgtatggtgtagttagttggatgattttcgttaaattccttatttgattgccttttggagtttgagttctcgtggtagcgcttatcgtgggccttaaaaatggtgctcatttagaagtaacaagtatttgtgccctggatattgcttgagagggatttggttggtaactaccttagggaaagtgcataagctacaattgactccttagtggtctctgaaattgctattaagctaaaaaagttaagaataagatgtgcaccacctgatcctttttgataaaaaaaaatacttaattttttatttaattcatatcattgttgtataaaattatttgtgttatgatttaaatctttttttaaaaaaacatacccagtttccagattgattagtttagaatttagacatgagaatagctactctcaacctcctagtttaaccttctcgtcctaaaatacatgccgaaatattttttttaatttttttatggcgatgttcgttatagttatatatggtattatcatactttcacattgtaacatggtatcagagctaaaataaactctaacgggtatcctattcaaattcaataagcgatccaaaaaaaaaagtcaaaagaattatttgtgatttggtgattatgagtaaaaagagtttttgcaagctaaaagtatcacttgtgatagagtcgtctaagattagtgagcaaaaaagataataatatatattagatgcatgtattactattctaattgctaattaattttgagatggaaactcatgcatcttactatacaccaaacctcatcataatttatttatcacactttcactttctaacatgtatttcagtttaccaccactcatgttcaaaaattttaaatatatttttgagcactgtaaacaattcataattgtaaattttatttttgacat

SEQ ID NO: 43839 - DNA, 2117 bp, Cannabis sativa
gtacaatgtgattctaaaacttaagcaaagactttagtttagtcaacagtccaacatagagcctcaactcaactaaactcaatcaattatcaatgaaatttcaagaggattatatataagatatatatttattctctaacagtcaactgaaagtttcaattactctttaaactgattgatcaattgcacaacaactaggcttgaattttatgatctgaaatgttaggatcctctaatataaagttagtacaattgatcaaaagaaatacatgacttagaattctcaactgtatatatatgatttacattaatatctaagaaaatgagcaccaaaatgtatatacatatatataatataaatttatgtagtacaacaaggatgttatgctaaatccttcgtttacgcatccaaaaaaatgatttactctattttatttttcaaatgtctaccgaaatctcatttaaagaagtatatgtgtagtactgtagtggttaataatttataaataaattgcattaatattaataataataataataataatacaatcaactaataaaaaaaactgattgatgaataaaaaaaagttaagtacagtcattagatgtcaatttaagtagttcataattaaccaatccatggatttaaaagtttattaaatattatgttcaatgaggaaacatctagcaaaaaatattttccataaacttgatgaactcattgaaatctattttcccatctctatttgcatcacaagacttaatcattttgttgcagttatcaatctcagaaccttccttcaatcccaatatgcagagcactctcttcaattccatggcatcaatgaaaccatctttgttttgatcaaacacatcaaaagcttgtttgatttcctccaaactaggctcttcatcttcaaacaaccccgaaagctcatcagagccgaaagagttcttaagctcctcactctcggggctacaaacaagtcccaaactctccatcaccgtctccaaatcttctctgttcaatttctcatcacccttttccgcgagagtgaggagcttaagctcatcatgatccaactcggagttgaagttttcttcaacccgagatttggagttttcaagacaagattttgactcaaaaagagacttcaatcttggcaaaacatcagatataatttgttcccaatcagggattaacatcaagaaaaattgaacaagagcaaaaattggaaaatattgagtatttacatctgatgatgatgatattgctgttgttgtcttttccattgtaatagagttgtataagttagaaaccatggtaatgatcaaaatgtttcccaaaggacctgaaaaaaaaggtggtaaaacacaaaaatctatatggaaaatctaaaatattgtaattttattagtacagttggttgatgaacatgaaaggtgggaaatttgtgtatatataggctgtttttatgagattattgaagtgttaaggaatcaaaaaaaatggtcagctttgaaagacttggtggtttgggaggaaaggtctaagaagagaaggaaatttcttgtgtatttcctcaaagagaattagccccaaaatattattatatcaaatgaaaaaacaagtgtctctttcaagagaaaatatatattattttggggacactttttttttttgtcttgtttgtttggatttgccacgagtatgccgtttcgatggtttgacaagttaattcattgaaattatttattattcttattttattaaaataatttatgctataaatatttaaatttaatttttaatagtaataataattaagttatatttttaaaatttctataaatacttacctttaattgtcaaataaatggtatatgattagttcaagtcattaaatttatattttttatttaaaaattaatttaaatctatcaataaaaaaatacacgtgaataataacttgatacttaattgtcaggtagttaagtaaatttcaaaaatataatttagatattattatcataaaaaaattaaatttagataaaatatttatcaacaattacaagaaaaatttaagtatttgcatcataaattactcttattatta

SEQ ID NO: 43840 - DNA, 3927 bp, Cannabis sativa
gggggggggggggggggaagcctttcaagtactttaagatgtggaaatatcatccaaagtatgatgatcaccttagagaagtgtgaaatttgggaattactggtagcaaaatgtttcaggtagtcttcaaattgaaacaattcaaaagtagattgaaaatgataaataaagatggttactctgatttacagaaacaagttgctgaggccaaaatagacttggatgttattcagaatcagttgcaacaccagcctctagacccctccctacaccttcaggaaaaagcaactcgagagggattggtgaaagtgcagagtgattacacttcattcttacagcaaaaggccaaactcgattggatacaaaatggatatgctaatactgctctatttcatgcttgcattaagcaaagattgaggcaaaatcgcattctctctattgagaatcaagatggcagcaaggttaatgatccaaacctcatcactgaagcttttctggacttctacaagggccttcttggtactaatcgggagcatagaagacaagtagataggaacatcttaaatagaggtcctatggtgacatcggttcaagcagacagactgttgcaagaattctcaaatgatgatgtgaagaaggctgttttcagcatacctgggaacaaatctcctggccctgatgacttctccagcagcttcttccaagataattgggagattattggggatgatatatgtggagctgtcctttccttcttggaatcaggtaacatacttaaagaaatacactctaccataatgaccttggtgcctaagattaagtgtcctaattcgtttaaagatttaagaccaattgcttgttgcaatgtgatttacaagattgcaactaagttattgagttctagaatcaataacatcctccctgaaataatatcacattctcaaggtggttttattaaagggaggtttatatgacataatattctaatttgtcaagacttggtgagacattatggtagaaaggccaacaaactcagttgcatgatcaaactggatctccaaaaagcctatgatacaattgagtggagtttcctagaagagatgctaacatgtttaaacttccctaagaagttcatacaattggtaatgaactgtgttacaactcccaagttttctctgatgtttaatggaacattacatgccttttttgaagccaagagggggattagacagggggatcctatgtctcccttgctgtttgtattgggcatggagtacttatctagacttacgaggaaagttggggaaaaagaggacttccaattccatgatagatgctctgaacttaaactcaaccatcatgcatttgcagatgatgttcttttattttgtcatggagatttcaagagcatactctacatgttgcaggtgctcaaaactttctctcttacatctggactgcatccaaatgcaagtaaaactgcaatatattgcagtaatatgcaacttgggttgtgaatcatatcatgcagcttttaggtttcataaggcaagatatgcctttcacttacctgggaatccccatttgtgggaaaaagatatctggaaaagaatgtgaattgctagctgaaagaatgtttgctagaattaaaagttagagttccaggaatctctcctttactgggagaatcactctaataaactctgttttaattgctatacatgcttattggagtcaaatgatgatcttgccaaagaaagtactaagatccattgaagccatctgtagagcttttctttggaaaggtcaagcaatgttccagggagtagggtcagtagcttggaataacatttgtcagcctaaagcctcaggtggtttgggaatcaagaacttggagcaatggaataaagctgccatttgcaaatatggctaagatggtttatagtgtgtacattaagaatcaagagtggtggagctactctgcttcagtacattctagctggtactggaagaagatggtagccctcaaagatcagatcagagttttagtggatcctgaagcttttcagagataaagatacactatttcttcaggttacaaactatttatcccttccccaatctgactgaactggtgtagggaagtttgggcaaggctaaacaccccaaacacagtgtaatcacatggttggccatgttcaatagactgaaaacacaggacaggttgcttagatttggagtccaggtgaatggcacttgctacctttgtgaacttcaacctgaaaattgtcaacatatgttttttaaatgcaaagttgcaggttattgcttgctggaagtgaagaagtggttgaattggcatgcccaaaccaataacctccaacagctgatcagatggatcgggaaagccaaaatttcgaagttcaaaaagagtgttttggctgctgcaacagcagggctggtttacaacctatgaaaatctcgaaatgattcaatttggcaaaaaacagtggtcaatcctgaaagaataattgaagaaacaaaatggacttttaaaattcggattgatatgttcatgtctcgaaaagtaagagtagtgatagagattggttcttgccttataatataatgcaaatgtaattgcttgtatagctttctaattgattgtatatagaatttgacccttcaatgggtgcatataggttgtaaaaaaaaatcttgtttgtgcaatacaattcattaatttatcaaaaaaaaaaaatcaatttattttgaaaggaaatttttttaaaaatattaattcttattttaaaaaatacaaaagaaaaaaaataattttaccaaaacattttaacttttctaattataaaaacaaaaaacagttcaaatatgcattaccaaaaacaacctaagttaattacaaaattgtcatcaatgcctctaaagtacaatacgactttatttgctgcaggggaaagcggaccgaccaaaattaagcgagttgtaacgctactattccaaatgttggtatcaacttttgtcatcaatgcctaaagtgccttacatttgtgaagacaagcgatacaccatacttgttgcagcagtctatggcatccccatctctgatgctccccccaggctcagcaataacaccaattccattctcacacgcttcttccacaacatctttccaagctgatccaaaaaacaacaacaaatatcatttttctcagtaagggtggcaacttacatttttgtcctatcatgatttacttactataactatatctggttttaagtttagcactaagatcaatcattacttaaatcttcccaatcaatctaaacacgttgatgaaaagaatgtgtcattaccaaatgggaagaaagcatcactagccaaagctggtcccttgacctcatctcctgctttcttcaaagctatccttaaactctcccgacgatttggctgcgcgcttcccattcccagcatacagttgttctgcccaatgacaaaaatacaaaaatttgtgaaggattgaaaatgatttaaacaattggtgactagcaattaattagaactatttacttctcttcgtattctctcacttctttttcttttcctttttttaatcaaaacaaaatgctttggaactcatctttatcatccctaaaatctcggtccacatagaggaaagtatttcattttctcttgttcggatccaaacgaaaagatgagaaatcttttttttttaaaaaaaaaaataaaaatagaaattaaatattgtgatgaccggagttggtgactcgcgtgatgaccagagttgaattgatctggggctgggcggagatggagggtcgggttagggggggtcagagatggctgggagttagggctgggttttctgtagaaaaatgaagaagaaa

SEQ ID NO: 43841 - DNA, 3702 bp, Cannabis sativa
  modified_base (1996)..(1997): a, c, t, g, unknown or other
cttatatataaaaatatttatacatttaattaattaaagtgtaaaaataagtatttttaccatggataatactcaattaataatacataagaagtccaataaaacactaaatattattagacaaataaattataattaaaaacaataataggtgtctattaataaataaaagttgctaataaaaattgatatacttgaattttatttaccttgtcttgatattgcaatgtaaattaataacaatgatcatttaataatcaaatcactaattgctttcctctctattcacaaaatgtaaataaaaatggttcgcaaagtcttataattagatcatgcgttccaataataataatagttgtgttgtgtttgtctttctctctatgcatcaagttcttcacaatgaaacattggtgcattgataggaaacgtgtttcccaagtcaccaaaaagaatgtcatctccctctgtatagctacaagaatcttggcaatcaaagtatgtttgtatgtcctccgggaagctccggccgcgtggtggctcagtctcggacgaagttgatgatgggcaatccactcccaaattagttctctcaagcatttctttgaacttagtggattgaagtaaaagccctaaggccgacgaaggcgcccccgcgcaaccactattacatgtcggcgcccccaccgcaaccaaatcatcaacactacttgagctcggtaaccctagtccttcattagggttagggtttggattacttattaggtcttcattagggtttggttggaaaatattgctagggacgttatcttgagttgttggacgtaaccactttatgtaacggcttaaatcaaaatttgtaacggcgttaagtccacggtactcaattgctgccatgtcataagctgtggctgcttcttcttgtgtagctgtgtaaaaaaacaatttatataataataataataataataataataataattcatgcaaaaaatgtaatgaaaacgattgatattgaagaatttaattttgctgtaaaacattggtggagatttatatagaaattgatttattattaatttcaaaaagattgaatgtgagagtataaatagctgaccaagcagttgggggtttggtcatctacatcccaactaactttgattcgattgcgtatatatataaatatatagttttatatatattttccatatcacatgacctacgtatataattactaattagctaaaactatttcttttgcttttttaattaatattattatatagattattatataaattaattttgtaggaccacattaattgtatgtattctttaatgtaacaaaagtactttatcgttggatgttaacacagcaaatgcaatttgggagatattaatgatcattatttgttgacaagtgtcaaaaccaaaggcaaaacttttttcaaagttttggttttaatataaagaagccatgcactaacagttgactgattaatcttgtccataagtttatattagtgaaagtgattcttccttttaataaaataaaactatataaaagtctctatatatgtatagttggttaacttattgtagatcggtttcattgatctatatatataattagacccacaatgactatatattggatcattatttattattaataaggaggcagggccgattcaagtagttttatttgagagttgaacgaaaattaaaaattaaacctttcgaattatatgtatgtattgggatcatgaatttttataatatttttgtttttatttttgtaagtacatatttgttgttatgaataatatttattaagtatatgtataaaaaaacatttattatattatatatgtaagaaaatgataaaagaaaatttaaatgactttttaatataaggaactaatggttcaaacaatctaatatttggagtaaatcgaataaagttaataacaaaatgatatatatatatatttatatnnatatatatatatatatgagaatgagaacaacaatgtcataaattatacctttaggggctcgctggctcgttgtaggtggcataaaaatcgtattgtattaaataataaataacattatatttaaataaaataatatattgtatcaattatcatgactaaattttttaatacaatataagttgtattatttaatgcataacaaatgattcatattagcttgtattataatatttacaaaagatccagagtcaactccaatctctaacccagacccgggacccgaacctaggacctggacccagacttggactaggacttgggatcgagattcagatctggacccgaggccgggatctggatctggacccaagacctaggacctaggacccgaatccaatcccggacccagactcgaactcgaactcaaacccgggactcgaacacggaccaagatccagaattggatctggacccgagacccgaacccgatccgtagtcagtgtttggattgaatttattgaaaatatattattactttacacaatctattaatataagtcaatactattgtattaaataatattaatacaatacaatacggcatacgaaatgagcccatagtaatataagagtagtatacttattcttaatttttacttttaatatatatatgaaatatctcccaccttttattttagttagcaggcctctcaagtttccacaattctaattgtggttcaagaatttcaagaaatttaatttttacatttcattttaattaaagaaattcaaaacataaaacttttttttttaaaaaaaacatttttttggagtttagggtttataagaaatttaaataggtttattttttatttttttttatttacatattattatttttaattatattcctcaatatttttttaaggaataattataactcagttacatacgttttgctatgatgatatacaataattaacctatctaataaattatttccttagggtatagttatgaaattattttttaggatcataggtaaatttatgctttatgatagaagtaaatcagacataaattaatttaggtaaatgtatgcttaaataacagacataaactaatttcccttttatttatgtacgattattagatagtcctaattttagtttgttggtttgtgaaatcattcttatttttgataaatacaaaaatatatatatattatatttataaataaattttgtcattgataataaataaatagaagtagttacgtaccataggttcctaagtaaagatacttatttccaaatactcttccaattcgtgcttcccatcttccattatggtggtgtctacacatgtgtagtcatgtagtgtaccaaaatcaatatctattattgattatacaaagtatacatatacatatatacgtaactcaaacttactataaatgtatacatattttattttattttgagcaaaatgacattgtacaccctttctatatattttatctactttcagccactaattaaattaataattggtcatctagagtagatatgaaaaatttaaatcaaaattgaaagaaaaaatataaaattgaccaatcaattaatttatttgtgaagcattagatagattatataatatttgtaacttatacatttcatcgagctggtttgcccgagaggttaag

SEQ ID NO: 43842 - DNA, 3054 bp, Cannabis sativa
aggtaatgaaataaaatagaatggaaaggatatatttttcattctattcctttgtttgattgtattttaaagtattagaattacattccaatagaacattctttctaccattttgatagaatgaatatttcattttatcaaattttttatgcattttaaattttattccattctattcctattattattctaacgccaccttaattaaattttatctttgcctagtttttaattttgtcccaagccttatataaaatagagacggctatcaaaggataaatacacatatacaaactaaattgaagcaaaataaatttatttatatttgttcttcttcttcctctagaaactaaattagttttcacttttttgcttgcaacaaagcccaatttctccccaactctatcattgccattaaaaataactctcgactaataatgaaggtaatacaatacagtataaccttcatattttatatcaattttcatataagtccatacttggaagataatgtagtaattctgatatgaattaaatgcataatcaagttccatgtaattggtgtgagtgtgtgttcgtgattaaactccattgaaacctggccagaggaaaattctatagagcaacaataattagattcagaccttcatatacgagttgagcctaaaaccttgatattaataaaaccagcaacattaaaaacaactcaagaacataaacatgagaaagaatttctcactctgaatatgaaaatataccaccacaaggccaaaccataaactgtcatatataacaagttttaaaaaccataaaccatactaaatcataaaagcagtttgtttcatagtaataaaagccataaacataacaataaaatgcattccattcataacagctataaacagatttaaaagccaccacgaagacggagaacaaggtgaagagtagactccttctgaatgttgtaatcagccaaagtcctaccatcttccaactgtttaccagcaaaaatcaacctctgctggtctggtgggataccctctttgtcctgaattttcgcctttacattgtctatggtatccgaactctccacctccaaagttatggtctttccggtcaaggtcttaacaaagatctgcataccacccctcagacgcaacacgaggtgaagagtagactccttctggatgttgtaatctgcaagagtccttccatcctcgagttgcttaccggcgaagataagtctttgctggtctggtgggatgccctctttgtcctgaattttcgcctttacattgtctattgtatccgagctttctacctccaaagtgatggtctttccagttaaggtcttcacaaagatctgcatgccacccctcagacgcagcaccaaatgaagggtcgactccttttggatgttgtaatcagctaaagtcctgccatcttccaattgcttaccggcaaagataagtctctgctggtctggtgggattccttccttgtcttgaattttcgcctttacattgtcaattgtatccgagctttctacctcaagggtaatggtctttcctgtaagggtcttcacaaatatttgcataccgccacgaagacgaagcacgagatgaagtgtggactccttctgaatgttgtaatcagccaaagtccttccatcctcaagttgcttaccggcaaagataagtctctgctggtctggtgggataccttccttatcttggatcttagccttgacattgtcaatggtatcagaactctcaacctcgagagtgatggtctttcctgtaagggtcttcacaaatatttgcattccacccctcaaacgcagcacgaggtgaagggttgactccttctgaatattgtaatcagccaaagtccttccatcttccaattgcttcccagcaaaaatcaacctctgttgatctgggggaatcccctccttgtcttggatcttagccttaacattgtctatggtatcagaactctccacctcaagagtgatggtcttaccagttaaggttttcacaaagatttgcatctaaaattacacaattaaaacaaaatctcatcagaatttatcccccaaaaaaaataatttcagacaaaacttctttagaatttaaaagaaaaaaaaaacaatcttgcctgattaaataataaaaccctaaaattgtatgaaacccaatattattgatacatttcgcagatgaaaaaagatgtataattttccaaaaattattcggtaaaatttaaaaaattaaatacaaacaggtcgagaattaaatactctaaaaaattcaaagatacgatacaagttaaattagcagatgaacaaaaagtatattacttttcgaaaaattattcggtagatttaaaaataagacgaaaattgaaaaccctaaagaagattcaattatataaaaaaaaacatatatatatatatataattccacaaaaagaagattcaaagatgcgagtgctctatgatcagaagcaattatgaacaaggaagcaagaatttgattacctttaatgagtgtatgaagagaagggattagggttcttcttgggaattttgatatgaagcagagattattgtgagaatcgcttagaaagtagtaatgaatagaaatgaaggataagagggtatttatatggtgagggcaaaacgaaacccattgattaggatttccaattctattacgccacctattaacatgacgtgccgtacactccacagcttccacttacacacaaaatttggaatattaagtttgttaaacgttctgctaatcgaaccgcacatgtgattgcacgtcagcagggccagccctgggcataggcggtctaggcctgtgcctagggcccacctagtccaggggcctaaaaaaaaattttgctcttttaaaattacacaatttttttgctaattttcaaaaataccatttttttctaaataagggcccaaaaaataatttttaccctatagcccactatatttcagggccggccctgtcgactacaaaggtaacaaaaatt

SEQ ID NO: 43843 - DNA, 1321 bp, Cannabis sativa
tattttcttagttcactgaatgattttgtagctgtactaattgagtagatgaacaacctttgacggagaaaccaaagtagaaatctttatgaataagttttgtagttaaaatttatgaccctttttagactcattcaagtctagaaaaatcctagtgagaaaaagacatgggttagctttagatttggtaaagaaatccaccaataagattttactcttgttttatgttaaagttttgatttttattttgttttagtgtcacccatataaatttgagaagtggggttttctcagaatttgttctactccaaaaaaaaggcttaaatttgttgattttattaagggttttgtttcttcaggttttgatcttgataaagatggtgggaagtgttgaaacaaggaaaagttatgtttactcaaatggggtttctattcagaagaatcagaacatttgtaatttggaagagaaacttgatgaactaagaaccattttaaacaaggctgatggtgatcccattaggattgttggtgttggggctggggcttgggggagtgtttttgctgctttgatgcaagatagctatggtcaatttcgggataaggttcagattaggatatggagaagagcagggagagctgttgatagagcaacagctgaacaccttttcgaggtgatcaactcgagggaagatgttcttaggaggttaattcgtcgttgtgcttacctaaaatacgtcgaggctaggctcggggatcgaactctttatgcagatgagattttgaaagatggattttgcttgaacatgattgaaacaccactttgtcctttgaaagttgtcacaaacttgcaggaggctgtttgggatgctgacattgttgtaaatggcttgccttcaaccgaaacgaaggaggtttttgaagagattagtaagtattggaaggagaggattacagttcctatcattatctctttggctaaagggattgaggctaaagttgaacctgttccacatctaataactcccacacaaatgattaaatgcgcaagtaagagttcttgttctttcttattatagttaataaatagctcattgttctctttgttgttcttggattttacttgcttgattatgaaaacagataagaacttcaggtttttgctaggactaacacaaaagattgaagatgatctattgaactcggttatatccaactaacatgtttatgacactaacatgtaagcatgatatatttgatccatgaaagagttttttgttatgacattgctgagaaatttgttaatgttgtttaactatataga

SEQ ID NO: 43844 - DNA, 1645 bp, Cannabis sativa
caagtatgccaccatccttggccccttttcttgacactcttctcgtacctggaaaaccaccaattgtgagactaaaaattctcaggcgggtaatttttcaattctttagccaatctcaaactcgtcaatattgctttatattctgctttgttatttcaggcctcgaaatggaatcttatagtacaatacatcttatgcccttcgggagccgtcattaataccccggctcctgttccattgtcattcggccccatctacatgtaattcccatgtagcttcttctccttgagagatcaactccttcaattatgcctggcatgtgcccttcttcacttgggtgatacgtgaactcagccatgaagtcatttttattatcatttttcttctcttgtgtttttgttttaactaatataacttgaattgtattattggggttaagaaaaaatagataaaagtcaatactctactagaattattggggttaaagacaataaaagaagagtcgtccttattacaataatattatttgttgtatgggtttttgtcataaataaagtcatatacatgcctttaacccgtacttggttgtttaccagcttgttttatggttcagtgaggtgtcgctgaaatttcgtggcttcatgttctaactctatattaattatggagaaatgttaaaagatattattagtacttagtattttttttatgtgttaatatcgttattgattcaattaaatatttaatctcatataatttaaaactaattaagatttttccttcctgaattttgacacatactaaataatgttccgaaaatagtaaaattgtaaaatgtgaaatagtatcactaactaattctaaaataacatatttaaagatactatctacctctaatacttaataacaataatagtaatgctagcattaatctactgtctttaatcacgtcttgtgttataaatttaataataatgcaataaagaatgtttagtctattctcattaaatactccaactgcttcttaagtcaaaataatcaacctttcactctctccaatgtttactacttaattggacaatccatgtgtggtaggtatatatgtgtgtttactttgactcaagaaagtaattagattagatttttaaccataacaaaatagtgtcccatatttttttttattatattaatttaatttttcaattttgttgaccctactaaaataatttattgaaaattctcattcactttctctttttctcttcaattattttataacatgttatcagcacgagtctctaccaaattctaaaataaatattatgttaaagttcttgaattgttctaaaatcacaatacacagtatatatttatatatgtactcctctgactgaaacaatttcaaaaatctattttttttctttaatttatatacctatatattatatatgtatgtatatgttttcatatactcttattatttatctataatatgatagagaatatataaaaattatacatatatccagaagattctgcattcttgataaaatcttacatatatcttgaagattatacaaaaataatattcatcatataactgactgaaatataataaaatggatgaatacatattcatatatat

SEQ ID NO: 43845 - DNA, 2665 bp, Cannabis sativa
  modified_base (653)..(660): a, c, t, g, unknown or other
  modified_base (2639)..(2639): a, c, t, g, unknown or other
ttggataatttgaacaagtcattgtaataagttaggaagaagaaagaagcggataacacactgacagaaggcgacaaggttgtgtcaatagactctctttgtacacgtggcggagagaagcaataaggtttatcctttccccactgctgacacgtagctactcagagccattacccattgtacacgtggaaaattattattggctgcagctgtagaaatggtgcgctgacgtggtacgtccttgtcagtaaagctcttcttcctttcctcctattagatgaccccaaccccaaacccaacccaaaaaaaaaaaaaagtgggtagtagtgatggcctaatcacttggtgacaagccttgattaaagtgctatctctagtttcgccactactttttccatggaattacgcttttgccactcttgtcttctaacgactttctactgcttagtaattttatcttttgtttcccaatattgcccttattttagctcttttttcagttaagaccccagttccttgtccgactttttctgttttttttttaaataaaaataattatttcttcatacttagtatgaggtgaactaataattaaagtttttttttcttaaaaaaagatgcccttctcctaattatttattattattattatnnnnnnnnttattattattattataaaagtttaagggttggttacaacttacaactacatttggtaccataaattgttattttattattggtggggaatgaggtttacctttgtgtggttgtttataattattagtgttaattttttaactggttaaaacgagttatggtacaatgaagtgttaaaaataataattagataaagttatagacacgtcatctgttagcgtaatcattttttcttctttttgttggttatttatttattaatatatttatgataaaaaataataataataatactaaccattttaaaatatgtgtattttatatctctaattgtacatcactaacacatggaatgacattctataaataactcacacgtaaattaatagtaagaggtaagaagatacgacaatttatgaactttttttctccatgatacatatacaattaattaaactattctaaaaaattaaactaaaactagaagatgcatcgtgattaagaattaataagtgttgttcaaaaagaagagaaagatgattaagactgattttaagtaaccaaaacaagttgattagattccaaaacagggtaaaggaaagtagcaaagcattagcataataacacctcgagaggttcctatcattggggttgagggggctctttacctactcttttgactatttgtccttctatggcaattcttcaaaagtattgggcatctaatgaaaaaaaaaaaaaaaagaactatgttttattatttatttcacaatgttttattattgagactttggatgtagtccttccaaaatatcaagaggaagggaggtagaaatttacttaaaagaggtgcaagagacatacctattggcaagccatagatgttttaaaaaggaaaaaaaaaaaatagtaagtagctttatatattttgatataaattttctacataatgtaattttacagaaatttgtataattgtacataataattaaataaatataattaatctaatgtgaataataattttgactaaagagatattgttaatccgataaattaataaggctagtctttgagattaatcaacgttaattcaagagagtagcaggactaactttcgaaagtagtcacgagtaatctattcgatatgcactcagcatgcagccacttgacatgctacaacttgtagtcacccggcatgttgtagtttgcagccactcgacatgctgcagccactcaacatgcaccactgggcatgcacccgacatgcaccactgtgcttgcactactcaacgtgtactcggcatgcacctgacatgcacaactcgacatgcacccgacatgcaccacataacatgcaccacacaatatgtactcgacatgcactcactcgacattcatgtgtgtatgcctgaacaagcttgcttgaatgcgtctcgacattatatacaacatttgaacattgcaatgagtcatcacacctctcaacaagatggccaatgcttagtgagttgtaaggaaagtaatcaaaaagacatcacacgcgagtacagtcacactatttgacacctgagtatggggagaggatgagtaatggaggcatctcgtctgtaaactctgatgttttgacaagcaatacacttcagccactactcgaaatccattcatcaattaaaaccttcctgtatacagtgttgtatagaggtgactcaggaccacggacctatatttcaaagctccaataaacttaagattattatcaatctcatcaatagaacaatctggtttattaatttcattatcactctactacaaatatagaattgcactgtttgacaatatagaagtatatttacagaattcttacttgtagtctattgatataatcaatataagtagttcgccctctaattattagtacataattagagtttgtcaacatattgttttaccctctaattatctcttgattctttatntaccattaattcaatgtgaatagtta

SEQ ID NO: 43846 - DNA, 1767 bp, Cannabis sativa
tatttttttatattaaatattaattagatgtataattttaataaataaatataaatatgtgtgaatttcattgaatcagatacttttacatatcaattaatatttaatctacacaagtgcgaattttaaacttttcaatcgacacaagtattagtatctacactttgcatattgaattgaatattttatgaacacccttagaacacaacattttcatatgtatgaatgtaccatcacttaccctttttccttttctcttccccacttttgcaaacaacattgggtcgaattatgaaaggcaatttcatactaacatcccaataatttaatgaattgggtcgaattataaaagcgtgcatatgctaaattgatctaataatgaaagcctgtaaaaactgatctttaacaagctcaaatcaaaattgtgggatatagactttcttactttttatatcccaaaaaaggaaaggaaaaaaaactgtctatttgaattttgacaataatcctactaatcctgttcatgtacattctaccttgaaacataaaaatacattccattgcaaatgcccataatgaaatcccaatttgagtggcaacaaaatcacacaaaaaggtcattttatcagccttagcaatgggatgaaactatgcttgatcatttcaagccaatcttgggcacaggctgaagtcaaaagtatggatgaactcgtaaaagtttttccagctctgcccataagaattcccatgtgttacattgaagttgaacactgtatgtttcaatttaggtttcggtttcccttaatgatgtccagttccacatctagcttccaccagtggaagattgtttcttttttctcttgtgcttgggcttcactgcatccttcaaagttttttctcctttagattgctgttcgggttgagctggatcaactgctaaagatccttgattaacaactgtaggaggttcctctagcttgatctcagatagggtatggtcttttttcgggtcctcttgtttcttattagttgtcgaccttcctgtttccacaattaacaaagttgagggaaaagaaagtaaggcaaatgtaatctgtgttttaaaatagaagaaaaaagctatgaagattttcatttgttaatgcccatatgcatttgatagtattgatgagacaatcaaaatatcagcagaacataccacgtgatgctagagatgcttttaacaattctggatcaacacccttcgagtaaggatccctgagaaaaagaagataattttaaaatagaactaaatcaacatcaatggttgcaaaggacatgaaagagctttaatgatagattaccattagccgcaactttcctagtgactactgccttcagaacatatatcatattatcactctaaaatacacataatgaagtaagaagctttgcttttatatgaaactggtttaattgaaaatttgtaaaataaggcttctgacaaactaataataaaaactaagtatagtattgggtaaaataggatttaatacatatgctcacacgcaataataaacaaaataattaagcacagattacacactttgaatgtaaaaaagaaaaaaaattgaaaaggtttaaagtgatcaaaactcctttagcttttcataataaatgattgtacatgtatcaattatactgttaggccttgggattagtatggtgggctagcatatattaaataaaagggtatttgagtctttattttgagggtaatgtttaggaggg

SEQ ID NO: 43847 - DNA, 2855 bp, Cannabis sativa
cctgcttatgaaggcagcaaacttacgcatattaggcataccatgagcaatcaaattcgagacatcctgccagtgttagtgtatattatgtattattgttgttaattgttagtttgacatggaagctacattttctactttatggatagcagaagctgccaaggaagaagaagatgctgaagatgatgatgatatggatggttttcaaagtgatgatgaagaagaagatgttgatggttctgacaaggaaatgggcttcgatggtgaggatggagaggaagctgatagtgtaaaactacaaaaattagctgctcgggtatgtaactgtattatcagttttaccttgattctctgatgtttattttccttgtatcaatcaaaacttgataccagttgaagtaaggtaagataattataaaagtaatgtccaataatcaaagagacaaacgtagaaccccaatcaaacatacataccatgcacttctctgcactcttcattgtatcagaatgatatctgcagcctacttctagaggaaggaaaagtttcttattttgatatagggtatgttttttctattattatcttatctgaaaatcatcgagggaaggaaaatgttccttggagcatctccattgggggttgcctattggagtggtcttgccacatatgcaatgtggtccaatttttaagagtaattttatgtgaagtgttgctcaatatagacaatggttacatgtcttttttttttaatttttatttattaaaaaaattatttttcacataaaaagtcattaattcaatatgatgtaggaccgtggtggacaaatttagagttgtcaactattggagtattttttttaagagaagatgacaaatcttatgtggatgagagataaaataaaaaataataatattttagaatgatgtgtgtattttgacaattataggtattgccccaatgggagatgctcttattatgtgttgtttgggtgttagtagttatatattgttgttgcatcaagtttctatcaggaaacccaaggtggaggaaactcctaattcgtgtttgttgggaattaaaatgaatatatgcctgttcttatgaagaaagtcttttttaaccttcttatttgtcatggaagaatttttggtggtttttctatggctgtcagttttaaatcttgtcatgaatattatataaatcgttgtaactttggtggtacaggcaaagtctttccgcccacaagatgaggatgatgatgactcagatgatgattacagtgatgatgaggatttgcaatctccacttgatgatgtggacccatttattttctttgtagattcagtcaaaggtatgtgaaagtattcttcattttaaagaatgaaagttgatttttttccgtttgtctgacatatctgatcttgtccctgtttcactgggttttactttttggcccgaattgtagatgtgcaagcatcagatccatcaaggttccagagccttttgcaaacactcgacttccattatcaggctattgcaaatggtgttgcccagcatgctgaacaaaggagagcagaaattgcaaaagaaaaactggagaaggcaacagctgcagctgctgccgcttcctaattcatgcattgaacgttagggtgtggctaaattttgtttattgtcacagttctttgtttattccattcatgaaacaaagcgtctttacctgtccattcagatattagttggtcctgatggatgtggttgccagtgagagcttctaacatttgaagtgcttgtggctttgtgtgattgagttaccggtaacatgtgaaatgagaaatcactagacaccgtaactgccacttcaagacccagggttcagcttggtttgtcaatagagttcggatgttctacggcagagcatgccatctcgatcggttttgtgttacccccttttttttctctcttttttctttccacctttttctcatttctcccttcccatcaggcaaggttagtcaatttatttgggttgagtcttctttctttctacacaggatgtattggtctaggaaccctttgatctgttttcagttgtcacaaccagggttcacttccatactggtttgttactagttcccattttatgagggcataaattagggtggctgatggatgtatttattaattttgggtctgagggtggcctacaatttttcacattttcatttctttaggactagttttattctcatctgtaatatttgttgatctgagttggattttgggggcttcattgcagatggcttctaagggtagcttgctgctattgtaaaacacttccatctttattctttatatatgtccgtgaattttattgggaagaaaatttaggggttttttttttgtcactttcgttcgaacttcgaacccttttcttcgttcaatttttgatgttttttaatatatgatttttttttttctgtacattggatcaaactttacgcatcgcatggcccttagtttttttttttttaattacatttaaggcacttttttttctgtaaaaaaaaaattatattttatgttatatttttacgatttttaatagaaacaagaccaaaataacaaaagaattacataaggatgaaaataacatttaaataatattaaaacaacaaataaaataaacaagattttgttagttactgtacggatacggattgcaattcatgatgtatggtaaccgtcggatgggcagttattttgatccaaaggctggggtttatgtaagggtttatgtagggttaaataaatggttaccggttactttttttgaaatttaaatttattaaa

SEQ ID NO: 43848 - DNA, 4471 bp, Cannabis sativa
tttttttttttttttctgttatacctcccttcatagtgacaaacaagtgtgaattttattgcagtcagcaaagaaggtgacggtggatcaaataaagactactctttctgaagattatatcgaatcaacagagcagacatatgatatataccttttaccacctggggaagacccggaatcttgccaatcatatttaaggatgcgtaataaagatggaaagtatagcctcatgtttgaggtttgtgttgattatagtttattctgtatcactgttggaaagcatgtgaaataagatttttttttagtgttaggtggataaattgtggataaatctcatataaccagatataaagtagttgggttgagcagactatagaaacacgcatgtaacatctaacatatatgctcaaggatgtatggaaataggaagtttgtggagcaatattttattcagaagaaactttataaagtgaatcttagaaatcattcaacctttgactttgtatacagccaccaacaaccctagtttcctagatctttgtagagagtggaaattgttgacgtattagatcttaatacttgttttcgattttgagtttttgttttgtccttgttttcgacttgaactttttgctaatgtttacccaccggtatattcttccgcgccacaagtgaggttctcaatacataacacggtggggggagtctaagaaaagtggcctctttcacttttttttaaaaaaacaagctgaataagttcattggcagcacaattataaaaatttacatcagtgtttaacacttagctacataattctaggtttgtgttaaatttaggattttacaagtataatgtggagattcatttttttattttaccatatgcacctccacatacttgtaaaatattagaggttgcttgtctgacatgattgatcatctttaccatgattgattcctggtatcccattgctcatgggtttatgttcttaaccaattctgcattgtatgtttccctttcaggaatgggtgacagacaatcctttcgtgatatcaccaagaataacttttgaggtcagtgttcgtcttcttggtggacttatggccttgggttacacaattgcaactattctcaagagaaatacccatgtattttctagtgataaagtgtgtgtaaaactagattggctggaacaactagatcgggaatatgttcaggtattgctcaaatatgttgtcgatggttgagaattatatttattttaatactctgctaaaacttatttgggttgttcatatagtaaaacttgtttacttttgtatttcttggctgactctcataagttcatgtaagcaatttcaaacttttttgttgcaatgtgaaggtgcaaggaaaagataggttgattgttagaggtgttgctgagcagcttggtttggagggtacatacactcctcggacatatattgaacagattcaattggaaaagcttgtgaatgaggtcatggtatgatcactttgcctttctgatgccccatgcactctcctttgttgggataagagttatgtgcaaatgtttttgatttgactattttacaggcattgccagaggatttaaagacaaagcttagcctagatgaggatctggtttctagccccaaagaagcactttttagagcttctgcagacagggttgccatgagaaataagcatctgaagaggtttggttttgtcttcagctgtgttgtatctatgcttaaattgagtagttaaatgtttctgcataagacatttcccttaatatagtaattataataataataataataataattaaaaagtaataaaatattgacaaatttgtttttggaatatgttataaggacggctaagaaaccaatgtaggtttgggatatgtgtagaatctgttcttttgggggtccaatagtgacaaattgctttttccctatttcacgttcttacttgtagattacctgagtgggtcatatagacataacattataacaataaggagatttcatgttgaatttagatacaaaagttctttagatgatttcaaagtgtgtgcttcaaaatacatatttccctctttgtatgaagtagtttagttttccctggaaagggcaatagtgcatctccaacatcccttgcagtattccaacatgtatgttaagcatacctatagtaacttctttgtttgtcattagaagaactgtgattttgtgactttggtccttattttttcgggagcttcttcttatatcttgatttctttggtggccaatattctttatcatgaatagtggcatgtcacagtcatatacagcacaaggggacaagaacatttctaagcttactggatatgctgctaagggtcaaggatatggagagagaaattcagtaccaaattcaacactagcaaatcaagtatgctgattctttctctttgttaggttattttacattatcccaagcaagtaagactcttttcctcatcattttgtccatgtctcagctttcagaccaaatatcttcactgaacgatagaatggatgagtttacgaatcacattgaagagctgaattccaagttaagtcagaagaaaaattcttctagccaacaaaacatagctctccaggctgaagcatgcaatggatctgctcctacttcctacttcatgtctagagtgggcaatggttcaatgaatggatctttaatgccgaattcgttatcttcgtctcagttggctaaagactcccctatactggaagaggtatgtggccccaacctttttatttcttaagtttgcttccttttctggagttttgtgagtccctcagtttaagggggccaaagcatagatagtaaggaggaaaaatttagataataaattgaatggagattatgatttttaattgggtaggagcaactgataagagtgaagaaatgctagtggaaaaaagggtcttataatttaggtgtaaatctattcattaacattttctctttctttttttttcttcttcagttaacagttatttttgttagatgagctgtgaatattacgtgtgtatttcttagatgtaggtcatttctgccttagattttttttttgttaaaaaaaatgtttaagcttttcttgataacacactaaaatcaactttaagaaacagatattcttcttagctgtaagcataatcagtgtttaaatactcggataacttgaacagcattgtatggatacttctgttcagtctcacaagagccattgaagctgcatcaacattttttaataccatttttatcaaatatcgtgcttgtttcctttgatgttttgttttctaatgaagctagattgttcacgggatatcattacttttcgatggttcgattattggctttgcattttttttaagtgtttcaatcgtattatgtggttaccaacataaacatacactcaagcataactcttgatgatgaattcattgaccccttctaatttgcacttaacaattttttgctgcagatatcaagtatagcaagaggacagagacaaataattcaccagttagacagtatcagcaatcttctccgcgagaacactggagagaagactcgccaaatccgaactaaaaggaaaaacataacttgtgataccgaaagcttcacagttcctcttgttttcaccgcactggcagttgctggaacaggagtcctattattcaaaggattcttttcccgaaattagtttttatttttttggtttatgattcaaacttgaagctaacttttagagatgttcatccattgtgacccatgaagaccttgcagagccgcccttcttcccgggaaagagagtcaagaacaagaaaacattgcagagtttttaggagaatattgaaaggagatttatactaagctttcaaatttctctttgaggatttacgtaagaagggtttcttttctggcctatttttgttatttttgtggggatcttattaacttgagttaagccatattatttatttgctaatcaatcagtcaaagcctatatataagaatattattaaaaatagaaaagacgtttacagcattgctctttttcttgtgttgcttcactaatttctttcttattgtatgtaataatgtaattaactattaattactgttcacatatttgttttcaattttacccaatggtatggcttacccataattatttaataatgttaaaagagcatttctacatataagtggaaccggttaaaatgatagtcttatttaggagtggtaatctaggttagacacaataaataaaataattcaaaatctgcatgaaataaaaaagtttgaattatttttgggttgatatgactaatctgtttatcaagcatgtcatttttaggttgatatgtttaatttgaaaataatatgataatgatttatgtt

SEQ ID NO: 43849 - DNA, 7675 bp, Cannabis sativa
tctctctctctctctctctaatgatcttttatttcagaatgtattggtattggaagtggtgtacattttggcggtgaatgccatagcacatttcagcatgatatcagtacaaataaacagaagtacgattcttcttttaccagcaattcttgtgtggacaacattggttctgttgattctgacgttagttccaagctgtctaacaatcaaggttctcaccatattttgtcttttactgaggacgctcacaatgtgaacactaccattgaggcaaacagattggataaggatgtcttacctgaagatttatgcttgtgttaccttgatcctcaaggaatgattcagggaccatatctgggggttgacatcatctcatggtttgagcaaggtttctttggaactgacttaccagttcgcctggaagatgcacctgaaggaacaccttttcaagatttgggtgaggtcatgccacatctaaaagcatgggatggacaggggtataatattaatcaaaacctggagatagaagaacctggatctttaggagtaactttggggactaatttaccttctgctcctgcttctggattaggcgcctcatctattggaaatgaacccagcccagtcttacctgagttcaacagcctcccagatgagcttgttcagctaagaatatccgaggctgaagatccacaactgccgcattttaaaggtcaaagctttgacggttttgatggacaagttgaaggtagcttctgtgatttattgcttttgtggatttttttttttttatattgcatcctaatagctctctgttttctagaaatcttgtttccaggaagaccaatgaacactggctttgcaacagcaaaatctcctgtcaacccgcacgatggtttggcaagttgtggtagccacattcctccctccttgcctgaatatacagaacctggcttgcaaaatcaagctgaaactaagatgcatccttttggcttgctgtggtctgagctggaaggtgctcaaacaaactatgcacaggcatccagtgtttcttctagcatgggcaggactgcttcctttggtggtatggctgatccagctcttgtttccgactcttgggctgattatgggagaaaccaacgttctgatcccaacctgtatcaagataagatggctgctcacagtttgtcacgcatggaacgcggacccagccatcttgatttaactgatcagctgatgtcacaacagttgcagcaacagaagctccagcagagaaatatgttgtctacattcccacaattaaatgagtcattcttcgaacatttgcctaatcaaagtcttattcatccccaacaattggctaacatttctgcaccagaactagatcatcttatgaagacacttcagctgcaacagcatcgacagcttcagctccagcagcagcagcaacagcaatatcagatgcagcaacaacaatttattcagaagcaaaagcttttgcaagaacaacagcaatctcatgcacgacaactgtctcttgaacagttgatgcatagtcaaatgcatgaacctggttttgtacagccacatcttgatcctctgagagccaataatgttctagatcaagtacttttagagcagcaccttttaaatcaactccaacaacagtctcatcacacacctaggcatgtagatccatctctagagcagctcattcgagcaaagctttgtcagactccacagcaagaacatccaagagatctatatgatgcattatctagtgcgcagcatggacatcggcaatctttggaacaacagatgcttcagcaggagctgctgcaagcaaggcagatgtcgatgggattgaggcagcgagcaagtttggaagaagagaggcatgttaattcagtttggccaactgatgagtctaatcaattcttatgggcccatgctggtagtcaccgagctcactcttctggaattagtcctttagacatttatcagcagcgacagaggtcatctcatgaagagcaggtgggccatctcgaacggaatctttttgttcaagagcaacttcagcaaggggtttatgaacctggctcattgccatttgagttgtcaatgtcttatcctcagggtgcttcaggaatgaatttggatgctgttaatgccatggctcgggcttatggtttggatatgcatgagtcaagtgcacgaatgaaatcttcaaatcaagtgggaccatttcctgctggagttcaaagtgttggtcctcagcaccctttaattaataatcaatttcaggttccacgaatggatggaattgagaacagttggtctgagaagaatgggcagctagagaatttcttcgttgattctcggtttcaacaatcgcatattgctgcagagcgacagaaaagggagtctgaagctaaaattgtttgtgaggattctaatttatggttgtcagatgatgagaagtcaaagagattattggagttgcttaatcaaaaatcaggcaattatattcctgaattgatggatgttggtactaaatcatcctttgagagagagttattaggaagccattatgccaagtcaagctcatcagaagtaccatttactttgccttcagatggagaagctaaattaaataattcatttggggtgggcatttttggtttgagtcaaagtgaaccaacacaagaagtgaacactgattctggagtatcctctctgcacaaacagcagctggagttgcaaggattgagtgagggtatgatgaaaggtcgggaattcgagagacaacaaaggatggtggagcaagcagggttggaagctctagatcatgagagatcgatgaatgccttgagcaggcattcttcccttggggttactggtaatttgttgttcttttcctatgagctgtacttaatttatttttggtggtacctcttttaaagttgttgcacttgccatatatttttgtgagactcgtaaataattatatttatatattccagatgggagtgcagccatttaccataacaagtgtggtgcttctaattcatttttggacgatgctgcaaaagataggtaagccgtgttctatatacttcatatgaactcgaggagagctctttaattcacatagggcttgtttgaggaccagaatagccagtttattattttaagaagtgcctaaaatatgtgaacgtgtaatcttgacaatacacagtagagcatatttacattgttcgttttttgttttggacctctttatgacagggcattattgatcaaagggcaagaaagtattctgttgagacgacctcctgtgccccgtacgccctcatcgcaggatggcttgtctgagctagcatctgatccagtttctaggggaaaaaattcttcaagcatgcccgatggtatgttgatatctgtcaattatgtgtttagtttgacttgtaacatgaggaatgattagagtgaatggagtaaaacatattttcatcttaataagtatagctggggtcattttcaggggtctgtcaagatacatcgagtaattcaagaagccaagttccagacttaccagcctcttccaagaaggacatgcgcttcctccgatcttcgtctggcagtgatgcagatgtttctgaagcgtcctttatcgacatgctaaagagtactgcaaagaaggcggctcctccagatgcccattctacatctgaatcatcagatggaacacaagggcgaagtggaagaaggaaggggaagaaagggaggcaaatcgacccctctctactcggcttcaaagtcagcagcaaccgtatcatgatgggtgaaatacaacgagcagatgattagaagtttagaaccaaaccatttttgtttttcctttgtatcaatatctttttcttgttaggtttataggttttcagtgtaaatcaatttctttttaggtttataggttttcagtgtaaattattttcttctggaaattctttaattatttttttattctcatctttcccgctgttcgccatcttagtgaaatggtgagaaaaagagatgtatggcaaaactgcctgttttttcaaatctgagtgtgcagcagaatcggtacatagttttgtatagaaacagaataaaaaaaaaggtttataatgaaaagtagttagtcagtagagttagttggaaacaacattggtcatctatgtttctcgtctttaatttcatcatcatcactcattactaatttattctcctatgaaaagaccaaaactatcaaatacagtaaaattaaaacattatagggaactttatgataatattttagcacaaatatacatataaaaaaaatcagtagatatggtaatatagttggtagaaagtgaacaaaaggggattatggtacacaactttctcttatgagaaagtgattggtaattgctcatggttgccaatgacctgaaaaaagttcaataacagttcttcccatgatccattccaactctgaagctgataatgttgcttgattggcaataagtgaaatggcttctttggctcttttataaccacactcaggaaccacaaatgggaagtcactgcatcaaattcaatcaatggttataaactattgtcgcctaaaggaatgcaatacaacaaccatgagaaacacttgcctgccccacatgacacggttggcaccataggtggaaaccagttgatacagtggattggctaaatcatcatatggaaattgctttcttgacacccgaaaaagggcactgaatttcacatatacctgtcaaataaaaatgtaagagttgaagctgcaaactgaaataaatgcaaaatgcattacaaaattctgatgtagtgattactgatatcaattatttgtactcattactcgacaatcatcgcagtgtgccatactaagaaagagtatgaataacaagatgaatattgctacttgcataccgttattggtgcaatttagtaatgtatctcacatatttcactttaaaaagaatgaaatattacaccaatcaacttaaggtggtgttgggcaccatgtgtgccctatatccactaggctctaatgcaaaaagtttcttatgaataaatacaacattggatttcttaagaagattttggaaataaataagaaaagaacaagagtacagtagtagcaagcaaatagaaaaatttgaaagacattaaagtcacttatacctgtgggaatctggaaagctttagaagatcagagaaagctttattctcttcatcatttctgcaaaaacaatataaaagatgtaacaatagttcatgctggtctagaattgagcttctttttagccaacacagagagagtgagtgcttacgttggtggttggcagaaagcaatatgatcaagcaatacaaatgttgacgggaactcggtgcacagtttctctatttctgataaatgagtattgaggccctttcccaaaaaacaataaaaataaaaataagaataagaggaagaggaagaagataataagccctgagaaatatccaatacataaacgtggaaaggtacatttcacatagtctacaggataaaataatgtacaatgtgtttgcataatgataaatttttatgataccttcatacacatgaatcccactggtattccaagttctccagcctttgagaacaatgccttcccaacctcatttgtcatctgcataaacccttaaatcatcatttcaaggaaagaaaaaagcaagaaaactagaacatattacttataactatcatatgtctggacctctctcactattgctgtctatgcaaatttccattcatagaagctaaaaaggaattgataatcttgtagttactagatctgccttacatttgagataccaaggattgtttcatggaattccaggaaatatatgttcagactgagtagtaccctacttttcatgaaccacctgtgtagttttggacctctggcatggcaagaagatcattcaatctatttctaaaagcatgtgaagagcttcttttattcttttttctttttactaatccatttgctataaaacacaggtaaagatctcaaatcagaagagaaagctaataccttttgaccagatggccataaatacgggttaaagcgaacagctcgataaccatcctagcatcaaatagtgtcatgtcaagctcatgttttagagacaaaagctgggttagttaatcatctgagattcaaaaggaccttggaaacaaggcgttcaagatgctcaaccccacttccatcttcagatggattagcaaggcaacaccccacaaatttggacgggtacttctgcagcacactgttgaaaaaataataaaggatttatatattattttaattatcacaccatctgctgtataaatcctcaaatgctataactgacaacattgtaatcctcatattccctgtcttcgataacttttattaaatgacaacattataatcctcataatttctcgactgtttaggacgtgtcaacaacaatggcatgaggctttgcagccattctaaatgccacacttttattcccctataaatataaaaaacgattaatgggaatatatctaaaaacgatttaaaaaaataccttgttactagagaatggtcgaacttatgattaatgggctgcacaatgagagcgccatcaacacctgcttcttccatacactggagagtttcacattatcagtgagagcagaaaatgatatgaaaacttacagttattagttttcttgtatagaaaattattcaactaaaaagaaaaataaaaaataaaaaatcaactttcgaaaatggatgagactcaattatggtcatagaagcagcattcatacctggagcaagagatcgacagacccaggtaaagtgggttcattgcctggaacgtaagggtatttgtctacggcctgtataaaaaatgatgatttcttttacattgatgtagcggtagaagaaaaatcaaatctttgattggtgggttacctacttacctcttcgggagatgcccaaacatgcaaatgggaatctataactttggttttggtgttaggaacagtagcagaggaagccattcttgtaccagaaatcttgaacttgaagtgggttttgctccaaaaggattttaatggcggcaaacaatgaagatgggaagggcggaggagtggcactgacagcacaagtctcaacttctctgccattgttgcttaaatacaatacaattatgacattaaagtcgctgcttgcgattcataatgttaaatttgggcctttgggatcaaaaattacaagaagaccaggcccattgtattggtgttctaaagcccattatatttcatgtctaattgttggggttaagtttaagaataccttttttaagtttcaattaaccaaaaatacctgcactttaaatttgattgaaatatacccaattttacaagtacattacccaatatgccctccacacaagtcttcttcatgtttcagccatagagtccttaacgcacacaacttcagcttccgccatcgtgcaaaagctccatcatgacctctgccaccatcaacactgcacatcagcaaccacaacctccatattgtcc

SEQ ID NO: 43850 - DNA, 2830 bp, Cannabis sativa
  modified_base (72)..(73): a, c, t, g, unknown or other
aaaataatcaatttaaaaaaaaaattaggagaatttcctaatatattattttttttcaaatttacagtttgnntttctaaagtggttgcagcactagttgcaataaatgtttctatacgattttttgttgcaatttaagttgcagtgctagttgcaataggggtttctatgtacaattccgtaaaaatgtaaaaaaaaaaactgttttgaagtgtaaaaataaaaataaaaaacccaaaaaaaatatatgtagtactataatttcctcaaataaataatagcacaagtagtcaaaagcccattcaattttatgctgcaaaaaaaaaaagtccattctattttaaaatatagttatacaatttcgaaataaaagtatagacaccctttgtggtaagatcatagtcaaattagaaaatgagatcacatttgcataaaaaagcaacacaaatatctcacaagatttcttacatcaaaacaagactaatatttgtaacattacaatattaggatgattaagggtcacaaaagccttacaatattgagtaagttgcacaaagttaaagatagatcatttaattaacataaccaacaataatagttataacatagacctaaaaacaagagtagtggaatattaatccaagccatgcatttagttttgccttcttttttaatcataataatcctgcacctcttcctgaaaatgacagatgaaagggtcacacaaattagaataacataatgatcaactcaactcatgatgatcaagtattgaaaaggtgtaatacaaaacaataacaactgactttcttgtggtgcatgaaatccataaacttgctccttccttggaataagttacggccaccatgtttgctattatactttttgatttgttctctcacaaatttcttgtacaacacagcagctcctttgaattgaggaagaaccaaccaacccacaaataccagcttagcatcataccaaatagacatcctatgtacaatatcaacacaataaaatcaaactcatgcctaaaaactaatataatttttcagttctattcaaatacacattttttttctttttgaattttttttttgtatattattttttttatataactagaagggcatcacgtggtgcaaattccttctccaccccttcattttgacaatcctgaattacgtgtcaagtactataggtgcctgataacttagcctcccacaatcgggtcatcagtaatcacctcaagagtttttatcacacagatgacactacctacaacagctaaccttatagaggccaaaccctttttaagagagattgtagtgggttttgaactcttgactcaagcaaagaagaatgtcaataaaagtgattcctaccactacaccacgcaacatgttgtgtatattatcaaatctatatgtcacattgtttatttcaaatatctaaacaattttgtagccactaaataaaaaatggagagcaaagttattgaaaggagtggaggagaataatatgaaagagacatcatctagtggatggttatatgcactaaagggaaagaaaaaaaaaaaaactatcttttagttaaaatatagatttttttaaaaaaatatcacaaaaaattacttgttagttgttactaaatagtagtaatttagtaggtaaataaaagcacattactttagtcacatcaaattggtaagtatagtaataatcttacgtctctagagctggttggatgatgatttcaataagagcaaggaatgagtatataatccaataagcaagccattgttcattatcatgttttgttatgctctccattgcttcaatagatgcatacctacatttataattaaataaaattaaaacctaaattataataataataattaaactcatcaaaaactacttaacaaataaaaataataataataataatgacaaaacttacaagggataaagcaatgtcaaacaaggcctgcaagagattaattataccatcaaacagttaaaaaaaacattataatacatagtaaaaaaaaaatcaaagaacaagatttaagaaagatgagtgtatacccagcaactgtacgaacttgagaaataatggtatacaatgcttctcccatttcttcttcttcttcttcttagtgagttttcctatagtttttattcccttctcttcttttttttttcagtgactttattgggagtgagaaaagagtgtaagagaaaaggagtgggggagtgaagatataaattaagtttgatgtcggtagaagttaattaatgtgagcaagatatttttgagggttgagagcatgacacgttggacagagacgacaaagcttgaaactttattatggaaccaacacatctttgatgatgatataaaacgacacctgacacgtggcatgtgcccattcccattatggcaagaaaacccactttgattattggtggacaaaaaggaaagagaaactaacctaaccaaatagggtaaagagtctattattagaatattaaagagcattcttattaagtaccattaatatttagtattttctagacgtattattttatgattgactagccatattttttaaaagttattgaattaaactatataagatttgatatttaattgcaccaataacgatattgacacgtaggaaggtactagacactgctgatgtcttttaacatttctcaatattaaaatacaatcgataagctaaaaaaattaaaatggtcattttatttcattctaatactttaattttaagtaaaaatcaaaaaattagctgtgaattattat

SEQ ID NO: 43851 - DNA, 2518 bp, Cannabis sativa
  modified_base (1551)..(1554): a, c, t, g, unknown or other
  modified_base (1808)..(1810): a, c, t, g, unknown or other
acaacaatgagaagatgataattatcatcctccgcaccattaatatccccccaaaaaattaaatactattttaatctgaatattacacaccgactctccattttttgtaggtggttggtgtcacgcggttcgagcgacgatgattggtggctgcttctctacaaacgttttatttgtgtattacacaatatatatctgataattttcatgtaatatataaatatattgtgtaatatttgtatttatattgtgtaatatctaaggtctgggtttcgatttgtataatatgtgaaatttatgcattacacaatatatatttgataattttcatgtaatatatatttgagatctaggttttgatttgtgtaatatgtgagatttgtgtttatttttattttcgattgtgcttaaatctgagttcgtatgggctcaaatctaaggttatttttctagtgtgtcgtatataaacagatgggataggtgcaaaaattatttttatacttgtttgcgagtgttgaaagtagatgaaaaacacaaatacacatgttttttgtgtctacagtaactgacgatgaaacttttaatgtcagttaaaatccggtatgagcttttttctagtagtgttataaaatttatcttctaacagatttttaaattcatcccacattactgcattaaggtatcaggcatgtcctaccaattcccaccaagtacgggcatcttcttgaaacatgaaatagcgacacaattaacccactcgttaccaactacacccattattatccaattaatatgtgtatgacagtactcatccatttcaactttgataatatttgtgctaatgtttaaggttggaggtcccaacttaaaaaacctctcagattgagtttctctgctaatgttagccaactaataaaaaaggaattggatgaaatttcggtgccccaggggctaactaaaccggttgcctaacccagcgtgactcttctagacgaataacagtataacttgcatttccttaaacatctgctgccagtcaataggaggattaatattagactataaaataatataatcatgtgttaaaataatatcaaattaattattaggattgctaatcttgattagagcttcagaacattacaaaaaaaattataagacttttctaaaaaattaacaggactcgattgctagaatagctccacacagtgaatacttaagggaatttatggtaaaccaccctatcataccaaattataggtacaaaatgctactgtgtgtataaggtattattttacaaatacacaaaaaaaaattacaaaaatacgattgtatggaattttaaatattttacgatttttatgattttatttacagaaaatacggtcttttgatgtattttgatgttgtattcttgttaatatgttgtttttttttttttttttatttatatgttatattttgttgttgttttgatgttatatcttgttaattttattatgtagttttcgtgttgtttttataaaacactataaaaatgtaaaaaaaaannnnaaaaatctttgaacgtaaaaatgtaaaatttttacaaaaaatagtacattatgtaattatccctatatataatctccttagaccattttcaatagaagatctaaaatttggcgcttgtactatatttgacccattatttacaatcatgctccaatgcacaagatgtaaaatagagaaaaaaaataattaattatattgattgtcatttaatattttactaaggatatacaaaaaattattattttttttatttnnntattatttaaataatggtaatatgttaaataaagaatgtaaagtttactaaaagttaataaatcataataattagtggtatcatagtaaataaaaaaaatagcatttattgtaggctaaatttagtacaatattatatcttgtgccaaatttgacgcgacttaccgatacattacctttttcacactccattgaaaaagttttaagagcaattaattagagttattttacttctaactacttttcatattagtgacatatacatactacttctaactacttctaactacttttcatattattatagtactatatatatagatgtcatttttcttcgattgcccaaacaagccattttcttgatcaaccaaaatcaagcctaaacacccattaaaacaaaaaaggagccaagccaaaatattaatcatgtcaaatcaagtcttggcttcatctcaattaggtgaaaaaattcttgctcgaccaacaacaaattttcacccttctatttggggcgatcgattcctccattacaatatttcagaacaagacttggtaagatcaaacacatatattgtaatcatcattatatatgcttaattaattaataatagttagttttacattgaactaattaattattaattaactactttatgcaaactattaactcaggtttgtaaacaacaaagagttgaagaattaatacaag

SEQ ID NO: 43852 - DNA, 3035 bp, Cannabis sativa
agggcataaaacccaacatctagttgttccagaagaaagaagagcaagaaaaaaaaaagaaaatgaaagaaaaaaatatgttttctaatttattttttatttttaaattattttaaaataatttttattacatttagatagttaaaccactaaaagtttgttgcgtgtacatcagggtacactgtgacatatcgactgtggccttcaatagagcattttggataaaagattaaacaacataacagaagtgaggcttcgagagttttaccatcaaaattagtttgtggggttatatagttctagtagatttgctaccaatataaaaaaagtatctaaatgttttgattaaccaactttagatattattgtcgcagaataaagtaattaaaagttacatttgatttaaatattgggtattttgttgagccaatctatttcggcccacttttccttgctaaataaggagggcccaaagtccaacaacaaaattacacagcctaattgtgtaagtcgtggaaagttaactcacacaaggtttcttcgatcttgatgaaagcacgaatatatttctatttacatcatcaatcttctagaacaagaaacatgtgatactaacgtcatccatccacgcacccacgtcacttagggcataagcagaaagttcagggttcataattcaaattattgatgagtcactatatttagcgagcttagtgaccttactaccttcaacatcgctctaatataaaaagtagaaaggaaaggggttggttaatcaaaattggattctctgtctaaaataaaaaactagtttttcagtgctttctctttctaagctaagaacctcctttgacttaagcatcagagagttttttgtaggaaaaccccctaggagctcccgttgttgacacagtttttcatcaacggatctaagaagatcataaatgaccaagatgaacacaagtgaatgtggatcaaaagcaaattgatttatagaaaagaaaattaatgatgatgaacaataaattttatagtggttcaccccctttcagcagtaataagctagtccacttgtagttttattgatctcaatgttcaaaaatagttctccagagttatgtcctccaagaattcagtccttaagtgagtttttagagttaaataaagtaagtcagaaagacagcctccctttacaattaacttcataacctttatataggtttacatatagggcttaaggtttcttaacctgacatatcttttttgctaactatagttaagttaagttgactttgaaatacgaaataataataataaaataatattccaaagcaaatatctcaaaaaaatgataattattgtagatattattagactagctatgatggcacatgcctaacacgaaagtgcctcttcacgcagactcagtctgtataagttacttggacttcaaaggtataccctgcatggagcactatgtgtcattggtcacgtgtcctcacgactctagtcatgatgatgataattgaaacatctcgaaaatttaattttaataattaggacatattttataaaatataaaataataagtgtgttatgagtataataggtaggattatgatcttacttgacctcgaaaagtggccaaccaacagcggggtcatattaatctgatatttttcacgtgttacacaattagcatctgtaagtaaagaacacaaggatttttatagagatttgaccctcttagttagcaagtaacaacatactctccttttagttgtattgatatggagagataacactatttagatcactatcggtgggatctgatatagctctcttaaggttacaaagtaggattcaaagatggcaaatgtcaagtgttgagagatgctataatgggtgtgtgaatgggagagagagagagagagagagagtgtgtgtgtgatatcagacttagagcttgacagattaaatgagaattaatgacttggaggcttaggattagacttagcttttctagggttgagttaaggctcgttatacaggagagctaaactctaatttacaaataaattaagtacacttttacatactaaattgattaaatgtaaaagactaaatttccccttaaacataggtatttttcatcttctttattgggctattaaggccgaatttacagtccaactggtagtccacatgtaaggtcgtgcactagaatcttgccaggtctaatcatgactagccaagcacctgcaggaagcaggctggatagccttgtgcttggttggccatagggtcagccagggatggccggccagcccccttgaggtggctggtctgtcactttgtctccccatttaagcgtcattgatatttttcacataagaatgccacgacaggtgggcaaaatttgggatgacattttccccctaagttcttgtgcaaacatctgtatgaatagggacttactagctaagttggaactgatgtagcctttattgcataatttatgctgtacttttactctttgaaatgtctactctttaccgtctgatctcatttgttgtagtaaactaacagcttttacatgtctctttgttgagtgtgtgtggcaagtgaaggagtggtcccacggaaactatttaattcttttgggtggaaactctcttcactttttcacttttcactctctcactggaaagtaacttttgaataagctcctccatctctctagaggaccgaacccacatagcatcattctcttgcgattttcacgctattttgacaatccaagcttcccatcttcttcatcaataatttcttattatgggtaagctttcgattctcgctattcacttgatttagttgatttttccatgaatgcatgaaccttgttcttttctttggatgtcttttcattccaatgttagattgtaatcttttcggtattttgatccgcatggtagtcttaggatatgtaatgtgtgatttctagatgaaaaagatctgattttgaccttcattgt

SEQ ID NO: 43853 - DNA, 4385 bp, Cannabis sativa
aaaacacatatatgctgttgttccaaagctaaaccttgcctgcataattaacaaattaattgattcccagttattacttaaattattcttcaaaccatataataaacagaaaaaaaaaaaaacatataatatgacaatatatacactgatcaattgtgttcacgcatgcatgcatatatatatatatatatatattagctgaaattttaatcattaacagtatttaatattattatattaaattagattatttaagtatcttactagtgatcactgatcggcggtatgatatataacaattctatgtagttttaggtatcatactgatattcattatcaacttaattgtacaaataaatttcatgtgagtgtatatacccataacaatatatctattattaatctatagatgtacgttgattttttcagggcgagtacgttgatttataaatatacgtacttggtacttactattactaactatgtaaatatataaataattattaatttagtcagttaataattatttactatatttataactaggttggcttttatctcaataaaataaaataaataaataactaatttggcttaatcgtttggcaatagcaggtatattttttaaacaagtcgtattattagattgatcaaatgctgtaaagtagagaatctatttaaaaatgtattatgacaaaatgttttaaattttttcttcattttaaaacttttataaaatttactatttatgttttatgtacatttaaaaaatattaatcattcttgtaaacatattttattaattgttttagattttaattttaatttatacaagaatatatataaatattaatattatgtttaaaattaacaaaatatattaaaattattttaaaaaaataaaattttagtgatagattttaaaaaaagaataattaagatttttactttaaattttggcatgtactaaatcatgtcccttaaacttttgaggttgtcaaaaatacctcatgaactattgagattattgtatttaagaacttttgttcaatttcagtacaaaacgtctaaagttcaaaagtcatgatttagtatatataaaagttcgagggacatgatttagtagatattaaaatctggaaagtatgatttagtacataaacaattactaaaataataaaattaaatgaaattagacaagagtccttaaatctaacaatctcaataattcagaaaaaaattttaacggttagaaaagttcaagaaacatataattttgtacacgttaaaatttaggggacaaaaatcttgattcgtctttaattttttttttttttttttttttttgatttataggagaagttagagtagttttagctttgaaaagtaagagtcaattccttattcttcagtcttgtacccatcttcttaatcgataatgatatctcgggaacaatacataaggtcatcacaaatgcaaactggtcttataattgttatagtagaaccacttaatattttaaaccaataaaataaatttcttaaatgaaaaataaaaaaatagagactacgtagctgcataccagtgtcaacaatctcacaaaattttctctctctctcttccacctcacccacctcactctttgacaagctttctctcaaactacacaccattaaacgtgccctaatagtgctccatatatattaaaacataaataatcaaagataagtatatcacattttttatggtacggaagtatatatatatcacatataggtataaagtaataaactctaattaaattttcgttggacgcaaataaattattaagtttaattagatgcatatgtgttcctatccaactattgtaatgggtttctactttttagttaaatgccctttatgattttaatttaattttccactatcgatatacatacaaaaattattaccaattgatatcaaatcatgctaattgtgattatataaagtaatagtatcaacattaatgcaaggtcctacataaactcttgttattaattaataattaatttatattagctaggtagtgtgatagggttggtgaagtgaagtgtactggtgtaatatatatacatgaccgtgatatataccacaaataataaaggaacaagaataagtttctaactgcattatttatatctacttattaatatatattaattaaataaaagtctgaattatctattctccatttaattcttaattatgtaagatcacattttttaaatttaattaggtttattacattaaaaatgtaacgatataacctactataggttaaattttagtcacaattcaagtagggtacattaaaataaaaacctttcacttattggttaatgttcgaactttcagcgattgagaccatctctaactattacactattttgggtgtatattttacactaatttaacgcagaatctagtatttttagttgtaaaaacaaattttaattattaacaacaaatatctcactaaataaaagaaaattgtttcaaaaatctcatgcatatattatattatattcacattaataacccatgataattaatttatgttataatcataaatattgcctcaatatataattaagattatttgtaaaacaaattaaataaagaaactgtgaaaaattgatgcacacaatttaatgggtaatttagtgtattcttaaaatgaaactgtgaaaaattcagggaatatgcaccttgggatttctatggtaattgtacccagtaagtatcacaaagtgacctatacacacttcttaattacttgtaaataaaactaacttcgctatatatatatatcgtgatcttattatatacttactaattgaaaaaattttcttgaccaaaaattttctgaggaaacaaacaaaaggaagaaaaagagtgtaaagtacccacctgtgcaatgcagccgccgagacccatgccttcaaaaatctgatgaaacgcaagtgcagcgaccaaaggtctaatggtgcactgattctgagacattcccatcgtcaccccaataatcacagagtgaaatataatcccaatctccaaaacttgagacaccaatctctgcttcatcctcaccaaattctcctcctcctcctccgtcgtcgccgcacccgattccactctctccgccacacctaactcacccaattccatcctagactctgcccttttcttcgtcgtctcctccttcgtgcccaccggtttgtactcagccgcctcacctccgccgtggaccccggcgtgtgcggtggcagtcacgtcaacgaggagagcgacgagtgcgccgatcaaggtcacgagaccggcgaaagggaagtctcgccaggggtggagtgaggccacgtggcaatcggatagagcggcgaaggcgtcgggaagcacgtggactaaggatgtagagagaatgactcctgccgcgaagcacttgattaatagcgtggccttatcgtaagccggtttgccttgaaaaaacctggccaatagaaccggagagagtatgccgattacgcttgtgaagaagatgacgaagatcgacgtcaccttgagccgcgccgccgccgcgccggcacgacaagccaacgtcctagccgccgtatctaaggcgcacgccgccgttgccatggttttttttggagagagagagaaagaagagataggattgtatatatgtaaaagtaaaataataagactttaataagtaacttgtaataaggtgcgtctgttttttggtggtttgtttgtgaattgtggattgtgagttgtaagtgagtgaagagaagagagtaataataataataataataataatctgaaattgaagtcaggatcaagttttaaactgaggggacgtggtcgtggtgtgggtcccaattttatttatggatctgcctaatgacaccattcctataattcttccacttgtctatcctgtctctttatataattttctttttttttgtttttttttgcttagaaaataatttaattatagaaaatattataattgagaatatgattatagtgaaatgtgtaaattgtatttggttgtataaaataatatgtaattattaattaaaaaattaaaataaaaatattttttttattatatctatttaatgttaattatatataaaaataaaataattattcgttaaaaaatattaaattttattatattttttattaattaaaatgaaattttttatatattttatcattatgttatttatttttgttggttttattatttatgtacgtcatccgcataaaatttatgtataatgaatatacatataagttattactaataatataaaaataactcagt

SEQ ID NO: 43854 - DNA, 2550 bp, Cannabis sativa
aaaactgttttaaaatgtaaaaataaataaaaaaaaaaactccaaaaaataaaacgagggaaccaaaaaaaattagaacattaagcaatgataaatcataaatgttcacaaactatgtatcaaattattaggcatgtgtcatattaacaaaccacatttgttatgatgctcctactataccaagaagagtattattattattattatttttttttttttgataattagagacttttattgaaagaaagctaaactagattagaagccacaaagggagccgcttctcttaacaaaccagagtttttgatctttgccactctaacccaactggctaaagagttagcaataaggttctccaactgaggaataaaggacacaataacttctttaaaagacttacaaaggttcaaacaaaaagagaacagaggataggtgctccaaccaaacggaacaagccaaccccaaaggttgtagcagctgtcttcgagtcgatttttatcattatttttgagacttctttatcccttgccatctgcaaagccagagcaataccactcagttctctttccatcacgccatatattgaagagaatcccacagcaacccaagactcaaacacttgggcattcatgtgaaaaatagcaaaacctacttcctcggcaattacagaagcatccactttgcagcaccagaaatcctccttggattggtaaagatgcctttgcaagttcttgtctgtcacctccacttgttcataccaaaaacagttgcaagagaattcattatatctcgagagagaatccctaaaaatcagttccatctcatagcgtttatccttgaagatcaactcattttgccatttccaaatagtgtcacaaacacagacagtaaaaatttttagctcgtcatcctccaagttgatccaccacttgccaaagtcgataagattagttcaattgaagcagtcaatatgacttctaaaccatatcccatgaatgagaaaacattggcagaaaagatgaaatgttgattctttttccatgttgcagaaacaacacaattggtattcactatgattaaaaccaaatcgagtcttggtaggaaggatatcagaaaagattttccaacaaagtaatttcaaacgagagtgaaggctttgcttccaaaatcttacccacatctcgcttggatctttaaaacgatgttgttggcttatccaataagcgctcttaactgagaaaatacccaatttagcggccttccaaaataaaacatctagacccccatgtaaaggtttgatcttcaacatatcatctactatctcctcatcaaaacactttcgaatcaacctttcgttccaaactcgagattcacctaagaacaaatccttgaccttccaaaaggcgtgatttcgtttaaaatgaaacctagttttgatatcatttaaaggcctctaatgggatccaagatctatcccaaagatcacaattgccatcagctatcaggatacccactccctccaaacacattctattccaacaaactcttccaacatcttgagtcattcccatgcttttctactatccatacattattggtttgacaatatttagccataaagacccttaccgagactttatcttcttccttcatcaccatccaaaaaagcttggcaagaagagccaagttcatgtctttgaaccttctaatgcctaatccaccacaccttttaggttgacaaatctcattccaacttttcaaagcacaataatttcttttctccaaatttccaatccaccaaaaacttgctaataaacgatctaactcatcacataaagtgccaggaacttgaacaatagacataaaattgtttggaatgctttgaaggatagaacttaccaagatagttcaacctgcttgagacaaatgtttggccttccaaccctccaacctgcctagaattttttccttcaaaaaataataatcttcccttttcttagcagtaaagaagaagaggttaccaatgtacttttccttaggattaatacaattgataccaagcagccccttgatctcttcacgacacctccgagtaatattaggggagaacaccgctccactattctacttactaaccctttgacccgaccaaagttcgtacttctaaagacagttcataagagtttctacattccttgacgaggcttggcaaaagaaaatagagtcatcaacatataaaagatgggtaattgaattggcattcctcgaaacatgcacaccaataatatcaccttcccttttaactctcaaaataagtttagaaagtacctcgctgcaaaggatgaagaggaacggcgagagtggatctctttggtgatgtccttgtttaggattaaagggagccaagggagcaccattaagtaaaatcagaagctaaccgtagaaacacattgcatgatgagcttacaaacttggaagctgaagccatttgcttggagaactcacaaaagaaaaccccattctaatcggtcatacgccttattcatgtcc

SEQ ID NO: 43855 - DNA, 1215 bp, Cannabis sativa
tattgaaccaagatcatttaagaccttttccaatctcagttgacttgtcaaccctcggattcaagatcaaaactataccattttgatttcttcccacaacaaaactgaattcctcgaaggatccaaagttcatttgatctatccttcctcaagcaaaccatagcggagccaaaaactagcccgcaaccttagggttttcaaacaaccacacaaacccttggatctagatcgatccatatatagaaacacaaaataacaaagaataaagaaaaaaaaactctagtaatttttttccaaatttcacttaaaaatgagttacgtgcctgttgagttgtttcttagatggttggctcgtgctccaccattttcaaacaattacaaggtgttttgcaaggattccaagtcacagaagatcgacaaagtaatcgttcaagtatatctttctctattgttcttttctttctttgtattacaatgtttctctctctaactctctcaatttctgtaactatatctcagagcttccttgaagtaatctacagcttaaacctaaactagaagcttgaagaaaacatgtataggcataggagagtgatcttgtctgttgtggtagttagaagtagctcacttgtttctcttatttccttttctcaatttgttgtaactgatttgtaattcttgtgtaaaatgacatgtgagtcagagcccttttttcttgtaatagtttaagcttagattaatagtaagtgaagattaactcaaaaatttctacctaaatcctcacttggactattaatctttctgtaaatccatctgagggtcttagctcgattcaattatagctagccagtattaattcttagtaattttacccagtgcttgaacttactaagagtaatcacgtttgtcctcatgtctactgggttttcttgtgtaggagctttgtcaatgataatgtgaccttgtgtcacattgtctctgacgaagtgatatttaatttttatatgcttagttctattgtgaaagataggattcttgcatagatgcacacaactctggctatcagagtatatggttggtatttatttgagcaactttagttcctttagtaacccttttagttaaattccctccttgatagcttttgctgttgcaattgttgaaaatatttaccaaaatctagatttactaacaaatatgtttcattaacatcct

SEQ ID NO: 43856 - DNA, 1495 bp, Cannabis sativa
aaaaaaaaaaaaaaaaaggaagaacagcacatcaacactttctctctaattcatgcaataaaattgtgcatcaacagaaagcatattaattcaggtttcatcagaaacattatcaccaatcggtaaccatcagtattaaacatgtcgtattcgaaccaaagacatttctagaccattttagtagtagagttcaaatgtttatgttttataactttattaatagcaataaacttgttagcctcaatcaaaaacagtatctgtacctccaaatccaggaattagtccaagctgaagttcaggcaagcctaattgtgcagtgggagttgaaattcgtgcatgacatgtctgaaatggcaaaccatgcagaaatattaacaattccagcattcaaacaaggaatattttggtattaaaaaaaaaaacagacttaccattgcaatctcaagccccccacctaatgcaagaccatcaatagcagcaaccgacggtttccttgcagctgaaacataaagagaaacgtcaataacaattcttccaggtgattgtaaaaaagaagaaaatagaataacataaagtaccttctacggtatcagtcagaatatccactgctacaaaaccaggcttcgaaaacggacctgcaaaatatagaaaacttaagtcaaatagaccgtgaaaatgaatttataaaaacatatgaaaaatgagcagacccttttgtcccccttgcagaccaccaaaagcactgatgtcaaagccaccagaaaattttcccctggcacctgcaccagtaatatgtgtaattaacattatatctaaaacaatgtaaacttaaacagggccaaaataaattgagctcagcaaactaaccagtgattacgattgctttcacatcatttctttgtaaagcctgctcgtaattttcttttaagctgaacagcactgaaagagaaagaaagagctttattttatctgccagaactacttaacactttctgagacaactgtatagctaactaatctttcttccacaattttgaaccaaagagattgcaaagcactgatttttatacagtatttgttttgtccatgtttgaatttgagactcattgaacaccttacctaagttcactcaactctaaaacaagaaacgtggaagcaataccccaacaactaacttaatcatccaattttccttgtaagccatttgcttaattatatcaattacaagtgaaagtaattgaaatggaatcgattgatccatatcaaaacatttcaaaacctaataccataaaagcttattagtcagaaattattaaatcagctacagcacatagttaaactaaggttagttcaattctagttttgactgtggaagtggaacacagaggaagtcaaaacaaggaaaatgttgtccaatcaagaagtttatctaacgctgcaatattttgtccctttcttcttcttcttctcaaacatatttttcatttgctttaaa

SEQ ID NO: 43857 - DNA, 2318 bp, Cannabis sativa
taaataaattaatatcgaattttttatattttaatttagtctaactaagatttttactttctaaattttgacatgtaccaaatcatgctccttgaattttttttaccgttaaaaattccacttgaattattaagattatcgaatttaaagaattttatccaattttattcaattttactaatttagtaattgtttgtatactaaattattctcctctaactttaatatttactaaatcacgccactcgtattttgacatgtgccaaatcatgtcttctgaactttcatccaacttttcttactaaaattggacaaaactccttaaattcaaccatctcaatagttcaagataaaattttaaaacatgatttgttacatgtcaaaattcgggatcaaaaactttaattaaccttcaattttatcataaatatgaaaagaaaaaatggttattcattagtatctactctcacattggtaggctcttttattttacagcaaaaaggaaaaattagcataaatacttaactaccgcctcattaatagagtcccacttctacactttcttatcaactaattcttataaatacatcaatttataacaaccttacatattttactaacccttcttcttcttcttctttctccttatatatactaacatattttgcctaataacaaatctacatagccatggattggtcctcatggctatccaaaaccagcctagagccacatctagtccacaaatacagcctctgtttcacccaaaacgagcttcaatacgaagacatagcatccttaaaccatgagtgtcttcaaagcatgggcatagtcgtggccaaacacaggcttgagattctcaagctagccaagaaggaaagtagtaataatggggccaaccccagatccatttcaaggctttttgtagctataagcaagaccaagaagtcgtttagcaagtattttagtcgtttggttgttcatgatgacatgccgtctaagggttcgcctgagagagtgaggtaccaccaccaacaccaccattaccagtaccaagagcagttgaaaggagcttttttgagaaaacagaacagtggtgagattgtcagagatgacaggcccgcactcaagaaggctttagctctttcagggcccattgatttaaggatccatgatcggttgatggcccataataatgctactaagagtttgaagctttctgggcctttagatggtaagcttaatgagaggttgatgtacccgaataaaagcccaagattgatgactgggccgcctgatggcaaaattcttgggacggagaggttgatgatcatgacgactagaagcccacgattgtctgggcctttggatggaatgggcgaagataggttactggttgcaaataaaaccccaaagttatctgggcctgtagatggcaggcctccaagcccaaagttctgttgcccatatgagaaggaaaaggaggaagttgagtatgatgaacattcactttggcctgcactgttccaagacatgaaacctacttagaaagattttccaggtctcttttcaaaggtttgagattgaattagatataattatgtataactttcagacttgtttttacttcatagataaatataatttacagtgccacttgtgtttgacctttttttatgcataaataaatattttgggggtgtcattagaagtttcctgatacatatagtgtatgtatttatgtatttcccttgtattttttgcaaacttggggctttgtctattaatactgttaaatattgaggcatttatttgggtattgagtgagaggaacgttctgacatgtgaggcttgattgaaacattatgtttgttttaagtttcaactactcattgggttatcagctttggtattattattcattgatgattcactaatttacatccctaatttactatgttgggtggaagagaaaaagtaaaggtttgaacaagaatgtcataaaaaatgaacagtggagagaaaattagaggatgttcttgcatttatttatttaaaaataaaggttaattaggatttttattcccgaattttgacatgtattaaattatgttgtctgaacttttaagttcgttaaaaatgtccctgaactattgcaattattggatttaaggacttttgtctaattttagtaaaaaaatctaacatagatgaaagttcagggagcatgatgtagatatcaaaatctgagacagcataattttgtacataaataatcactgaaatagtaaaattaaatgaaattaaataaaagtctt

SEQ ID NO: 43858 - DNA, 1156 bp, Cannabis sativa
ctcactgattgtagtaataaatcatgaagtttgattataatcactaaacatgtcatagtttacacaaatgttctctgatttgtaagtctaagaacaaattgggaacttgctttaatcaatctctagtaaataaaagtcataattccttacattttgtcttcttttagcatctggaaaagatcaccattttgattaaaaaaaaacctttattcaaaatttgagaaaaggataaaattctaacgtgcaaattcagaacatccgaactccattaattatcaaccaaaacaatgtaagaataatcccaacaaaacctatacaatttcaccttataacataaacccatctaataaaattgcagctttatgaaaacccagatgccaagttccaatcttgggaagaaaatggaaatgggtatgtgagaaaattgaagatgatgattaacttacaggaaattttttggaaagagattgaggagaaggagggaagtagatgtggaaagtcatggagcaaccgagagttgggctgaaatgcttgtatctcttgttgaatcctccaaacatctttgagctgctgatctcagtcggtttggaatccatcttgatcttcctgaattcgaattgagtcgtcttcttcttgctctagaagcttatacaggagtgagtatagtgagtgagataatggaaaaatcttattaaaaataatctaaagaataacttttgttttacaaaatttctatttttttttaaggacaaaatatctatttaatttgctaaaaaatttatatattttaattatatttatagagaaattttatgtacctcaatattaaaaagtaaataacttaagttaaatttaaataacttaagtaaataactcaatattaaatttaagcatacaatttttttgactggtttatagaagtgttggcagtgggtaatataggattggtggaagaagccgtcatagttggttgggcaatttagaaggctcggaatgatatgctttggaatggtaaaagttgtagtgctgctgatgttatttggctggctcgtaccactcttcgacaatggacaagtgcccagtctaagcggatgggatcggtgtccctggcttccaatcgcactgacacaagagattactggtccaaaccggctgc

SEQ ID NO: 43859 - DNA, 5862 bp, Cannabis sativa
gacccatttaagctctgaatctgcttcgatttcatgtcgttttctctcttattccaaaacaccgccaagctcgcggtcgctgttattgcgaagcaaatgaccaaaatgtttagcaaagctctgtacgaataagcgaaaactttgttcgagttatggtcaattgggtatatgtaaaagcgattgataaggccgatcaacacgaggaagacgacgaaagaggaggttatgatcccacccagccagatccagtggtttggacccaatacggcagagatgggtgagtcggtgggtttgggcttcagccatcgggttcgggagaggggaattttagtggcttgggattgtggttgttgtttctctctggtgacgaatgcttcgatctggagattgaggtcggcgaggtcgtatggggttccggcgagtgggagaacaatgtctagggctgcgaggtcagaggagttcttgaaagcagagatcaaaagaagtcgtggggttttggaattgagagctttggcattgaagatcatgtctctgattatggagatgaatggggttattccactgcctccactcaccattaccagggtatcgtgccttcacaaaaaacaaaataaataaatatattatgaggctcattcattactgcaattttagtcaataactaaaatcaataagtaccaacatgatgtgacttttatgaaaacaaatgattgagatgtatcatgtacgtaataagtattacataaattaatgcagtgtattaagtattaatttaactcagttcaaaactaattggaatatcctctactatatattataaattataattatataattgatttataattatttttaagagctaataatagaaaggtaccttagaaaatgagttgaaacagggccataaggaccttcaacagaaacctgaagcctgtcaactgaggaagatggggaagaaagcagttggtgaagtttcttagaccaattaccttcacatttaatcaaaacgctcagcttctcaggctccaatttactactagaagtgattgtgaaagggtgccattgaatcttcgatacacttggcacattaatgaaaatagtgcttgtgggctgaaaattcaaggcttgtgttttggagaaattgagctcaaatgagtcgggcaaaattcgagtggagaggagacgaacagaatttcgagactgtaaaaatctcaagaaacgatcgaccatgaagaggtaaaaagcagggagcataatgcaggcgtaagggattccaacgtggaggacgaagaagagaacgaacacaatgtaaaggtagtgtgtgtagaagaatagctcaaacatttttcgccttatccgaggtatagctgtgatccacatagctaatcctgcaaccaatgctatttccccagccacaaccgatatatcaactttctcccatgtcaacatctgcaatgccattatatatatatatatgttattaattgagttaatcatttctttataaatatatgctaagatgaagtattactattatttaatgtatctttgttcacttgaataaaagatgttgcaagtcaaccattaagattgacgtcctctcaccttttatattatagtgttatggagaatttaatttacacaatgtacttaaaatcgaaattttcttatattttttttttttgtatggattctaatttttatttttcatattgttaaaacaatatcatcttaaaaacaaaacaatgtattgctcatggtttggcgaaacaagctttagtgttggataatgattgtacttggttagaggatatcccctctactattttctctgttgttgttaaagaactattttgattaatgaaagcagagtttttccttaaaaaaaaaaaaaaaaaacaaaacaaaacaatttatttttgttaaaaaaaaaaaatctataaaaatatatattttttcatttttaggtatttgaaataatccctttagaaaagaccataactttaaaaagttttataaggaaggccaaattcatgattattgaaaaatatattattttacaaaatttggagtagccaaagcttccatatctccgtctcaaaacatatgaattaagtattatgtttgtaataaaatcttttgtggggtcaaaagaatttaattttaaatttaactgcaccatctaaattaaaaagaagaaaaaaaatgttatcttcaaatttttacgtcaaaccgaaaatattagagttgaatttgctacaataattgggatatctttggtggtgtacgcaaaggacataacagtgggagagagccacttgggctatgttccgtgtgggccgagaggaaagataggcaatgatatgggcttagaagtttgtaaggtttagtccacttccaaagatgctgggtgataagtcaacgcctattcactacaccctacacgtgtcttccactcactcctaaagagattctcataaggataattagtcaagccaggagatgatcctggccgttcaatcagtgagctagtcatatccactactttttagtgatcatagccgtccatgtagcttgataggatgtccaaatttagtaaaagaaatcgtgaaaacagatagtacacttatgtattatcgtggtgttataataatttacaaattaataatacatctaaacatagtatttttttagggggtttaataattataataattatatatttcgtatctatggcgttttggactagttctagttagtttctagagaagagaagagaaccaagacttgtggaatatctttcacttttggggatggaccaccactactaggaaccattggacacacacactcactcatgatcaatagatgatatatataaatatatatatgataaatatattatatacaaaccagaaaaggtctacgttcatctatatatacacgtgtataaaatatttatcaattatatatatcttttctggattctccattttcagtcaggaaaaaaaatatgcattgtttaaatgattacgtagcatatatcactaaaattaatggtgagaatcgttatcgctcatgtgattattattaattattaattagcatgccgtatacccctttatatactacaattatattattatattatatatacaacactcgaatgtatgttctagaataatgaagcaactatatatgcatatgttgacatgacgaacggcaaactcaaaacaattaataatttagaaaaaaacgttagaattaatttattggcatatacatgctaaattgctaatacacatctataatatataatacttctgttgggggcattaataaataataaataacggtcaaaaagtaatgaaataacaatcaaattaactctagcatattaatatgtatattgtatgtacgctacattttattatgtcatatttgagaaggtagcaaaaatatgagtctaaccaaaacgcaactgcgtatgcttcctttattcctttttctttctaaataagggacgaaattaagagcattgctattgggcggatacctgtggtgcttagcacccttaaacgtgttactttgcgattggctagagatattttctaaaagctattatattaaactatataggacccgatactaaattagaccaataataatattgacacgtatgaaggtgcttgacagtattttttagcatttctccgaaattaataaccatgtacgtactcatatattcattgaatgaatgaagctgactaactttttactcttataataatataattaactattatttctcattttttcaacaatcactggcgtatggaatagtttaattactaactgaatttgttatttttcatgcatgcattaaggaaaaagataaggaaattttgacagcaaaattattatatatgactgtaaatattgattgcagttgcaacagtacgataataataataataaaaaaaaagtaatgacagagtagtttacttaattataaaaaattaagagataattaagatattgatacgtaccgctgagatctgatttgtgaaagcccaaaaggtgatgtaagaaaggccatgagccgtgaagagagtcataaccatatgtcccagccatatgtggtacttgatgctcccctccgacgtcaacccgaacaccgccagtaccgacgatccacgcgccaccgggaagaacagaaacgacaggcagatgttcccaatcaaccctaatctaagtcctgaactctcaagcttcgattcccatctgccattcatgtatggatattaataattaattattataattaatatttttttttgtgtatataaaataatattgctggctgcttagtgcttacagtttttctccgtcttcagctgcggattggagggtaattttggcaaaactattttgtaagtaagtggaaaaagaccaaacgaggagtgcaatgaacatgacgaagaaaccaagctcaattcccgtaacgattcccaaagggcctttcacaaccataggctgtttccataaccctaagatcttctttttgttattgcttctgttacatatgtttataattattgttataattagttaattaataatttatccttgtgttcatatatatagattaaaccaaaagtatatacctttccggaatattattattatgatcattcaaatgctttcctagatggttgtagatgcagcccaaaacagcgaaaaataagacgggaaatgtgtacagaagaagagtcgaacctgtattatatagattgtatatacaaaaatattttgagatatatttatttaaattaatacaaagaattatgaaatggactataataattataattaatatttatatcgaaccttgtgttccgaaatacttggaggtattaaccttggccttgatacgaggctgccatttgagcttataggtgttggtgggcattatgatccagagaaaaaagaaacccaaaatcaatatgatcattagtagcctcatggctgctcggatcgtacggatcatatgttgttgatgagaattatttggagttttaatcaccactgttggatccatctctctctctctctctgtgttgtagaaaagctgacaatatattaaaagaagtctttttttgtatatgtgttgagaatgttagtgaatgttgttgtgtatttatagggaaggaatgttagatatcatataataataactgttaatcatgagtaaatatatatatcattaattaataacaacaagcataaatatggaattaatatgtaattagaagcaaaaaaaagacaagcagcatgggtcatgtttaccaactatacatttagataaccgcattaataaaaccaaatagttttatttttctctttttgttcttacgtgagatgacgtggaagttttgccaagtggggtatatcttcaattctcattacaatcttaaagtcaactacatttgcaagagtcatgcaacatttcatggtttaaaaacttaaattgcttaaattgcattctcttgtatatataatccccttttcaagagtcgctttcatatattatccactcaaagtctcaaagagaaaattaattaaacaaattaagcaaattaattaatcgttcattggtggtgaagcaatccaatttgttgtttttttcctaaatatatattaatgtcagtagtcattattatatgtggtactaatctctgaaaatgacagtacgtacttggtggtgtttaattaagtactctagctagcttggtagatgatccaagtttagaggatcttataattttgctataatcatatatataaaatattattaaagta

SEQ ID NO: 43860 - DNA, 1162 bp, Cannabis sativa
catttaatcattcgcataccaaagactgcttttaaagacaactcacatgcaggtgcatttgtcaatgaggtatttattgataaaagaataaacactgactgtttattacatcagcattatggaattatcctgttagatcccccataaggatgacttattctaggtggaacaaaaggcataggcttagataatgactgttatttctgttatgtttagttactgctgtggaaaggattaggctgatgtctcaaaagcatacgttctaaatggtctttaattgagttctagttttagttaaatgttttaggcatctgaattgtttatgtaaaactgtagagaaagtaaacctactttctagggagactaccaattagtctcgaattagtttgggcttgtaattttcattgatatcaataagataccactgcagttttcttctcaagtattagattactctgtagggctatcatgactgtaggagaatgaaaactttctcacaccaatctcaaaacaaccaagaacatgcacagcacaacaaaattaaaccaacaagcaggagagaaacatgagtaattttagtgaggttcggctaaacactgccgactttctggttgaactcccattttactacagagattcttaaaccctcaaaaatattttctctttcacacgctctaaatttcttgtatcaatataaagcttttcaaatgtttgaccttcgaaaacgaggttatggcaagaaagtttttgttgtggtgtggattagaccgagattcaaggctgcagaaaatggtggatgctggttgtggcgtgatgctgagaacaaatttagaattctcttgaacttgacgcgccaatctagctgatagattccattgaaaccagctttgatattcagctgtcatcggatatgacattatatgggcgtgattttcaactttagcctatagctacaaaatggaatgtgttgttgggttatatcatagataaagaattcctggtgtatatttatatatatttttttgatgatataaaattgggttaaatccattaatgcaatccaagtacgcacatagaaatcccatgtaaaatgaaacttccatgtatatctgtagtctttttagttttccatcacaagcaaaattctgcttaagatgcaacg

SEQ ID NO: 43861 - DNA, 2779 bp, Cannabis sativa
cgtggctgttgtgtgtgttccacttggggaccagatgtaaaaaattaattgcaaacattgttcctggtcaattttttggaatcggatacactttggacaccaaaaccaaaaccctagctgtcgtgctatttagggagcaagaagctcacctgggtgccctttggtgactaactcatactatgtgagtttcgaggctcagggctaaagtgtggctaaccatttgtacactcgattgcaatcctggagttaatttcctattgtgataagacaatgaactagaaccactacaaacaaaggaaaagagccatatgagtagggtgttcacttggggtgccccccaagtggtgttttatgatgtttagcgacatcttcagtttctaaatcccatttcggtgtcataacgactcattcacttagactgttgaagaaaacactcaaaaatgaacatgtcgggatcttgtgagcagatgatgctactcttctcggggtttcgagggccaaggttgtttccttcgtaccctactagaaaaatgggcattcctgttggttcaaaaaaaaaaacaaattttttggggaacgacggtaatgaaattgagtgtcgataaaataccaacactaataatagcattaccgccaatttaatatggtcgcatacacatatgtgaccactaagaaccaacggtaaaacttttcaataaaagctcaactaaagctcacatatcttaaccgttaataatatttaaatatatataaaatttataaaaaaaaaataatttaactaattttaaatttatttataaaaaaatatatttttaaaaaaatatatttaactaatttattaaacaaattaataatttaaatatatttatttagttttaaattaatatatctagttttaaattaattatgattaattagttgaattaatatttaatttaaatttaaattaagatttaataataaaagacttttaaataattatctaagctatatttaaataaataaattaaatttgaatatttaaaattaatttttttttaaaataattgattgattgatttaatagtattagtttaggtcaactgcccctcccctcccctctttctcctctcaaccatatgccctctccttctctccctctttttctcagcctctttcgatctcgaccacgacgaacctccccagctgccatcccttttgcattcaagccgccaaccccttctaatccttgctccgacaaagccccatcaatcgatgaccacaaaggtactctctttctctctcgacgtcctcatagcaatttctcttaatatattttttttaagttcattttcaaatctatgtaaataatttatatgtatatatgtaaattattaatctgtatggttgtactttttgggttttgatattgaaacatttcttattcttttatggatatgtgaaaagtataatggaacccttttttttagtagtaagaaataatcacaaatatatatgtcataatagatatatagtaagacagtaattaatgaatacaaagaattggctcaccgtggtgtaatttgacttctccaatatccaagcctataaaacataaagacttttaataattaataatttatattaacattttaattaaaatttaaaatcattaatgctttaacaaacctggtatactacccaaactgccatgaacgcatgagaaagcaatattaatttactgttgaaaagctgcgacaaaataattcaagtgtatactattactcaaacaaacattttttaaattaataatcttcaaaccctaattaattctggtcccaatttgagacatgtattctagtcctaataagaattaagttatacattagatcttttgtgatatttagagttatgacaattttactcctagtataaaagattacttataggtgaagtaaggggtaatttagtcttttgtcatttaagtttatcctttatgtttgtttgtaagtggatttatggcgcttttgatctttatatgtattttggtaaaaaaatgttatgacaactcttttgtgaaattcttaaaggggattctcgaacccaaaagttttaaatattatgaatttatattttaaaagtaattagtaaagtttaattaaataataattttatttaaatagttagtttattattataaattaatttataaaagcacacacgtggcgtctctacgggtcagagcattacaaaatggtattaaagcgaccataattttaaaggtcctaaagactagctgaatatatacatttactgtgaagacaagtatgacacatggtataataagtattatctgcttatctactatttgattaattgttaatgtgatactagaaaaacatgttaggaatatgtgtaattatatgaggtattattatatgtgtggaaatgtttattagcatagcatgatatttgactagatgttctatcattgaaagtcattagtcacaggtctattatgttagacttttttatttgggcttacattaacttttattggttttattaaaacttgagttggttagtgtaatatccgccaactctgaaagggtatttttgtaatttaatttagctgaaagtatttttattattttacatatttatggatttaaatatgtatgagattttatttgtgatgatgtaatatttgatattattggcatgtgcataatgcctaataaatatatatatctggatattattatatgggtatattattatattattataaatattaata

SEQ ID NO: 43862 - DNA, 1329 bp, Cannabis sativa
agaagaatgttgattacaattcatcctaataaataaaagatttagacatcacataattattaatatttataacatattattattattattattattattattattgatgtgatgaaattgaaaaacttgtacaaaagggagatgcggcatatgcctttactggtgagcagtgcacagagaacaaaatagtgtgtgtagggcaaagaatagatgaagaaagaacagctcagaatggggtcagacttgtgctttaatggtaattgtccaattccaatatatcatcttctctctcttttttattttttgttttttgtcggctacgtataaagtttcacattcttaaccagtgaactttctattttacttgattaccaagtcatctttaatttcttcattttaggtaaaaagaaaaataaataagttaattaattaattgaatatctaccattccatcttaagtcgaaatcgtttgcattggcatgcaccaaaattaacagtttcaagaaaaaaaaaaaaagcactcctataaatataataaatacatgtattaataaatgattttgcttctgttgtatttgtgcatataaatttttaaaaggcctgcctgacaaataaaaaataaaataaaaagagcttctgtttagatttggatcgtaattttttttatgaataaattcggatagaagattttttttttttttttaaaaaaaaaataaatttggatcgtagacattattagtaaacattttaaacttttcgttaagaaaactcaatatgtggttaataaaacgcatttatgggtggtttaaaaattataagcagtcttggttaattaattaaaaaaaatagaatcgatcgttttaaaaaaattgatatcaaaacaaaaatctaattaaggtcagtaattttgttttaaattacaaatctcacaaatttagttttgatattgtggagtaaggattccaatttgtatccttttttatcgtgcaacacaaatctcacaaacttatttttaagtagaaaacaataatatatgcataaaaatcaataacgaaagccagtcgaaaatttcagtagatagttttgggtgatctgaccattattgaaactttacattaaaaacacgatgcatttattatcttaaaaccaaacatagaaagttaaaaagaaaaatcttactgcatttattaccctatcttgaatttaagtgaaaatgtagaaacgctaaagaaaatcttaaatatcacatatttatactctatatttcaactataacctaacatagttatgtccctcaagagtcaagacacaagaaaaaaaaaaaaaaaa

SEQ ID NO: 43863 - DNA, 1538 bp, Cannabis sativa
ttttaaaaaaataatatataaaatccaatattaaataaaaatactaaagatattcacggtgcctgcctaacacttttatgagatgttatatatatggttattagtgtaatgtgatattgagttttatttattttattctaataataataaaaaatcgttaactatttataaaatgtggtgttaggcctcataatagttatcaagtaaagtgggtatatcacattataatgctaaatgttattaatggtatacaacactactttatgaagtataacgttattgatgcaatttattatcaagttacataatattaaactaaaatatatatgagatgcaatattaaattacaccaataatacatctagtttaaagtagtgttatcttgtttggcaccatattctcttccatagcaatactttatacatatactttgaatgtgatatacaacattctcattacaattttagtttctaaattatggtatatgagaattattaaagagtatcattagtgtgtaataccatctaataagagaatttaatatcaattaagttctatatattttaatttaattattatataaaaaaaaattgctaactactcgtaaaattacagggttggccctaaactttaatgagttataagaaaaaaaattatgaatccttatttaaaaaaaaaaaaaaaagagtattttcaaaattactaaaaagtatgtgtattttcaaaagaagaattattcttttaggctcctgaatgggttctatacacaaacttaacctgcctatatccaaaacggagcttgcataatactaccttgtaatggtggtgcctaattgatgctttttgtatattgcttatgcaataaaatgggtctgaattgtgcactacacctctatcatagtcaagttaatttgtgtctttatttttgttatatattcattttactttatcccaagagtgagatcacccttttataactttaatttcttcaactttttgtttcatcaaatatatcggacctaaataataaaaatatctttgaggatagtgatagtactaagagagattgaataggcattattatgaagaataaatatatataagcatcatattcatattcatattcttgtttttccaactgatcaaacagttctcttacctcctccatccactatttctttttctttcctttttctttaaatgactataaatttataaaaaataagtattgtcactattgataggaacctttttatttttggtatttgaaaaaatccataattatacaattttctaatttttaaaaatactttacagtgctatccaattgcatgtgtgccttttattatatatattatacacatgcattaactatttccaattatgttttccaaaattataaattatttagaatttttaaaaaattaataaggtatttactacttataatgtagattatcatataaaataaattgagttataatttttctaaataataaaaaatgaaacacccctacaaaaaaatatttgatttctat

SEQ ID NO: 43864 - DNA, 2206 bp, Cannabis sativa
cgctcgtaggcaccaagccactcgcaggctacatgtcgttcgcagacaacatgccactcgcacgccaaaggcctctcacaaggcctaccgcgagcctcatgctgctcgtagcctcacgaccactcacatgatggacactcgccactctcagcttcttaaggcatgtgtgcccctcgactacacacatgcatgcctctcaacctcgcatacccattaggatattgcaacaaatcatcacatctctcgtcgaggtggccaacacttaactggtcgtgagaagaagaatcaaaaggatattgcatgcgggtacaaccatgcttcagtgcaatacctgagcatggggaaaggaaaggtagtggaggcgtcttacctgcaacctccgatgacccgataaagagtacgttgtagccacaactcttgccccccaagaccacctcacacccaacaacgataaatggtgcaagaccacgtcttgcaactacaacctgcagaagcaggacatccttctcttgacacttgggaaccactagaggattcatcatgtaaatgggatccaatagagctcacctataaatactccctttcttagatttgaaagagactggaaaatttttgtaactgaacatttattaaaccaacacaaactttctcttttaagttttgagttttacttacaagttcttagcattcatctcatcttatttcgtgacatcttgagtttttttatcactttttggttgacgagttttcaccataaacaatttggtgcagtttgtgaaaaagacaagtcatagctaggttgtttctaaagttattcattgccagcataaaatgccaaggcagtctcatcgcttctaagaggttgagatacgtttggacaataaccatttggttgcctcttagagagaactaccagtgaccgtcgtcggagaaggtaacgaagaagaccctcaaagttgtcatgacaacgagggaaactgagtacccccaacgatggtcagagacaaccatggtggaggaggtcaaaacaaagagcagcaagatagagccaccgcctccatcacatcccctgacagagataattctcatgtgtcaagaaggccatctccagtggggtattctccacctccaggtgacctgggaaggaaaagcaggtgtactcagtgagcccaagctcccgagcccatccttacctagaggagatgaacgacctacagttgaaaaatcaaaggatggaagagacaatgacaaatatgcaagaggtgttgaattttttgctcaaaggacactctgacgcccatggttccacccaagaatagagatctagaatgtcgagatgaccgtaccctacaagacggaggggtatctcgacactcctctagcaacacccccaatcagccctgagggaaagttccccgcatggagagcacaccaaaggacagaaattaaaagctcctacacatttaaagaagatgaagaccaagggaaccgccccggatctacgagacaagcttaatcaaaaagatgccatgcagaggtcagtacctcccacgacatctctaaaaaatgcgaataggcaaaaatccacccaacttgacctctgggataagctcaaaaagaggagacaagagcttgacaaagaaatggaggatctccgaaagaggatagcgtctgtcgcctccaaggaatgcaactgggatgaagatgactttgatgatgaatcacctttctcaagggatatttaagtcgagtcgttaccaccaaacttcaaagagcccaatatagctccttaggacagagtcaccaacccaaaaatactacctaaatgccttcaaccaagtgattaagatgaagagggtcactaacaaagtaaaatgttaatgcttcgcagtaaaactgaggggtgcgacatataagttgtgaattttacttataagttcttagcatttctctcatcttatttcattttatcttaaatttaattataatcaaattttagtgtgtaaatataacgttctttaaattatagttaaaaaaataattatggtaaaagactttatgctcattaaaactattaatttgaagtttaattttaatagttataaagctagaaacaaaataatacttaattttctacgttggagaaaaataatactatgacaaaaatgagaggataaaataataaaacataagttttataacaccc

SEQ ID NO: 43865 - DNA, 1868 bp, Cannabis sativa
aagggcaccagtaatgcctagtattctcttatgtgttgatatcgctattcaattaagtatcgggtcccacatagtttaatataatagcttttaaagagtatcgctagtcaatcgcaacatgacatgtcgagaaggtactaggcaccactagtatctaatagcaatactctataaaaagagtagtgctaattcaagttttttaaattttaattaaatatgtatatattttttttaaagcaagaccgtataattatatttacaataaatgaattaaatatatatcatatttgaaaacaattaaggattatgacatgtggaaatgagtaagaaaattagtgtaaattcttgagaaagaagaaaccgagtctaaaacaatattatttgtttcactcaaatatggttgttatgtttatctagtgattgtaattagttgtgaaacttttcaaagtaatcatgatttttagagaaaattagctaaagagctataaaggaaaactaatcaattaatctatgggaagcatctcatacaaaagttagtcaataaaagatatatagtacaaatgtagtatacaatatttcacataaaaaatactttctccgttaaaaacaagagaaatatgtatataaatatatgtgtggcttaatgtgattatccttaaatttaatgcaggggggaccaatttatgcaaacacacatttactagttagagacattcctttactccatgaaaaattaattaccctttcaccaaatcccatggttgattttggattaggaatcttgaggcagaatttggatagggaatttgggtttttcttaaaattgaatacagaagataataatcacctccccaagttgtcattttccataaattgaaaattcacactgtggacttataatggttcattttcattactcacacacaaacacccttatataccaacaacttcagatgagatcaactctgaagtccatgatgcatgaatttcactatcactcaaaatatccttgtaataaaaagcttaggtcaagaaaaagaaagaaagaagaaaaagctgatgataacattaaattctatataacattaaattctataaataattaaattctataaatatatatatatatatatatattgtatcatcagcattgcctccgaggtgtttgatgaaattcctccaaccttgaagagacacctatgcaaagtcaaataattaaaaagaaaactcaaaaattatacacaccataattcttgtctaatcttacttagaggggtggggaagagatagtagagtagagagacgcatgaggttgcatcaggaccgttcactaatgatgaagattgtgccccattagtgggtcctcacgctgacttgaaaaatcatccattgaaatcaaagccaagccaaacccaacaaacacaatcccaagccgaagccaaagccaaagccaaataagcctaagccaactctccaaaatgaaatattattatttatttatatgaaaattgttaagtattgttatttgtgtaattaagtattgtgtctcatataattttaaaaaatacattttaagagcgtcacctataaaaaatattgagcactactggtgcctaataacaatgctctattttttataattataattcaaaaaaacaaaagtcacccttctcttggggatgtgatgtcttcttttggtatcatatattgttatttgtgtaattaagtattgtgtttcatataacataaaaaaaaatatttcaagcaatatcattaactaatcgtgaagccccaattataaaaagtactcagtactactagtgtcgaataacaatgctctattctttatacttataattcaaaaaaac

SEQ ID NO: 43866 - DNA, 1918 bp, Cannabis sativa
aatatttatataattttaaatattctatttttgaaaatatgaaaaagaagaggaaagttgcttctcaatttcaattttgagaaatagaaaagaaaaaaaaaagaattttacatttattgccaattttcaattaattatacttttatttattttcaatttagcaacacatttattatttttttatatataaaaaaaatacgtttctctaatttttatgtaaaaattataaatatttatctgctatcaaaatcatagcattttaatcttcctctttttgtcaaatgtgtttgagaatatttaataattttttaaaataagttcaataatcagatatttattttaataaaaaatagtttttttctttgtaaattactttttgttctgaattattttatgcaaatgagtcaataacattaaacaaaatttcttttataatgtttttttgctattattaaaagatatactttcttgaaaaatatgttggagtaaccaattacttcttaaaaaagatatatcatttattttaggtcacatattaatacaaagatgttgttattggataattattattaatgtaaaatatataaaatttgaaaaacataactgatcatgagcgtccttgtaaaagcaaaccgcatcaagtctggttatattttgatagagcagagcacactagtgcataaagaaacaaacaaacaattagtaatacattagatgaatgataagtcacctcactcaaaacaaaattaaaatgtaataatagaaaataaatatataaagctataagcttccaaaaatcacccaactttccttgacaacaagctagctataatttgatattttagcttcactataagaaataggattttttccagatgctggcgaaagttgggtattgtactgaaacacaatttatttttgcttgcacaattttgcgctggtaaaaaaagttagcaaatccatgttagtattggaacttttgccagcgcaaaacaaaaaatgttggcaaaaataattttttccagcacgtaaatgcgttggtaaaaactagacttttttcagcgcaaatgtatgttaggaaaagtcttacttttaccaatgcactaacgcactgggaaaagtctacttttcccagcacacatttgcactggaaaaagtctaattttgccagcaaaaatgtgcactggaaaaagtctaattttgctagcaaaaatgtgcattggaaaaagtcttacttttaccagtgtattaacgtgctggaagaagtcttacttttactagcacaattttgcgctggtaaaactttgtgatttaatatttaattaatattatttaatttaaaattgttatcaattatttattaaaataaattaaaaaaaataaaacatgaaaaatcaaaacataattttaaattgttctaattatatagacttatagttataattgtctaaaaattagtaaataaacatatttttaaaataccaacataaacataattttcttacataaaataaaaggaatattagtacagatcaccatcatcaatatcatcattgtctttgaaaccaaaaaaacgtactcatcagtatctccttttctttcctaaagaaaagtctaaactatgcctttgggtggggtaggaggggagaacctgtcgttgcaattcagttgtagcaaacatctttttggcaccctccattgattcaaccaacttctatggaattacttcaacagttgaataatgtctagcaaatgtccttaaaactcgataatcccatgtatagtacctaggtatgtcaccagaaacatatcagttggttgattgccattacatccacaaatcatctaatagactggtaaagtcaataaacaatacaacaaagaataattatggatgttgaagttcctccttgacata

SEQ ID NO: 43867 - DNA, 1650 bp, Cannabis sativa
tatattacaaccatattttatctactattccaatccaggactttcaagacacacacccacctatggctagctcaagtggttaagttatttctatagtctgtactctatagtatatgccctttcattataaaagtattttcattggtaactagtttgagttacttttttacaattgacttttcttcttgtcatgaaaaaacaattaacctaatgaaaatttaaattgcttgatgaatatatgagtaaattaaaatttattctaaaccgttgaattaacttgaataaatggatttatatattttttacatataatatattacataaattatgtttattggtgaaattattttatatttaaagtttaaattttataatgtataacttaaaatttaaattttatagttaataaattttattttatttagttattgaagttaaaatttaaacttttttaccatactattaattttttctatttttaaatgaatgtttattcaattaatattagtcttatattaaagtttttaaaattaatttagactaaagtatttttaaacttaaaatataaataatatacttttttttaaatataagcatttgaatactaaaaactaacattaataattataaaaaaaaataaaaaaaaaatcagtttggacagatcaattcgaccaaactaataaaattattggatgggttaaatattttttaatttttaattagacaaattaaaacgactaaattaataaaattattgagcgagttaaatattttttaatttttagttggacagactacaattaaaagtttacaacctcatatatgttaggattagtgaaaatatgttataacctgtacaaggcaagtgcaagaccaaatcaatttctttcattattcaataaaaggaaaatcaaataaatgagtttatttatccaattgtaaactaattcaaaatagtttacaaaatgcaaaatgttgttcctacataactaaatcaaagttcctacttcccaccaaaaatttgtttaaagttcctaagtaaataccaattctaattgttgaacactaatagaataaaaattacatgtcccaaattccctatcccattcctgtcccaataataaaagactaatatctgtccattttatttattaggcattgggaattgacatttgttcatttttttaaagctttttttattttttattattaaaattgaagacttcctcttacattttttttattactggtgtaaaaacaaataaaaaacttacgtgataaaaaaaattgatatagcacaaatttttaagtgaaaattacacgaaatatgggatttcataaaaaagtttgaaaaatatggcatttataggtttgccactcttctatggcattttttcatatttaagattttttatagtattttatatgccatatttaaaccataaaaatggagcaaccccattacagaacagttaaaacctgttaaactagtttcgacatgtgaaaccagttttgacattataaaaaatcataacaaaatacaaatgttaataataaagttaattgaatccagtttcagcagacaatcaaataaaaaaaaaacacacacacacacacacaaaaaaatacaaaaaaaaaatactaatcaca

SEQ ID NO: 43868 - DNA, 2349 bp, Cannabis sativa
cctcctattattatgatcttaatcccaaaatatatatatttgacaggggttctcgtcacaagaagtagatcttgattaattaaaaaaaaggaaaaaagattaacccccacgaaaccctaagtgagagaaagtaaaaagatttgataattaaacgtgagaagtaattacataaagagaatgtttagcaaagataaaaaccagatctgaaaaaatggcagaaaaagacagagaaatcacatgctagaagccatcatgagaaaaaatctgaccaatgatggagcaaaaagaaagccatcatgataacatgatcatacagaagaaaaaacaagaaaaaagaagatggaaagaaaatcagagagcaatgatgaagaaaaaaaggtttctttggcagagacccaatacatttttttttgtttttttgaaaaaacaccatcattatgccaatgatctgcaaaacaggctatataaagtacacaacatcacatattaattgctcaagaaaaccaaaacccattacgcaaaacaaacccaaaatagcatatatgtacatataatgtaatttagagaaagagaaaagaaaaaagcaaaccttttcacattgagacatgcagagtagtgatcacctaaaccaagcgattggtataaaagagaaagacatttgtttgggggagaagcttttaattggggggaatgaagcctggtccgacgacccactactcaaatcgactgcttaaaaaacagatcaaataatcacaaagtgtatcctcgagccagacaacgttccccgcaaacataaaagcttcacttcttctcttcttttccttttaccttcataataagaggcttataaagctagtaaaccaaaaggggtttgaaaaattaagattttgttttgtattggtgtctctcttatctcttatatatagagatagatgtcccccaagagtttcggctagcttcaagggggataagagaagagagaaacagaaagagagagagagagagatgaaggaagaagatgatgatgatgataatgatgatgatatgaatgagaatgatatgggaaatgaggggtttgggacttgggtttataacaactaaaagagattggaaagccaacgttacaaaagacaaaacatagctgcaaacatggtcccaccacaccaccacctcccctctttagcttctcacttccagaaatgaccacgaccccatgcacctctctctctctctttttaataatcatataattattagtatttatatattcactgtaaattattcgtatcatattgaccgttggatttggcaaaatgttagcacctcgtacgatagattagggagtgtgtgtacagtaagaaatctaaatgtgagtgtaattatgatgtttgattatgtcattaataataaatatattacaaagtactacactgacgttgagatcaaacaagggttttagtggaccgtctgatcaaaaaataaggaatggtgataataaatttttaataacaattatgaaaataaaaagaattgagagagttaatagaaaaggaatccgagtaatgcagtggcagtaagggagtcagaggagtggttgagttattgagctgcccgataatagaaaagctcatttaatatttttggcacttttttgtgtttgtgtgtttctctgtggatttaaactcatttaatttgaacccaacccaacccaataatattttattttattttattttattttgtgaaataaaaaagggaccctcgtctggcgtgtcacttttgagcagaggcgaagagttcgaggcgattgaccgacagatgggggctcaggggtccattctctccttttcactctgctttttcaccattttacccttctccttctcaccctttccttatttactcctctccaacaaacattacaatttacttacttctaacttctcattctgaaaaaaaaaatcaaataacataggcttttcctcaatcaccacttttatttctaccactcaaaattatgagtatatttcaatattacaaataataaatttacattaaatttagaaattactcttaacttttttttattattatttttcagattatttaatattaattaatttaataattattttaaaatattttttattttattatgaaataataatgtccaaattactaaattaattattatcataaatttttaattgtatttttttattacattgctttaatttattattcttttactcttactttttttgtataaataaagtttatcccattgaaataagaaactgagaaaaatctcattcactctctcattctgttcttctttttttttttttt

SEQ ID NO: 43869 - DNA, 1990 bp, Cannabis sativa
agcttaataccattttataaatataaaatatgaaaagtctctgtttactgaatagttttccaaacataattacgtattaaaatatttaattaataatgcatttaatttattacagtactgatcattgttcccatgaatttgttgtacacgaatataataatattttgtaattatttttttagctaataataataatcaattaattagatcaaaactaatatacgtggtgaccataaatcatcgatgataaattaatatttacagattctttatgttggtgaataatccaataataatgataataataattatgattattattaatattattctaaccaactaccaattttctctctttttttttttttgtctacaacagatatgacctaaccgcgtcgacacaccgagtcgccgccgagtcaagtcttgccacgtcagctgactcgtccgaaactaagccagaaagagcgtcccaccagatttcgtccacgtcagctttcgaaaacttcttcaacggcgagctaacttttctcaaatcgccgattgttaatccgccgctgacgtcatctctgacgtagaccttctcagctccattggttgcgactccaacaatcttccccagctgtgggccccactcggccagaatagccgggattcgaccacccacgcgcgcatcccaaactcccatacacgcgcgcccaccagactcgttctcctcggccgatgaatacagagacaccactttcgggtttgggctttcgtctaggcccaatccaaggcccaaactatcccaaagcttaacaacgctcttgccagatgagaaatcagaccacgagaattggtccacgaagctccgccgcctacgaagaccaaaattactactctgcccttgaacagcttcgtcagagtcgtacgaagagcacgaaacgtcgtcgtcttcgttatcatcttcatcgttttcgtcgtcttcggtatcgctggtgaaatcataatcatcatcatcttcatcaaaattgggtaaaagggattgttgttgttgttgtgaattagatttattacaaaaatgacattgtaatctaataaccaaaatcttgattctactaattatggttccaaaagaagctatcacagctagaaataaagcaccccatttccagatattatgagcttgaaaagctttttctctagctgtaattgaaacaatctgagaaagaaaagatgggttttgtaaacaagtaactccggcaccgtcgaaattactaaatctgttaataacaggaacctccataatttcaagaagaaagagaaatagtatattaaaggaagaagaagaaagaacaaggaagaggagattttgtcttgtgaggggttttggtgtttatataaagaaaaaaataatgattgaagtggtaataacgtaaataaaataagtttggaaatgtgagatgacgacgtggcagataacggttggaggttagagatggaattttccgtccacgtcaagagagtttttgagaacttttgggaatatgaaaggagagattggaatgggttggtcagagctgagtcattttgggtgggaatagcaaaagtggtaagaggggtaatggtgtgtagactagacaagaaggatatatattctgaccagctgtgcttagaatttagatagatgatttgtatatatatagaattattatttataggtaaatagtattttagatatgagcattactgcttagtacctttttaattttttattgcgattgattagcgatactctttagtgtgtttcgaagtaattgtgtaattactaagttggtaattacatttgaattcttaatatcttatttgacaaaatagttagtaattatatgagaaaataatattttttaatagctaaggttaatatggaaagtttttagtatttacacagtgtaaagtgtaattagaacctcataattacttccaattacacaattacagtgtaatt

SEQ ID NO: 43870 - DNA, 1200 bp, Cannabis sativa
tactaagtttttccaatctctacataaatctaagaaaacttctcaaaatgtttagttttaaaaatccatgcagctgtccaaaacctgtgagctattattctgcttagcttgtttaaagctggctgattctacagattgtatatttgtcttgaatacaacattttcatcaaataaaacatctttactaagtactaacaacacatatattttcctctaacaaccatattttatagccttttataccacttagataacctaagaaaataattacttttagctccaagattttttgttccttgattaatatgaacatatgcaaaacaaccgaaaattctaagatgattatactgtaaccatccgaaacatttttgaccacattcgaggagttggttagtttcattcctctgagcttaatttctttgataattcttctggtttccagcatcattggttctccgagggcaatttcttctcaaatgacctttcttacaacaaacccagcaggttcttctggttcttgattgggatcttcctcaacttttgcttctattaggattaccctttctctctgtgggcctgcatctcacgttcaacccttcaccattattcttggagcccctattattagcttacaaatctaggacttttgaatatgcagctcctacaacttcatcaattgtcaaagtgtccctgccatatctcaaagtatctctatgttgttctgttttggtaatgaattcagcaagaagatggcttgatcctcttcatcaacctttaggtttcaagatctgttaccaattttgtaaactcatcaatagacttgccttcatccatcttgaaaccataatttttttttactcaaacacatccagttcggtaaagctttcgtcatatacagctgctctagtttattttacatctcacatgctgtcttcttcaaaacctttctcaaaatctgatcacttagattaagaatatttgtagtttcgtacttgtattccttgcctttttcaagatttcttgcttgtttagggtatctgccatttttctttctcctttcagagcttcttctaatccaagattcccaagatgagcaattgtcttttcaccccacagactgaaattgtttttgccattgatttcctcctcctcatacttctccaaagacattattgaacaaataagaaagaaagaaagaaa

SEQ ID NO: 43871 - DNA, 2516 bp, Cannabis sativa
  modified_base (106)..(106): a, c, t, g, unknown or other
aacagaaattgtatattaaacaatcagcatgaatactacatgtaaatataaatgacttctaatcttctattgataacaaattaaattatattgaaatgagttttanttagggcataaaatcccaacaggaagttgttcactcctactggattccattcttgaataacctcaatgaaaactatcatgatttgaagtagcttactgtcaagactcttaggcatgggcctgagaccatggtgagaagttggcttcactgacgttaccgacctactgatgcttcaccaaatagttgactttttctaactataacttggttgaagctgacttagaccgattggatgaactttctgaaatcatttaggcatttcaatctcgggtccttctttgtgattgcaccaatgatgtttttgacccttttcatgaggcttccttttaatggggatccacgtgtcatgactaggggaaaatacggacaatcaaaggtgttgattattttttttttttttggagatttgtgagaagaagacaagtaatcctaattttgttcattatctgtgtgataaatgttacaataccaagcatatgaaaattatcaaaataaaagaacatttgtttaagaacggttcataagttaaaatatatatatattgagccatatttataatatatattttagtaaaaatatagcatattcttatgagcattactattaggtattaatggtgtctattactactatgaaataacagcttataagtatttagcaattttcacaataaatattaagttaaaatatatggggccgatattaaattcctagctcttatcaattctctattcttattgatctatttttgttcctcatgacatggttgataaactttgttgttcatgctttaggccatattagtgaatatggttaggagttagttagttatgtcagttgtgcgtgtaggatagagttttttactcttcacatctggccaatcattttaaataacaatcttctttttcatgccttgtatacactgaattcatataaatataattcatcgttcaaagttgtgtaacaatttcactcaagctcacttcatctcatatactattctcaacttggtattggagctttggttccattttttttcctttttttgttcatcgtgattcttgaagctctcaacaatggcctcctcctcttctgttccacgatctaaaagctcgactttcgctactactcttcttcctccaattgtagcagagcttgtgattcaacatcacctagtccctctcaatctatgtctcaatcacactaattaggtgtactgttgatctcaagtgctttccactgctcgtgctcattgacttgcaggatttctcactagttctcgtccttgacctcctgtaaccattcttgatcctcttgataccacgagagtagtgtcaaatcatgccttcaatgactggatgtgtctagattaattcctcatgagctagttgttcaattccatcttagaattcatgcgaggacatgtagctcaatgtgcctcatcttttgaactctggaatgtgttgatacaatttctttccaatacatcttgagcaagaattcttcaaccctgaggcatgctttaatcgacaaagaaaggatctacaccaaactatgaatacatcctcaagatgagatgcctggctgatgctctaatggtaggaggacatcaaattagtgatgatgagcttatcctctacattattggaggtttaggtaatgaatatgactctactattgccactcttacctcaaaataattcattaccttgcaagatgtttaattcttgcttcaaactcaagaactttgacttgagcaatgacattcccctgctaccttggaacttcacaatcttatagccaactatgcctccaaaaaaggatcgcctgcatcctctaactctaataattctagtcatggttgaggtgcttatcgtggcaaaggtggtaggacaaactacaacaaaaattgaggtggaaatagaccaatttgtcaagtttgtggaaaatttggttacactggtataaaatgtatcaccgatttgatctgagttatcaaggagaaggaaactctactccaactgaacttacttcaaacgaacctcatgcacttcttgcatctgcaaccacagtggttgatccttaatggtacctggacagtggagcatcacatcatgttgtgtctgatgctgaaaaactaagtgaggcagtggaatacatagaaaaaggaaaatttggtagtaggtaacagtgattctcttctaattcttgctattggttcttgctcaatttttacatctaaaacattacatttgcacaaagtcttacatgttccttccgtacacaaaaatatcaccagtgcttctcaatttactcttgacaatgatattaatatcttgtttgactcttctcacttttttgtgttggataacgtcacgaggaaggtttttcttcaaggaacacttaatca

SEQ ID NO: 43872 - DNA, 1927 bp, Cannabis sativa
taggatgaaattaatactcaaactgcagcttatatacttgccataagttaagaaatactttttttttatccattaactaaaaatactcatattatatttcattaaaatgtactcacttttgtgagtgagttgttcaatatacatttattctctatttaattttgacacatagtttacattaacttaaggggtaaaataggaagatcatttataaaagttagtatatctctaataatataaaaataaacgtaaaataaagtagatatacaatataattttcttatactttatatatatttgctaagaattaagattcatatggtaatgtgattattatgtatttaagcttttttcttattggcagataccttttaacaatattatcattttactaaaaaataaaaaagattcatatggtgaatctgtgactgattatttgttattttcttttaaataacaatagaaaaagaagggtgtgctctttttcaattgattattaaaagcgaaggtaagttatagcgtagacatatatataatgtaatgaaacaactaattgtgacaatccaaagtgtgaagtgccaaaaatgaagtctgtgccctgtgggcctttttatgtcaatgtataccatgtaaactactaaattttccagttggatggtggctaaaatagttggtatggttagagatttatggtgatatttcgaaaaagggaattatgggctcaaccttaaggtttgggataagttgtgccttctaaagtcttgtgatgacttaggctttcataaatttgatgaaataaatcaagtctttctggctaaattgggatataatatgttaattggagccaactctctttgttgtaagattttagaagcgaagtacttgcggggtaattgtttccttcactttttgactcatgcttttggaaaaatatagtgaaagctaaatcgacaattccaaaaggtgcttgttagttggttgttgatgggaaggacaccaaaatttgagaggatccttgggtcactcatggtatcgatttttaccttaaatacagtgttaatcctttgcatgactatgtttgggttgctgaccttctgactgagaacggggattgggatctccagaaacttaattacttgtttgatcatgatattgttgcagccattttgaaagggggaaaacctttagggaggggaagcgattcttgggtttggactaaagaaaggagtggtaacttctcgtacaactctacttatttaatccagacccttgatcgggctccacactgtgtaatctcgccctccctttggaatagtaaaattctaaagcgtaataagattttgaggttgagtatcctctcaaacgcgcttccaatcggttccattttgaccgctagatttcgtattgataaccccctgtgccttatatgtggaagcgagaatgaaactatggagcatcttttccttcggtgtaattcagcttatcacttatggcggtcctccccgtggggtatttttcctcttttagactcgagtatccgtatgtgggatagggttaagttcatttagagtttaaaagataggggcattgaagtggatgaggcgtttctatatgcctctattgtggtggacactatctgttgggcgcgaaatgataatgtacataatgataatttggataacattaaacataatattgactctattttgttttgttacacagattatagagatgttatcattccaactcatactcccacccgaatggatgcttggtgtcatcccccgcttaactagctcaaactgaattgtgatgttagagtggggatggagtatatgtgcattactgttgttgctagaaatcataaggggatggtttgttgggcagttacgccacgacttgattttatttatgctctctgcggtga

SEQ ID NO: 43873 - DNA, 2868 bp, Cannabis sativa
agtgggacctgtgctaccccattctggcttgccatttgcttctgctgcagctttcaaacttttgatcatgtactgcatatgataatcaagattcatgtcaattcattggcacataacaaatacttatgattggtttcttaacaaaccatagacaatacatatgtgaactagtcctaatacaaactctatgaatgaatttctgaatggtaaaaacagtaccttgtcaaaacactggaaagctccaattcctgggaatctccaagtaccattctgctctgggtatgaagggtaacgaagctcaccagctggacccattcccacttgaatttcctgataacaaccaaacatgcaaaactcagtcaaacaaaactctctaataattgataacagaatccgtgaaagaaagtaaattgaccaaaataataattataagaacaaaagaatcggctacattactcaccacaatggtgtcaccaagaaggtgtttgaagttgtctctaaatgaacgcatgaaatcagcgtaacactgaacaggagtgcgacccttaagaactgggatggtgtcacatccaagggaaacgtactcgtagttcctctttccccattgatcagtataagcaaggtcctggtccttgtcaatctcctccaccacccacttgggtaaaggaatactgtattaaattcaaaatcaaaatcatcagcaaacggattccatcagaattttaaaaatgaaataatagaaagagtgttaattacataaataaaaaggaaattggtgacaccagttaaattctactcgtacaagtaaccaatcgaccccgaccctacaaaattactaaactaatttgtaaacctttcaaaaaaatccaaataatctaagaaactttgtgttgactcttaaaaactaattttaaactgctaaacactccaaaacaaaaaaaaaaaaaaatactgtaagttctaaaattgttttttttttctttagagaagcagtaaaaaaaaaaaaaagccaagccaaacagagcattaaatattaaataataataatgtgaaatactaaaatttacgaaataacctcacttataaatctacgatgctatttgcttagctattattttgcttaataaaattttcatcgactaatttacaaaacagtttctccatgtcaaataataattaacaaaaggttaaagcaaataatactaataacaataacaataatacgtacgtgcaagaatcgccaacgtttccaccacactgatgaaaagacataacggcttgaaccttaagcccattcttcttagccatctcgattaactcattgtaacctccccaattgtacgatcccggtgagtctccctcgaccagaccccaccacacatccatcatgatccccaccacaccagaactcttcaaagcctgaaaactcgcattaatcgccttcttccgattcaccgtatgattcatcgtcacactatctaaaggcatcatcacataaaccggcaccccactctccttaccatgcgcaccacgtccttctctgtattcagacaaatctccctcctccaccacatacggcggagccggttctaaataatccgtcgccaaataagcctgacacgcaaccgataataaatccgcccgtattcctccgtacaccggactccgcggcggagtccgacaaggactcagttgcctagacctacacggactccgcgccggcgttattctaccgtcggcgaactcaaccggcatctgaataatcctgcatcgatgactagtcacgggagatttccacatcgccgttaccgatgaacttgatcccgattctcccgaaacagtagttccagccattgccgcaatccgaacgatattcaacgccatctttttccgatcgtcgattcagagagaatggaattttggaatgggtttcagatttttaaatttggataatggatacaatgaaactgaatggggtatttataggctgttaaaatcagataatcctaaaaataatctctgtttaaaccgcaaatctctcaataattataagccacgtgtcaatttctttttctatttcacgtgggaataggtcaaatattcaaatttatggatggaaaattatatttttaagataaaaaaatttaaatttgatattagttaaaaaaaaattatatgagtttaaatttaaatttgaattaatattttttttttatatttaaatatgatacagtttaaaatttaaatttatttgttatggagtttttatttgtattctaaaaatttgtaaaaagatcttattttttattttttgttgtaggaaaaaatattatatatactttaaaaaaattacgaaagatacaattaacaaaataatagtaaaaaattaaaaatattaataaaaaattttaaaattatttgagtctgtataatttttaatagggggctttatacatacctcataaaattataagaacatcacaattttaataatttttattttatataaaatatatatatctttattcatattatttttttttttaaataattcttccttgtcatggtccaaaaaaatatacttacaaaataaaaataaagtatttatttaaaatattaaaacaaaaaaataaaataaaatattatatgaaatatttttagaaaaaaaatatatacttttaaaaaatatgaaaataaaattaaaatagctattctcatattaaagaaaataatttgaaaatataatttttaaaaaatattaaaagtaatttttaaaaattaattaaaattaatttttttaatattagagtggcaattccccttataactttatattttatgaggtgtagataaaattagaaaatttta

SEQ ID NO: 43874 - DNA, 3742 bp, Cannabis sativa
  modified_base (3715)..(3716): a, c, t, g, unknown or other
ttgcacttgtggtgctatgaaactttttttggattactataaccagagtcaagttcttcaattcttgactggtcttaatgaatcctttgcctcggttcaagctcaaatcttgctcaatgaacccatccccaagcattcccgtgtgttttccatcattattcaggaagagcgccaacattctcttggctctacttaaaccattcctctatctactgcttctagctccatgcctaatcatccaccaagagccaagaaacctcgaccatcctgctctaactgtggcaaaccaggtcacaccgtagacaaatgctattttctacactagttttctcctggttatggagacaaaaaaagacaagaaaaagggaaagctaaagtcaatcttccagttcttctaaccctgatgcagatggccatttgattccctcagatctttcaatccaatgtcaacatttgatctctcttctcagccagcaactcagcaacaacacccctcatgttgatcttgctgtaatggcacctgctgcttctaaccgtgtaggtaaaaatcaattcttatctccatttacatggattctagatagtggtaatactcaccacatttgtttcaacatcacttgctttagttatttttccaaccatattcttccccaacatgtcattcttcccaatggaaataaagtcttggtgcacaaatctggtactgttgttattaaccctcatataactcttcataatgtgttatatgtcccaagtttcaagattaatcttttatctattgctgaattggttaataacaactttaattccattactttttatcaaaacaattgtgttatccaggatcttactcgaaatatggtgattgcgacaactaaaaaatatggcaagctattcatgctgcaacaagatacaccagcaattaatgcaacttttttttagtttgaaaataaacatgtagaccattagcacaatcgccttggtcacctttctatgtacatttctaatattttcaataaaaagaatgctaattcttcctcttttaccaatcagcattgtcatatttgtcaattagccaaacaaaaacgattaccattcatttctaatcataatcttgccaataacatctttgacttagtggatatggatatttggcgtccatttcacattacaagtacagaaggatacaagtattttcttactattgttgatgacaagtctcgtttcacttggacttatatccttaaaagtaagtttgatgttcaaactctcatacctaacttatttaatatggtatgcatacaattttccaccaatatcaaagttattcgtttagataatgctaaagaattaaacctacaaactttctatacatctaagggcatcctacactaccattcttgtgtggagagaccacaacaaaactcagttgttgaaagaaaacaccaacacatcttgagtgtggctcaggctctaagtttccaatctaatctacctttggtatattggtctttccttgtaaaaaatgccacttaccttatcaatagaactccatccaagatgctcaaaggcatcactacttatgaatctctctataacattgctcctaattatgagcacttaaagagcttttgcaggttagcttatagctccacaattctctccaaaagacacaaattctctccaaggagtagagcttccatctttattggctatccacatggcatgaaagcctacatgctcatggagaatgccacaaaacatattattttctatgaacaaatctttcccttagtttcctcatcatctccatctaacattgaccatctgtttcccccaaatagttcttcatactgttatgccagtgcataaatttcataagccaatcaacacaaatctaatcctcaaaacaccacatattaatcatgataaacatcaagagatagttgttgtctctaacaataatacacctgcatcagtctctactgatgcaaatcctatacctgttgtttttccagcaactgcaacatcaaaccagcagccccttattgttgcacctactactggccacaccaaaaaaacactagcacacttgccagactatgtatgccatacatcatccactacacacctcattgaatcttatctgtcctacattaaaccaattttgagatgttgtacttacaacatactcacaaactaaaccaaaaaattatgctgaagcatccttatttcagcattggatccaagctatggacaatgaaacccaggccttagaaaaaaataacacttggattatcaccaagcttcctcctggccacaaagtcattggctgtaaatggttttacaaagtgaaaataaccaacatggggatgttgacaggttaaaagcattccttgttgccaaaggttccaaccaacaacatggcatagatttttcccaaacctatgctcttgttgccaagtttaatactctaaaaatcttcttggcgcttgtagctatttacaattggcacatccaccaattagacatcaataatgccttcctccatggggatctccatgaggaggtctacatgcaattaccactagatataaggcccctcctcactctgtttgtaaactaaacaagagtatatatggcctgaaacatgcctctagacaatggtactcaaaacttagtaccacattaatccaatatggcttcatacaatccaaatctgataacaaattgttcattaaacaaacaacatcagatttcttggccattctcatttatgtggatgacatccttgttgccagcatcaatctctcaaacataacacaattcactacatccattgatcaaaaatttaaactcaaagatcttggcaaacttcggttcttccttggccttgaaatttgtcgaactaagggggcatttccatctcccaaccacccttcaccatgcaattacttgcagataccggctacataggtgctaaacatgcttctacacctatggaaactaacctgaaactcagtaaggtcaaaggcactataatcacagacctgactgcttatcgaagccttattggaaagttaatctatcttactattaccaggcctgatattacatatgcagtcaaccatcttagtcaatttttatcttctcctcgagttccacatcttcaagctgctcatagaaaactgcactatctcaaaaaaactctaggctaaggcattttcttcccttcaaacagtgtccccaaaatcattgcttatgcagaaactagcctatcccagtcaatgttcagctctcattctttgttgatgccgattggggaagctgccaagatactaaaagatcagtttcaagatattgtacattccttggtaaatctctaatttcatgaaaataaaaaaaaaacaacaagttgtctcacgttcttccgctgaagctggatacagagccatggcaaatgcaacaccagaactaacttggatccttgcaattctcaaagaatttggtgtccccatctctccaacacctaagctatattgtgacaacacgactgcaatccacatcagtgaaaatcatgtctaccatgaacgcacgaagcatgtggaaattgattgtcacttcatccgagaaaaggtccaacaaggttctctctaactgatgcacgtctcctctcacaaaaacctagctgacatatgttgggttttatgccctnnataaaactctttacaatctgattagt

SEQ ID NO: 43875 - DNA, 2399 bp, Cannabis sativa
  modified_base (2342)..(2353): a, c, t, g, unknown or other
ttaatcaacatacttgtcagtagatctaagatcctggtaaaataatttccaacactattaagttcctggattgaagttaagttatctgtctccataataacattgctccattgcttaatctatacccaacttaaggcctccttgatacttataattttagcaagaattggttgaaccgtaccaatcctatacgttgcaaatccttcaatgatgtggccagcagcatcccgggcaagagcaccaccatcgtaaagcactcttagtagcaaataacacatcatcaacattaattttaataaaatcagcttttggtttagactagttcgcaccaccagtgacaactctaaaggggattaaaagagggtcgaaacgtcattcacagacatatttccattgctgcaggactgactttgcaatgtatatggtggcagcaatagagtttgacttggcttgccataatagttcgtttctctccttccaaattgcccaagttttagcaccatcttcctacgagagacacaggagttgtgcccactataccagtaaaccagttaggaaagtctggagaatgcaaatgttaaggtgccacaccatcgagattctaacatgatattgcaaaggagcagctgaccaacacatgggagatggattcctctgcaacatcacaaaacacacagtttgttcccaatggcacatgtttttaatgaagctgagtgcgtgtgggtaggtagcctgttaaagccttccaaaagaagtgatgaattttgggggggatcttcaatttctagatcttgctccaacattctaaatcttgtgtagaaactatgtgttgcttttaagcttgcagaaagtgataaacactcttaacagagtagaagcccgagttctccatagaccaaaaatagtgatccaaggtagcggaatcactaagacaaataccaagaatcaactcctggtctctctcgacaaacaagtcctggataacctccacatcccattttctcctttcaatctacattaagctattaatagagaagctgcctaagccaagtaaaacaatcatgacaaatggattagtatcatgtggaagccatggatctctcacaatactaattgaggtgtcaacccctatgctaacatgcgccccagctctaaccaactctttagtctcatgaattctacgccaaataaagctcgaattgttgccaagattagcagacaaaaaagtaccatggggaaagtaccttgctttatacacctaacttacaagagagttgccattcatcaacaactgccaactttgcattcctagtaaagcaaaattataatcatggagattatgaaagctaagaccaccattatttttgctaacacagagacaatttcaactcatccaactaatcccacgtgaattggcaaatttagaattctaccagtacttagccatcatcttttccaaatcaccacaggttttaaggggtaaacggaaaacgaacatggtgtaattaagaagagcttgtaccactatcttaaaaagcaggtccttactcgattgtgataaaaatcttccttcccaacaatgaatctttttctgcattttctctttaaggaaattcaaaatcgttgtcttgtctttttttggcccataatgcaagggaggccaaggtagaagctgtttttatctgcctcagtcataccaagcaagccacaaactctttgctttgttcccaaaggagcattgcaactaaagaagatggaacatttcctatagttaactttttggccagatgcttcctcaaacgacccaagtaaatgaatgacattcgaagcttcgtgctcattagcctgacaatagtcgataaatagcatgtgggaaattataggtgctctattagccactttagcaaccattaatatcaccattaacctcaaattgatttattaaagaagaaaatccttcagcatagagccaaaataaatacagggataacagatccccttatctaatgcccctttgaggggtaagcaaccttaactctcaaccatcatggatcaccgtataatgaaccgaacaaatcgtagctagaattagtcaaccaaatgactagaaaacccatctttaacatcatggcacagagaaaaccccattcgatgtgatcataggacttactaagatctaacttaatggccatgaagccctctttaccttgcgtcttcctcttaagataatgcataacctcaaaagataccataatgttgacagagattaaccttcctggcataaaagtgctctgagtatcagagattacaaggggaagaacttttgggttttatgccctaannnnnnnnnnnntcaatataatcagatttacttgttaatatagatcagaaataacatt

SEQ ID NO: 43876 - DNA, 2752 bp, Cannabis sativa
ggaggagtcttgtttggatgttatcaaagaggcttggtttatgggaggtgatcaagctagattggtgggaagcctcaagaaaactaagaatgctctacagatttggagcaaacacgtgtttggcgatactcagaagaatcttcaaaagttggaggaaagacttagtctgctgcaatctcataagaactaggaagagattgctgtggaagaggctcaaattcatttaaggcttaaggaggaatgggcgagaaacgagctatgttggaagcaaagatcgagggaattaaggttggcgcaaggagatagaaatagcaaattcttccacgcctcaactacggttcgaagaaagagaaaccatatttgggccttgcaggatgttgacggcaattggaaggaaagggagaaggaaaaaggggctatactgaatagatttttcttggatctatttagtacttctaactcgtgcctgccggtggatttagagggactgattaatccttctatctctgctgagaacaatgcaaggctgtgcgctatcccttcagccgaggagatatacgagcaagtgtttcagatgtacccgctaaaggccccggacccggacgggatgtttagggtgttctttccaaaatgttgggacacagttggaatgacagttatccaattagtgcaagagttttttgtgagtaaatccctcgatcctgaactaaatttcaattttatttgtttgattcctaaaactccgaatgcttcgaaggttgaggcctttcggcccataagcttgtgtaattttgtctataaggtgatttctcggattttggctcagcggttgaaagttttgctggattcaattgtttcaccgttacagtctgccttcattccatgcagaggaattaccgatgcctccattctagctcaagagattatgagtacgattaaaaagaatagaagcaaagggggtctaatggcggtcaagattgatatgcacaaggcgtatgatagggtcgagtggaagtttttggagatggtgcttcgggctcatggtttctcggaacgttttattgagccagtgatggtttgtgtttccagttcttcctatgcgatcctgctgaatgggaaagctcttaaaaggtgtagtccctcgcgcgggttacgtcaaggggaccctatatccccgtttctgtttattctgtgcaacgatattttggctagattgattcaaagagcttaggatgcagtgcaaattaatggcattcggattgcgagaggtgtgtctcctatatcgcaccttatgttcgcggatgatacagtgatttttgcgcgagcaagtgtaagggcggcgatttgtttgggcaaatgtttggccaaatatgaagaatggtctgggcaggcgtgtaataaaaataaatcggggatacatttttcgaaaggatgtgctaggggaggagaagggaaattgaacaggccttttcaattaatgaaaaaggaaatttgggcaattatcttggcaacctctttgtttttgccagaagtaaatcacatgaattccaatttttggtggaaaagttaaaagggagacttgaaggatggaaaatgagaacgctctcatatgcggggcggatgacggcgatcagttcggttgctatgtctatgcctatttatactatgtctaccttctctatcccaaccaatgttagtaagaggatggatgctctggttaggaagttttggtggacaggtggggtggagaaagccattttcttgcaaacaaatgttgggatgctctgtgccagccaaaacagagtgggggattgggctttaggcggtttggagatatgaataaggcgttagtggcaaagttggcttgggaagtggcgtgcaatgagaataaattgtgggtgaaggccttaagagagaagtactgctcttggctttccttttggagtgtgcagctgagagagtcggattcaactatttggaaagatattcttgtggcgagacaagttattagagaaggagcttgcatgattttggctaacgatcaagaggtggatatctagtaccaaccgtggattccgtggatggactatgatgagtttaggaatgttatggaaggtgtccgtgttcgggcaccaaatctcaggacggtagcagatctaattcagggctcatctttggaatggcgtaaagaatatgttctgtacctgtttggtcgagaggagggagagagaatcctttctgtctctctgtctaatcgcctggggagggatactttaatttggaaggaggctcgggatgggaagtttagtgtgaaaggggcttattggtttgagcagggtttaataacaaccatgaggtatggagactgatatgggatgggaagatgcattcgaggcagagtcttttgttgtggagactgtgtgcgggtgtcatgccgactaaagataaatatgcaggtgggagtagtcaggagtgtgttctgtatggctatacttgtgagtcagctgaccacttatttatgcagtgtcctctgtcaagagcgttatggcttggcgcccctttgccagtgaagtcggacgaggtctctggggatagtatgcttattaaggtgttatcttaagtgaagggactgtccaagaaccaatgttttcaggccctggtaagctttgcggcagtgtgcgatatagtgtggaatcataggaatgcagtcattcatggggtgaagtgtgtggatatacccggtctgctaagg

SEQ ID NO: 43877 - DNA, 2332 bp, Cannabis sativa
agagagagagagagagagtggggtgtgttatgattgagagaatcagtgggtgggagtgacccatctctaaccatcttggctttctgtagcggacgaggggggcgagtcattaatgcttcgaatgtttagagaaatgagagagagagtgagtaataagacacaactaaaactagggtttaaattttaattatacatacaagatattactactaaaaagatatgagatgatgagatgagatgagatgagatgagagagaataatatatatagtttatatatatataaaatataacatggcattgtgggaatgaatgagaggacatatgcttatttaaattctgtcgtatatatcgacacaacaaagtatcattcatatataagtgattgagagtaaagatgcttttgtcaatgccaatttcctctctctctctctctctcccttacatatttatatcatatgttctctcatttatttttactagactattcataataattcatttagacgtgttaaaatgggaattttttctactactaaagtaggactactagataccctttttaagtttttgaatggtaataataatgacaagagtagtaaatttttgtcaaaaataataaatgacaagggtaaatttgatttattatggtactacgtacgtatatttaatatttacaggtttatgctatgattgttttatatatctataatatctgattttaagaaaatattactattattattatcaatatcattaattaaatttattattactaatcgtaagtgtaattagaatttatatatacattatacatatacttgatattaaatacaatgaagttaaaaaaaaaaaatatgtcagcacaaaaataaactaagtagaatgtaataacttgaaactggcctctccatttttaagctggctaatttgaaggaataattacataacataccattttttataaaaaaaaaattacatttttacgtttaatgaattttttttttattttccgtaaaaataatacaaaaacaaaaaaactacataaaaataacatgaaaataacatctaaataacatcaaaataacaacaaaaaatcaacaacaaattaacatgaatacaacataaaaagactgcattttctgtaaataaaatcaaaaaattcgtaaaaatatttaaaattccgtaaaattataattttgtaattttttttgttgtttttgtgtatttgtgaaattattaccaatttgaattgggtcacagaaaaaaaaagttctctcatgacattatttctgctatgctattgtgggtgtttataatttgttgataattagaaatgtttgtatttataatttcaaaaaaaaaaatactagtatttaaagttattaaatagtacattgaaggtgattaaagaagctcttaaaactagatttcttaacctaactaataggaagttaaacatgagaaatgtgactattttaaattttattaataatttataaagggagtttgttgtaatgctttctagcagtagttgttggtaattaataatatattttctttttgataaaaaaataaatagtatgtataatacaataacatagctagattactctccgataaagaaatcacatccatccaatttgttgagaaaacaactcaagtattatctattttgcacgaaaataacccactgattctctcaaatcagctaaattaataatgaaaataatagttttaaaaaaaaatgaaaataatatattaaataaaattaattaaccaacaacttactcattgataaataggaaaatattaatatttattcaaattattgtgaggattattgttttaataataataataataataaaaacaattaatcaaaaaaaattccgtatcaactaatgtcttgagatagatacctcaatcttatatatgtaagcatttacaacattattcatgttattaccactattttgtgatcattctaagtttcctcctcccatgaagattagacatgttttctctcttcttcctatttttatttcttagtttttactgtatcaagttttcaaaaatactgtattaaagctttcaaaattataaaaatactatatttcagtaaaataaaaaataataactctaaaacaacttataataaacaacatgaaaaaatataaaacaacaaaaaataactacaaaacaacgaaaaataataaaacaatacaatgacataattacaatatgcaaaacaatattaacttctcaatatgtttttatacagtagaacctctattcaagaatagactttggaccaagcaaattatattcta

SEQ ID NO: 43878 - DNA, 3347 bp, Cannabis sativa
aaaataatttccaacacttttagccaaatccaggttttgagtttactttggactcattcgctggcccactttgatatctatccgtctttcgattcatgtatatactttttttacagatatttttctgctattaggtattaggcattctgcacgagtccgctaccattttatgttattaaaagaggaactcaaagtctagtttgacttcaggaaaacccctttttggggtgagccccatgggactgatcggggccggttcgtttttgattgagcttgatggaaactgactgtgaggaaaatcgttggagctccgatcaaaaattcggacaatgatttgcatgtggatgatatatttgaaaattgtggctaagtatacaagtgcttcaatggaagaaactagagagaagaggtgagagagagagagagtaaagagactaatttattttttgattgatttattaaattatttttttcaaaaaaaaaaaatattattaaaaaataaatttacaaataatctagtgtagtcaaaatattagctattgttatttactcatctatttatcaccattagatttattatccattagatttagatttattatttacggttgtaaaaacttcttttatcaacggttgtaaaaacttcttagggacaaaaccaatgtatgtactatagatatgtcctatatttatttacttacgttgaaattatgtaagcatgtggagttcatgattcattatttactagggaatgaaaaatatggtaccttaatggatagaaaagaaaattgtttacaatatatacagaaaaagtgaagacgagattggagatggcgaaacctgagcgtctgagactttatcaaatatttcagcccccaccaaacgacaatctaacggttcattgagggactgtaaagacgtttcaccatacacacaacacatcactgtcactaccagccttaggtgacttaacaggaccacccctcgtaatgaagggcggggtcatggagaagaaccaaggttcgaaccgcccgccttgtccgtccaaaccgctcttttctctactcccttctcccccactcctgtacacattattccttgaactctccatcccacctaatacgacgtcgtagctcgaacaacgcttcagcttattcccactcttaatctccagctgtcttctcacttcctccagaattcttaacgtgtacctctccgtacactccccgagttgaatcagcgagtgacccgtcgagtgtgaccttggcaatttttccgctgctctcggtctcggcggttcattttcgttaacattgatcaccactgaatgatgatcatgatttgattcgctgagttcagctctagagccttcccgatttgactcgtccatcgactcagtcgctgcagccgtgacggaggagcaacagacggtgccggactccgctgaaagtagagtacggcaaacaggacaagtcacgtgagaagataaccaggcttcgatgcattccgggtgaaagacgtgatcacattttggcaataaacgcagcgtttctgagtcgtcgaattcgctcaggcaaaccgcgcactcgagggcgccctttccgatcttgaggtctttgaccgccgaatagactaagatcggaaaagtatcaattacggccggatctataccttgacgcttgcgtaatgctctggcggaattacgcggtacgtcgtcggcactggtttgggaatcggcgcagcggcggaggtaaatggagaagaatcccatgaggaagaaggcgcatacgaggaagacgattacgattgccattgacgagttgaagttggccaggtaaccgtaggagttgttctgtgactgcaactcagggccaggctgcgcatcgacacggccgaggtggaatgtaacggaggagaagaagaaggtgactgcgaagtggggccccgtaatgccatgtggcggattgctggaaatgatccaacggtggagattgtttctgtactttttcatttattaataatctaaatctggaataacagagagagaaaatcggagatgtaatggatctaggaggagtgggaagagtaaagagttttttcggatatgagtgttcgattacattataggttttttgttccacgtggcagataaaaagacgttgaaggctctggattggtttggaggcgaagtaagggaaggagattgtgatgtttgttgtaatattgaaaaatatattgaaatagttgttattaataagatttacaaaaatttaacagatattaacaaaaatgatgtagagtgatgagggagggtctggatgaatctgatcctatctgtatcatccggatagaagaataaaaaatacaagtaggaaaaaaaaaccacgggcgtagacagttgacagaataagtcggttcgaactgatcaaaacagacaacaaaaaggtatgtcaattaattaaaatccttggatttttgggtgtgggtgggtctcccacgtcataacttttgttcacgaagcccagcgaaatgaatagactctttggaattatgccatttaatgatgctcgcagccatcatcaactttgtttaggccattgtatatacattatttgatcattattatcatttataagtcacagaatatatatctgaatacataattaattaagaaaaatgttacaggacccgaaatgtaataatattattattaatataatttaatatttaattttacttattttaatttaataaaagtataaaaatcactcattaattataaaagggattaaaatgccaaactatagaggtagtactagtacccatagcaattgttctttaattaagtatgatcagtcactcaaaaatttcatgtatagtcgatcagcatgtgaatttcgattagaattcaataattaagaatctaattcgttttgtagtatttttttattgctatcaaattacttatcgacaaaggagtttcagttaaatattcgtaaatatttttgcccataacgaagaagtagtgatcatatatgtatatcatacattaggtactgtttgggttatggtcgaatgaggttggagagctagaaacaggagaatggtttaagttttggataacgttaatgttagatatgattcataagtggtatttctaagaaaaattattagataaatagaagttttttttttttttaaacactgcataaataaaagttatttgtagatatatatatatatactaggtagatattacctgcgaagttacatatgttaattttattttagtttttagtattttttaatatactttgtaatagtaattaaaaaaattattattcgtc

SEQ ID NO: 43879 - DNA, 4703 bp, Cannabis sativa
accttcctcactgttcaagttcccatgcttcattcatattgtcacgaccactattatttgaatgcttcccactagaaacaactttattgatatcaaaatcatagacatcaacttcaattcatacccacacgaggtggctttagtaaaatgtctttattatcaaagccaagttgaatacagtaagaaatagtatacacctaataacaccaatgtggggatgttcataaaataaaaaccatctcatacagtttacgccatccattaaaaagttttgatacaaaattaacagaagttcatgtttgactacgctgctagacaaaatacatggctggtttcgatcattacatcattcgttcttcttacttaatttcatctttgcttcaacatctccactgtaagggtaaacatgataagcatattgctgaataacagagaagacaaccatctccagacataccaacacattctgaatagcttcctcaatgtgttcaacatccaaccagaaatggtgagatcgaatgacgccaagggcaactagtccactaagcactagtccctgcaaggagccaaaatcaataaattttgttagaaagtattctatcaatataggacaaggatgtaatgaaaattacatagttatttaggaactgattaatggcataaagtatgttgctggcaaaaggatagtcaggtacctccggtgctataatgattgaatctaaaactctactttaattccaagctgataacaaaatttagttgagaatagccagttaattaaaagttaaagtgtcattaagatgtcttctcggtctcatgccaaaaagctacatttaagtattcattctttatgtcaaaatccttttgcaacaatatggtgtatatttccagagtattttcaagtactattaaattcattttatgcgaagaaacaaacgttatagacccaaaaacttatatgttgtacctgccaaaagcagaagaaaacaatccccttgatgcacatgaattttgaaagtggcttgtgtggtgccaactccttagcaaacacatggtaaaacaccacgagtgagtacaaggccagtgaaactgatatgttaagaatgatggtgaatgtccagctgagccagcttgggtaaattccaataagttgaaacgttatcatcaagatggagcaaaccggcctgatgactacaaactgccatgtccaatgtttcaattgcttcagagtcttgtgatttaaccggatagtgtgaggctgcactttatgtaaaaacacaataccattcaatgaataagtgtacgatttcatgttttcattacaaacaaaagattctagaaatattaatatctgtgtcagattcaataatgttactaaattgaaactcagatcataaatgagaacaaaactacttgatcacctgaaaaagagtcatcgggaacgaatggtgaatttcccttcctttgatctcatctggcacgatattattgctaatggagatattcagataactatacatcaaagccatgaacttagcgatcacctggacatagatagagaagtttattgaatatcccacaatgttttcataagccaaagaaggaaacagcataaccgataaagaaacaactttgttggcaccactcaccagagcctcatagcactccttaattgattccagaaacatgaaacaaagctttgcttccttggatatccactaagcccacaaaggacacgacggcatataatggagccataagaattatagttatgatggccttctgttctttcgggttcttccagtagaacaaatgctgtgacaacaactgaattgtgaaatgcatcgacagcatcacgcaagatgcagaccctagcagagtcatttgggcaggactcatcgaactgaagtccattgtttaagaacgagataagtaccgatcaaaacctgcaaaagaaaaaaaagaaaaaaaccttcagaacctcttgatttcagacgctctaaacatcttaaccaaatcccaattcccacacagacaaatgaagaagcctaaacttaaatatatagttaaacaaagcatacaacccagtaacacagtttttctaagcatcgtgattttaagatgtacagtactaaaaaaccatttttttcaaagacccactaagattatcgtcacaaacaaaaagtacatcacactaaatagccgaaagaagatgagaatggtgattgatccattcagagaataagaaggctactcgatacacaagtctaaagcagccaatttgcggtttaagggtgtgaataataaaattgaaattcggagcacatgaattattataaattgagaggcaaagacgcggaaaaactcaccgaagcagaagaaatcgagtagatcaaataagttggagatctcagacctaagtaattttcttcgtgttcgaggcctcagggacgaattgaatgaaagccatgctctgctctgcaatttcttcacatttgaatcaagactactctttaccaataagatttcgccacgttttctgtgggactacacgattttgttcttttcattttccctttatttatacataaaaaatcatgaataatatcttagcaaaaatgtgtaaaacttttgactaatgtgtacaccttataattatatctcttttggtgttatggctgaatttttaatttttgtttttgttttttttttttttttaatgtcgtagttatttaaaatattttatgaaatataaaaaaatttaatatgttaaaaataaagttttattgaatgcataactcttttattttataagtatgtgaattgattttttaaatcatatttttagcgtgttaaattttttaaatttttaaaattttacaagatactttaaacaaccataacataagcaattgtaaaaaaaaaaaaaataatttaaaaaatactcttaaataccaaaataaaaattgtaatgtattagtacactatacaccccttttaaagaaataaaattttatataatttttagataaaatatggtaccctaatatataaccttctaaaaatttctgaatttttatatgatatctcatcttatcttcttttactttaaaagcaataatgatatacttcaaataaattatttattgcaactaacatttctcatttatcatcacccatgggacaggcaaccaaccccaaatggcccaacctctccccttcatttaattttatgtgccgactgaaatgctatagaagatgcgtccacgaagacgagtgagggagatagcaattattgcttgcttgcaatacattgacccgttcattaacttcgccttaattagaatttgtgttatatgtttatgtaccaattagattttgtgctatatatatatagagttgtaaatatggatctaattttttgacacaatataaaattgacacgagtttaggaagcacgagcacgaactcatacaaaaaaaaatattggcttacaaatttgaaaacacgacatataagcacaaatagaccaatctaaaaatacattatatttaattattttataataataataacaataataataataataataataatatatttactaataaatattcaaattttaatcattctaattaatttttctttgattttcttatgtaattttttgaacatctaatttataatttagtaagtaacttattaattgtaaaaaaaaaaagtataaaagtgaagcccgagttcaacccgtataagaaaactggctgacctatttataaaaaacaaatcagctcaaatgaagtacgatacgagtttaaatacgacatgaaaatttagatttatgaaccatgtcgagtttactctttcaaatattagcacgatatgacacgatttttatttgtttatggaccaacacgacactactcatattataagcttttcaaaatataaataagcacgacacgacttgcatgtatttacacactatagttatgtgtatatttgcactaatatcttaacccacattggctttgttggtgagtttttaaaagctttctgaagcactaaaattacttttccttctaagtaatcaataaattttatctactcaattggggttatagagatagttaatggttccacacttctcttgacaaagaaaatgtcttaagtttaaatctccccttctctaatgccaaaacaaaaaaaaaaaatatcttccaactctaacttcttttttcttttattggaaaataatgtgctattgtttgtagtttaaaataggcttcaaaaatacattgcacattattttttttattttataaattacattaaatataacatttattttattactaaaattttattatagactgaaaatgactataagacaatatgcaaatattatgcatttatatatatatgagctctctttttttattggtcccatttatccaatttgttgagctgcaagttcatcttaaatctcatattaatatgatattatttgctttagcataaaattttcacgtcattccactctaagaatatgccaaagattgttggaggaaatattttggtgcagcttgtgctagtgtggaaggaacttttgctggctggtttgataaagcacttaacaatgggcaaagtgacaataaggaagttgctgtgatgctttgctggagtatatggagaaccca

SEQ ID NO: 43880 - DNA, 2823 bp, Cannabis sativa
cactagtgtggaagttcttttcatctagatggggactttgatcatagcccaagtgtacttacaatttatttgattatgcaaggagggaaaaagccttttagttttttttttttaattggtcatctaaccatgcttatttcttaagaagagttgaagtgatccggaaggaacaaattagtgggactccaatattcattgtggtacaaaagttaaagaaagtcaaaaagatgttgaaggactttaataagatggagtatgtagattctcagctactcatattgaaactttacaggatgtcttgagataccaagaagagttaaataaagatccatttaacctagagcttatggagaaggaaaaagaggcctgaaacaaacaacaacttgttgcaaagaacctcatgtctatgctttcccaaaattcaaagccaaagatggtgatgataaaatcaaattattccaaagaagcttaaaataaaaatgggggcaatgcaattaagtttaatgtaatccgaacagatcaaggggattgggtggaagattcagctaaggtaactaatgcttttgttgattttattcaagtttatttgaagaagaaataaaaggaagaaggaaagtaaatgtgaatattatttaagaaggcatgtggtcattaaagcttaaagtgaatatcttttaagaccttatacatctaaagaagcaaagcaagttttattctcgattttagattcaaaagctttgggtcctgacgggtttaacagtggtttttccaaaaaaaaaatggaatattgtggggcatgacgcgactgaagcggctatctcctttctccattgaaaagaaattttgaaggaaataaatagcataaccttgacacttgttcaaaaggtaaaatgtccagaatttgttgcgctgactttagacccattgcaacgtgctatacaaaatggcaacaaagataacatgtacaaggttgagaatcattcttccatagttggtttcttaaaattgaagaggttttgtgcatggaagacataatggtatgccaggacttgatctgccattatagaaggagcaatgataaagcatcttgcatgatcaaaatggatctaaagaaggggtatgactctataaattgggatttcttgagagagatgttgataactctttgtttttctaaagattttgttaagttgatcatggtatgtattaaaacccccaagttctccatcttttttaatggcactttacatgaatatttttcttctaaaagaggattgcgccaagaagaccctacatctcctttaatttttgttttgagtatggaatatctttccagaatcttagcaagaacttcgtcttaggagaactttaccttccataatgggggtgtaaagccttgaaactcactcatatttgctttgttgatgacctgttgttagtttgtaatggtgatgttcaatccgttatggttcttctgagaagttttaagcagttctcctcaacttttggcttacaagaaaatgcaaacaagtatgttatcttttgcacaagaatggagagccaagatgtgcaacagatcttgaaaatctttggctttgttcacaataagctattgttcaagtaccttggtgtgcttgtctgttttgaaagaatttcaagtgtggaatgcaaagttctaattgagaaaatagttgcgagaatcaagatttggagctctagacacctttcttatggtggaagggccactcttgtcaactccgttcttgtaaaaaattcatttgtattgggctcaagtcatgatattactgaaaaaagttatccaatctattgataaaatctatcaggactatctatggcatggaacaacagtgtatgaatctcctggtcaagttgcgtggaaggaggtgtgcaaaccaaacaagataggaggtttgagattttgttgtcggcttgaagagtggaatagagctgccatcgagaaacatatttggtccttggtataatttgtgggagaagtgggtccataaagtttaccttagaggttcaaattggtgggagtataaactccaccaagacagtagctggtattggtctcaaataataaaagtgggagatcatatgctgaattattatacttggaaccacattgagacaatgaagtttaccatttcggaagcctgcgatagcatgtttccaaaggttaacaggcaggtttggtttgtaaatcatgtttgggagagataggtcatccctaaagataaaatagtggcttggttagctgcttggatcaggttaaaaataggagacaagcttcttaaataaggagttgaaagttcaaccttatgctacatatgcagttgtgatcaagaaattaactcgtgaacatctgttttttaaatgttcattcagccaaagattcttggaccgtaaattgaattaggtaggaattgacgttaaattgggtagtaatcgacacttatcaataccgcttcaaagggattgtgaactggattagaagatggaaacaaagtaaaagaaagatatttacatgctcattattaatgcttgtgtgtatataatttggagggctcagaacaaggctctttaggatcatgaggctccaacagttaagagttttgttagcttaataaaataaattataagggctagaatttactctttaaagttaaaaaaaaaaaatagagaaaaataggtattggtttaaccaatctttttgagttgtaaagttggaatcttgagctattcaagataatagctgctcatgtacagttgattttgttgaaggtgaaatataattactta

SEQ ID NO: 43881 - DNA, 4259 bp, Cannabis sativa
actagcttttggttgtatcaagtggtatcagggacaggtagaattgacgcccaaaagctatcctctccttatttagcttttgagagtgagttctgcctaaatagttgtatcaaagtcatgcactctcaagtgggactgatgttgcttaaggggtgacttgtggagtaagccatcgactgcagagtgggctgcagtggatgtcggctccaaaggagggtgtaatgttaggattccacattgaccaagtatggaattgcttagcagtatataattacttgggcaccctcctctcctaggataggtttcgggagtgagttctacccaagtagttgtatcacatgcctaaatagcctttgctccttaattagctttaggcttgtgtattttgactaacttgtattgttttgcaatttctttgattattccattattgttttgtaacaaaatcaatgtgttcatttttgcaggaaggaacatcaaactattttaagggcttgatgcttattctctgctatctcatagttgcagccagtttcttcgtccacgttgacccttcaaacggtgagaaccgatccattttttaatttccttaaccattttatctaagcatgttgcatacatgcaaacacgcgcacacacatagtcgcttttgcttctaatttcgagagacaatcgagcatttccttctcggtcactagtgaatggagcaatgaaattagaatactttagactgaaaatgtagcctccatactaactttgcctccgaatgcctatctttaacattcttgtctataaactacgaaatgaatctaaagagatgccttcaagccattcctgaaatatatgcagtaagagttattccttacaccataacatatcatatctttcatctgtaaaaaatctgttattaaaagtcaagatttgctatcatttgcaactaagcataaacattgtagaaactagaatgggagccaactctccatgtctctccccagatgattcaaaaccataaaccagaaaagtaaaccgaaatcgcttgttattttgagattattagtgtgttgagtttgaaatgagtctatagcatagtttgttgacactttttctttgttcaattccattttggcttatgtttgtataaactgtgttttgttgtgcagcagatgataactagagtttgagtaaagtggcaaagtggctttttcatgtgggaaatatagaaaagatgtccactacaaaatggtagcaacaaacaatttatatactttgaagctgcatatatttcattcttgtggaaaatccatttcatctttgcagctaagaaaagttttcttttttcatcattgtataatagaatttgattatgttatgacattaacaaatattaatctctaatctttttgggtggggagagttcttcagttttggtgaaattgttatcattctttttatgatgcttctcataaatgcgcacactttgatttcgattattttcctcgtccctcaaaaagatctaatgcttttgcaatgttttattcatttcattatcggtatgaaataagggcgaatgtcgtgtagctctgacaccggtgttgttttattatagaacaatatttaactattgttaatgcaatggcattgctattaaacataacactatcataaaatagcgttttataaatggttaacagttttctataattattattaaaataaaataggtagaagaattaccccgatagcaataagatatttcatagtgatgctcgaaatcgaaaccatgaataccctttagctagtaccaaataacttctccaacaaaattgctcaatgaaccctaaaactcgaaacttatttttctcaatttttatctttttaagactcataaattattaacacatcgatataatattaaacacgataaataatttattccctcattattcaattcaatatgtctctctctatatatataaataagctatacaaagaaaaattctcataacaaatgaggcatgcaacacaagacaaccacagaggatgataatctaaaatatgaattggctgtacaatctcaaaacatagaattagaaacataaaatttgagattctgacaaatcaaatcagatacaattacaaaacaaacaaacaaataatgttgtcgattttatcattgtggcttatagtagccgccactgccttggtgaggtggaggagggtggtatggagcttgaaccgagtaaggaggccgaggcatagaacccgactgttgtgggtgagtgtgagcgttgtagtatggaccccgccacccagggtatgcgggttggccgtactcgtggctagctggaggctgttgttggatctgtggaggcgggtatggagttcctgaggaaggtgggacatggtaaggaggaggcggttgttgtggggagctatagggagggttcgggtgagcgtatccagtcatggctggctgctgctcgggaggaggctggtaataaggcggtgcttgtggacgtgggtcgatttgtggtgaatttgatctctgagtttggtggcttgctgaagagtaggtgttgttgtatggacctgcgggtttagagtcctggaagttgaggcctgccatgtgcctctggacatcttctatcatttcccgacattggatatttctagtcattacgaagtcactgcattgctgtttcacgttcgtgattgcgtcctgtttcattgcaagaaagaaatcaacatgtaatagtgtagaacatcaattttaaaagagagaaaaatttcaaataatttacctgaagagtgacgtaaaactttaaaccctcgttgatgttgtccttaatttctcgaaactttgctatagcagcttgaatttgctggtaacatttctcacgagatgctgcaataattaagaggtaaataatagatatataaacatgaaattgagaagaatatagttctatagagctatttttttattcttttgctatgcatacacttaaaattgcaatttcggaagtgaaatataagatcgattaactggcagaaatggagacttgagagactaaaagtggcagcaaatgtagatgacaaataatgtatgtacagaggtgagttaatggcgagcatttgttacggcagagatctatttctttgcctaattagccaccaagatcatgctttgcaagccttcttatgtgacagcctctatttgatgataatactaaattattcatataaaatgaaagcatgataaaatcaagtacattattatagtaaagagccttagttagcacacattgtgaactaggaagggttacctttgtaatcttcgagattaaagatggcggcaaagtcctcattttgggcctgaaaaatgataagtaaacacaaactcacttaactgaagttccatgatttaatttatcgataaatgataacaatcactaacatggtcacaagaataaatttctatagtgtttccaagaactttcaatagtgtgaaattaatcgagaaaatctcaaggcaatttcgccagatccttaataggattttagagtggaagaacaattattgttgttttgctatagttattaatgtgtaaggcaagtttaatactaatttacttgttatacaacaatataacagcattcctcatggtagattgttgtatttcataaacaaaattcgaaagggaataaatttgtaacattggttcagatttgacaatataaaatgatgtactaatacagcaggcatggctcagactaaaaaaaacaactctcatataatataccacgaaaataaaataataaaaattgaagcacaaattatggtttaatggaaaaaagacctggatttgcatcaataattgttcttgtgcatcgatattgtgggcaatatcttcacatatatgatcgtacttcgctatctctttcctgaaaaggtcctcaaaggagccagttgatgtcatcaactttggtaatatatcatcctgaagtcatatgaggaacaataagcacataacagcataccataattcaaacagcgaagtcaacaggaacaattatttattgtaacactaacaattcttatccaatgactaaaaaatgcatcccataataaagcaaatagtcaagagatttagccttgtatgaagaaccaaatttgaaataaaaccctaaactggtatagcagaaattcgggcacaccttcctcttcatatctttgagcatgtcttctagaacagccc

SEQ ID NO: 43882 - DNA, 1445 bp, Cannabis sativa
aatgaccttaaaagttcagggagtatgatttggtacatgtcaaagttcagggggtaaaaatcctaattagccaaaaaaatatataatttgtgacctaaggcacaagcctagccagcctatgttcaggactgagcccgggtgttaactaagaaaagtctcaaagatggaagaagtccatttgcatagccttagaatgatgtagattttacaacaaataaacatatttaagatatagaatttaaaaatatctttcattccaaatttaacattaccatttatacttaaattacatgtaaatggtctaaaattatatcttcaagacctctagagtatcatcttttacacaaatagttacttatataagtaccaaaaaacaaaaaggtggagaggcctctagtataatcttttactcaaatagttacttatatttttgtacacactatcaaatgaacatggttaagaaaactttgagcaatgagatttgagtgtcttatctcttttggaagttaagaaacttgataccataagcaaagacaaagaagaagagaagaacccaaccaagatgagcaaatatgacatatataagaaagtcatactcaaagcctaaaaattctttgaggaactcatccactgcctttggttttgcacccgaaatttcgattagagtcttcttgtcaccaatttgggatgtgaaaatgccatatattgtccatgctactggtgaacaccagtagtaccacctccaccagattggaattagctgcaattatcattaaaaaaaaaaactcaaaagtgttaagaacttgttttgatgttattgtttggttcacaaaaagtgtcataatattatgttataatatgaatgtgacaaagctgcatcttcttatttgtaatcttgagtttggcttgtaaattggtaaaaatagtacccttaactcaaatttgaagtaaactaaaaaatggtctgaatttttgttgttggtcttatgattggatttgtgagaggagaaagtggaaaaatgagatggaagagaccaaatggttgagttgggtgtaccatattttttaaccaatttacaaagtatagggtcctatttgtaattgattgaaattgagattaaagaagaaattacaaattttatgggttttatactttttgtacaaaaatatggtttttttttcaaaaggttattttatggaaaaattgaagaaaaagttaaaaaatataagaaaattgagtaaaggtaactaggtactcttatgagtaagggttactattatcaaagggtaactaggtaccttatgctattttttttcatatatttttttattttattttttaaattttccataaaataacttttttaagaaaaagccatatttttacaaacttatactttaaaaaccataaaaaccaaaaccccccttaaaaaaaagcacatgga

SEQ ID NO: 43883 - DNA, 3425 bp, Cannabis sativa
aaaaaaatcgtgttaaacgtgtcacattcgtgttaagcggatcgtgtcgtgtttgacccgtttttatttcgtgtcaaatcgtgttgacccgttttcgacccacgtctaattttttcaaccctaacctgtaaaattcgtgtcgtgttcgtgttcgtgtgccgtgtcgaaatccgttttgccacccctaatatatgtggtgctaatgagattaaccacattagcatttcgttagccatggaataaaactaattaaacaaaatcctatattcaacaccaccaaaatattcaaaagtttgagagaattttaacgacaaaaatattcaagggtgcaatttcgtagtggtattatttattttctttttaaaaatttaatctactcatgtcgcatatataattacagtgtaagtaaaagaattatttgaaattattgacactaaatataaaaaccttgccaaaagaatgcgaagagtaagatccccttctcttcatctctcatatgtggagctgtcttgataagaatgattttgattttttgttctagtcctaacttagcagcactggtatgtcaaaaataaaatgagggtgtggaaaaaagaaccaaatacataatatttggtggattggtattggaatttctgtgaatattttaaagaagtgcaacatgctaactcttaacatctgcaaagagaagacagacaccaaataatagactctctcagttgttagtataattaaagtcaatgtagatgcagatcgaagatatataacggtgaaatatgcagtgttgcaatagcatttctagtggtgtaaatgcattggtgccaaaagcagggtctttcaaagatattttgatagtcttttcgctgaacttttgtccttaaggagttgctacgcaattcggaacttgggttggtcaacgtggttattgagtctgattgtttgaatatcatttctttgactatgggcaaaactagctattgtagagacttgaataatatattttgaacattaaaaatttaaaggttgtttggtttcataacttaaaaactctttttaatttttaaattatgaatatagataactaacggggtttgtttttaaaaacaattttttgaaaattgagttaagaaaaaaactaaaaatcaaaaacatcgaaatgttattttcagagtttggggtctgaggcttggtcaaggtccggagtctgaggtctgagatctgggatcgagcccgagtccaaagcgggtcgagtttaggccatgattcgagtctcaaggccagatctcgagtttggatttgggtgaattgggttcatgttgtgatatggtataaaatattaaagttttttttagtaaaaaaaatctaaaaataatttttaaaaaatactagccaaacaccattaaattttttaaataataaaaattattttttatttacacaattttaaaaactaaaaatacagcaaaacaacttcttaacttttagtattagctttgctagtttttatttcatttattgggatggaggctaattggtttgctcattgtttagccaaatatgttattgataatagattttgtgctatttggaataaagagtttccctttgttgcttgtgttgctatcaacgcagacttgcctattctgatttaattgtttcttcttttattaattagctttccaaaaaaaaaaaaagtaaatacaaaaaatgttctaagagtttttatgtttagggcctgtagctttatattctcaattcaaacaagtttaaagtttaatgatcacatattcatatttacatatagtgatgtaaatttgtgtgtgtcgtgctagcacgattctttttcgtgtttttcataatatgggttatgcgtgtcatgccctaaatatgagtcatgtcgtatcgtgtcaatattttcaaaaggtagactgggtatttttgtgtcgtactttgctcattttaccaaaaaaataaccctgataaagtagacatcaatgtttgatacgtgacaagaaggaaagcattcatcgagttaagagccccaggttgtagcagttaactctaggaaggggcactagttgtacgcccaggttgactctgagagctcaaaaatgggtatttggatctcgccaaattgtttccaagtaatgatccttcaatattctgaaccaccaagttaagaagacgccacacttaaagcttgggcactgaaagatgtcgatgtggcatcccaaaagtcaacacagacgcttagggtttcacctaacactcaagtggacatcccaggctagggtttcaattttcaggtccgtcttagtgcaaaatgcttgaactttttacttagacatgtcacaaatatgctagaggcaccagaatcagaattaaaacacttctagtttgaggcacctgggcacccagcgcctaggttgatatattgttaacctgaggcacttccaaccacgtttttgaggatgtttcctgggcatttttttcatcttcatccaaaatgaggaaacaaatgatttcaaaaataaaaggatcaacctggaggccaaacaagtgaccaacgcacaggttaacattaggcctggtcactcgcgcacatgttgtcattttgtcaacctgggccatttctaatgaaaattctgacaaagtctttcgggcatattcttcattttcatcaacaattactttacaatccttaaatttgtgttgtggcacgcttttagtcaaggatatgtgaccactcaatttagtattgtgtgcttaatgaccacttatcatgcctttttatagctaaatccttcatgacgatatgctagcttgaactagtactcttataattcttagccacaaatactgtagctgatttgtcgcaaaatttttttaatggcctaaaaatataattctaaactctaggcctagtatgaaactctataatacaccatacgagatgtatcttcaaaataataaatgaatttgacttctataatagaaaaaacaattaaggttccgcataatacagcttactagtaatcttaaagacgtaatcaaatgttgattacaggcagtgaagtacgttaaaatctaattggttaactatatttctagaatgtcagttcatctcaataaaatatgtatgaatataatatttagtatcttaaagatacctcatcactttgtatgaaaaataaaatggtattaactttatttattttgatactacttaacaatctagaaacaaatataatgtaaagtcctattcaaactcttaggcatacattaggcttctaaaaaatagaagcaaataaatgttcttaatttattctcattccagattattttacagatagtggtttgagttaaatttatcacacttaaagataaaagtaacatgagatgaataatacataattttatttaat

SEQ ID NO: 43884 - DNA, 3796 bp, Cannabis sativa
  modified_base (171)..(175): a, c, t, g, unknown or other
ttttataaaaatacaatattttttgaaagattttcgtgtgacagtatttttgtaaaagctaacttaaattccagtaattttgtaaattttttttttaataaaaagccacaagtttaaagctctctctcctaaaaccctgtgattttggtttcctctctctctctctctctnnnnntctctctctctctctcccccctaaaacccatggaaactccataaacaaaggaaccttattctcccactctcacaactctcagacccactcttctcttcctcttcttcatcttctaatctgttacagaggtaaggcactctctcacaataaacatatgtatatgcatatattatatggttccagtaacaacaccatgtgtttgatgaaatgcctatttacatatttttagattcgttttgttttctattggctttcatatcattttgatcaaaacaaataatttcactttgtaaggattaattctttatctaaagctcaatgttcataccaaccagtgattgaaagcttcaatagaaagaaacagtttcaagttaggataggattgagccagtgtgattgaatttgaaatgggctccaatggtggaacaaaaaggttgcaactttcatcccaaacgattcaaaagctcaatgttcagaaatttgctgaggcaagaacagctgagcttgagtctcttcactccattgtggggaatcgtttgaatggggatttcaggtgtagacggagtaagagaaggcgaaccacttcctttaatagcaaagcagctaagagaagaaggaacttagatgatgagaagaaggaaaataccaataccaataccagcagcagcagcagcattcctcgtcgtcgtagtcgtcgaagagctgaactgaaaataaaccctgaagaggggttttctgttacacaggatggaacaaagaggctaaggacacacgtgtggtatgccaagagattcaccatgacaaagctctggggttattatcttcctttgggtcttcatggaaggtagatatgtatttctttttcctttaaagaaaaaaaaaaacattatctttatctttactaagtatttttagattgataacaatgtcgatattgggtagctcaaatagtcaagcatgtggtttgctcccacaaggtctgaggtttcgagtccctcttaggtacctacataataattgctatagttttctggtctctaaatattgtagggttaggcggggatcctagtttcgaaaaaggaaaaccaatgtcgatttcgggtgtctttgagtgtttggatatgtatttctctcttttttaacttttaaaaacattatctttatctttaccaagtgttttagattgataacaatgtcgatattgggtaccaaaaaaggtagctcaaatggtcagacatgtggtttgctcccacaaggtcggtatgaggtttttcaagtccctaggatacctacaaacaattgctatagtttcttggtcccaaatattttagagttaggcggggatgctagtttcaaaagaaaaagagacaatgtcggtattgggttgtttttgagtgtttgttaatgttttcattctttattatcttaaagtttttatttttcaatctttgtaaatgatgaggcagtggaaggggttctagagctttgttgaagtggttcagaaatggagctctaattcatgatgcaagctattatgttcccatccaattggagggtccagaggtagtgattccatcctaaacacacattttttaactaactgatgttttgatcaatcatagccattggtttaggcttcaggaacttactgaaagtttcatcgaaaataaatattagcaatattcttatgttcttcatatccagggctctttaatgtcaattctaaacgcggtgctagtgccttctcaacctggttattccggtgatgtttccacttctatcatttatggtgccatctatgataatgcaatggttagttactgtccttttctttttcattgaggtggattaaggaattggctatgtctgactaatccccatgttgcagctccaccatattggtgcaccagtttctaagccgatcgctcctgtaacatatatgtggcgtccttgttccttacgaaatagggataatactgctgctgctgctgatgctgttaacagtctaggatctgtgaaaccagagactacagatttagggtcttattttcgtcagctttgggtctggatacatgcttctgctttcgatgaaggatacggtgctcttaaatttgcttgccagaaagaggtaagctttgacattctttcattcttaacactttagagttagaaatagtctatacaattgaaaaacaatatttgaagtgaagtcttactatgcttacaaagaaagaagaaaaaaaatgatgctaattatgttaactctctttccaatgtaaatttcagatggaagagaaggatatattgattcgttgtttttcacgtgagggtcagcttgcgaaattacaagtaatgggatcaaaggcatttgaagttcttcaaaaggcattatctgttactcggtatgttctttagatgtttttgctttgtgtagccaagtttttcgggttaactaaatgatgtttgagatttacaggatatcagaggattctcagcaagtagataaaaagaattgtgtacttgaaaatgaagatcacatatcttctaaagcaatcttatcacttagtgtcatggatcctcgaacaataacgaaaaaaaggacaacccccaatgttccagaggcggtatccaatgacatgccttgtgataatccggagaatgaaattagagagcttgctagcatatcagaaacttcagacaggcgtgaagagtcattcccgtcaagctcagaactcgatagccaaagtacactcgataacagaaatttgtgggatgctagctctagtgttagtcctcctgtagcagagaatattctttgcaaggagaaaaatgaacagcagaagaaattcttttatcttgatcatccaacttcaaccgaggtgcagtgctcaagatgttgtcctattatgcttctcaaagataagaacaaggagggattagctatcgggtaacctcctttgcttggcctattctttcattattgtcatttgctgtgttttggtaactaaaaatatgatctttcattacctttttagctggtctattgtactcccactaagttgggttagggcgttttggattcctctcgtctctaaaggtgctcgtgcaatcggtttgagggagaagcattgggttgcatctgaagtaagtgtgcattttaaagccttaaagaactgttcaggctaatactattgtcatctaatggtttttttgctctaattcttgcagctcggtttgccttgttttccttcggattttcctgattgcaatgcttattcaagcctgaaagcaaccgaagctgcttcctttgatcaaaaagagcaacttcatcctttatcaacacgacccttgagagttcccgttcttccaccatgggatagtgtccagattactctaaacaaactcatcgcgacaattggagatgacaacaacaattcagcatcaaattcggatagtggttgtacttcattagacagtttggtaccaaggacatcttccttgctgactaatttcttgaacgaaatcaaaggcgatcatttacttctatttcctcgaatagcaaataagaagaaatcattttcgaagttggcaaaggatgaaagcaatcattttgagcagggt

SEQ ID NO: 43885 - DNA, 1709 bp, Cannabis sativa
  modified_base (1349)..(1357): a, c, t, g, unknown or other
  modified_base (1669)..(1670): a, c, t, g, unknown or other
aaattatttcggatgctaaaacagatagaagtgcatcaatatattcattttaaaagagtgcattatagaatttttctatatatattcgtattctaataattattttaacaatatggatctataattaatattggaagcagcctaacaaaaaggttgtaaaatgagttggtgtgcggtgtgaccattattgatttaatttcaattttgtcaacttctctaaaacgcacgattcattatttattatttgtttgttgtagttaattccttatcccctttatacgcatgtacatatattatatatgtatatgatatatttaattttgtgatgaatatgtattagtgaacaagttatcaaccatcaacagtagtacttcaaattagttctactgctttcaattatcaattatcaattacattattagtaatagttaagttaaattaacaatctatataagtagagtttttattggatcaacaattaatttgtgcatggttaacttaaagtaaataaattgaaagaacattatgtgtcattttgaagatgcaataatatacatatatagaaaaaaatggtgccccttagagtagaagtagagtctataatacatgtaatgttcttgttaatatatataataatattatgatgcttctataaataactctttaaaaataatttatccatgaactttttatttatattttgacattttagagaattttttggtttaatttttttttataattatgtacgttgtagttatttgaaacattctacaaaattttaaaaattttataaaaatttaacttgtcgaaaacatgattcaaacagtttgttgcacgcgagaattttattttatacgcgtgttcaaaccatattttcagcgtattaaatttttctaaaattttcaaaattttacagcatttactaaataaatacaaaacccatgccaacacaacccataccaactcgtcgaagtgtcatagtcatggttttacgataggatgatttcaatcatcttctcttcttcaagcacattatagccattacaaaacccaaatcaaatcaaatcaaatcaaatcaacctacccctttttcgtttttgaattctctcttgtgaagctatgcatacatctaagatttgatcaaggacaatgctttattgaagtttgctctagcgatttcgagtggagatatagttatatgtaacagatttgaatggcctcctcctccctctctgttgttttatcggctgtccaccatctctcccattcaagaattcatgcacacacagcctaaattggagagtttttcgatcggcaagcctgaggcaatggtatagacaataaannnnnnnnnaagatattactgaaggagaagactattgtattgatcttcttgattgatgccaaagttttctcattatcacatcaacgtctacttctgtgaggggttcaagagcagtcttctaagagtggttcggttcggctcaacgacgtccttcttttcagatttttgttttcatttattaatttactattattaatttaattccaattaatgtttttatggggttagaattataaggagtggtcgtgtttatgtgtgaaaactaatttagttttttcattagtcttgtcttttgacatggttctttagtcttgtcttttnncatggttttttagtcttttctttttagttttttctggtt

SEQ ID NO: 43886 - DNA, 1548 bp, Cannabis sativa
gggttgggttgggttacaacccatacttttcacagttacaaaaattacaaaatttaaatatgaatatggtcacaaattcatacctaaattaaagaaaatagaaaaatcattcaaagtttattagtcatccaaaatccaagtcttaaaactgtaaaaaaaattgtccctcataaattgcctatgagtaactagacaatcacagtgagtgactacaaacttgaaaaaaataacatataatatttccaacatcatcaatcaagaatatcaagtcttctccttttggtatccttgtcctcaagttcattacctacaattcaacatagaaaattattcaaatttatgggcaatctatataaaactactatatatattctataactactaaaaggaaaacagcaacaacaaaaaaatctgaacataaatcaatgagcaccaaaaaattgaacaaataaagtttgaagttagaaaatatcaacaaatacaagttatatgttaatcaaatcaaggagtggacaaaatacctttattttaattattcccagtcaagcaaaatagctatagagtttttatttactagttggcattttcaacattaattctttgagctcaatctgaaaaaagaaataaataatataacatacaaatatatctcatgtttatatatacataaaaaaaaaaatctgaaactttttctaaaacaacataaacaataaaaataatttgattcctttttacaataacataaacaatatgatcaaatctaattataaaatattacactacaaattaaatactcatttaataactcattatataaaaaatcagaaacaaaaataaaaaaaataaaaaataattaaatctgcttttttttctaataaaataaaaataacaaaagtttctaatgaaataaaaataacaaagggaaagagacgaacatgggtgttggactgatttggtgtggtcctggacggagggagattgttgttgagtgccaaatgagagagcaaagagagtcgtgggatagagtaccgtcgccggcccttgcctgagatttttccagcaaaccaaaaaaaaatgggtgagattgcgattgagaaaggtcatccatcaaacttccagcaaagaaaaaaataaagattagagacataacttaccttatttgcacccttgtttgagtttttatggtagaaaaacttgccaatggtggtgtgtgtgcgcgtcaggtaagggaaagtgcaaagctgatacagagaaagagagagagagagagaggagggaggcggcatccttatgtctactagggttaggaaattcatacaaaagagagagggagatgggctgtgtttgtctgaacaatagaaagaaaggtgaagtgaaggaggcggtctcttagggttaagttagggttaggaaaaagaataaaatgttatttatatggataaatatatatatatatattaatgtgaatagtgcgggccgggttgggttgattgggccacaaatggctgagcccgtttccgacccatcctacacgggttgacaaatttt

SEQ ID NO: 43887 - DNA, 2457 bp, Cannabis sativa
ttttttttttttatacatgtatgtttttatgatatatatttatatatcatatgatttatatcactatttaaaaaatataaagttgaaactaatatgtttcttagtggtggttgaattgaattttaaatatttcaatctatatatgtttgtctcgttattacaattaactaaaatataacaattaaatgtaaaaataaaaaaattaaagaaaaatattggtggtcggtttggacggattaacccgactaaaccgaacaattttattgggcgtgttactattttcttttttcttaattaatattgggcgggttgtacttagatttttgtaattcaatttttacattgggttgaataaaatgtagcataaaccgaccaacgtacactcctagtaaaaattgatgtaaaaaaaaattacaaaattactatttgtacaaaatatagctcaatttttacatcttctattagagatggtcttacataattaaaaaacccaagcgaagggactacaatacatcacataagctaataaatatatttgtggctaaaacaatgcaactcttataaaatcaagtttttttttacaaatttagatgaataatttaaaactactaaaaaagattagttaatagttatccgagttaataacaaacttcttgagccaaaaaccagctacaaattaaaaatatatatatacaaatggattgatagctcaataataataatttaaagaaatttttatatataagaagaaacaacattcttagttattattttttatgaaaataaaattaaataaatgtaaagtctctaaaattgaatgtgtcacatcattaattagttataatgtcagttaataagcggtctcttctaggcacaagaattctattcaataaagcacctataaacataaataaaaataaaagtaaattagcatattaaacaaacattgacaattaaattaacgatagaagtattcttgagagctatattcctacacatattattttatcatttttagtattacggaaaaatttaacttatttgtaaaatttgtgtaactgaaaatgtcattaattattagaatcgaaacatgtgtggctctcttaatttgaaggcacaagacaagcatatggaggtacaaataagtcactaaaacacatataaatctagctaattggcacactatacttaatatgaagtaatagttgtttatgaagctaaaaaataaatttgcaaccaagtatcaaaatttcaacttttcaatacataagaaaaaaaaaatagtggtgaaactaccaatactttttttttcatttcaattttgaccaattaattatcacgttacactgttacagtatacaattatgttttggtattttgacaaaaagcgaaaacaaactaaattttggcatttagatgaacatcaaattttaagttaaatattaatatttagtttttattaacacaaaaattaaaaatcaaaatacatatttatatatttttaaaagaaatagaatttcataaaaaaaaaaaaacaaatcgtttaacaacatacatataaactcgataggaaaagtagttatactgaaaataaaatctgaaaaaaacagactaatctagcaaaactataaaccactttgttaatttcattaatttgtgccaaattttacactacttacaatgattataatgctctaaattatttgatcctataaattgaaaatattatcctaatagttaacttcatatatatatatatatatatatgatccaattagattctaatttcccataacagagtttcaacaactaaggctacatattatattatatattgaatgaaaccgacttcagctagttgcatatgtgttgttaatattatcgaatttattggattatttgcaggttgtttccactataaatacgtattaagaactgaaagacaacataacctcacaaaataatatttacttattaggccataaaaactaggaataaagaaatggccaattctaacatcaaaactctttatttgattttcatgattactcttcttataactttcacaatcgctgaaagccgacagactggaagtaagtgtttaaaattataaatgtaaaactaaactgaaatatcaattgattaaaattaataacaacatattattcaaagttagtttatatgtaataacacatgcatttatttcttatataattgagcttcttttttctttgtttttttaatggaagaattcaccaaaaaggcaacagtagaagctgccactccaaactgtaattcagtttattctgttcaagctggagactcttgtttttcagtagaacaagggttccagctgtcaaccgatttcttcactgcgatcaacccaaatctcaactgcgatgccctcttcgttggacaatggctttgtgttgatggaacactcacttgaatttcttc

SEQ ID NO: 43888 - DNA, 1442 bp, Cannabis sativa
aatatgatctaactcaatgaacaaaataattttctcttacccttgcggtgttatatactgtgtttttgcaatcgggaagaatgctaatagaccatggaggtagattgtaatgcatattcccaaaggacacttttacaaatgattttgggttgtagtttgcaaggaatgcagcacatcctccggattttgatttaaacacatgagcctgtaatattataacaagttaaagatgtaagctttacttccatacctatatttatagtatatagaacaacattttgtcagaaaacttaagtccaacctgtgcataatttccaagtggtgttacagtaggatctgcagaaactaaagccggttcgcacagttttattgctctgtgcaaatctttcaaatgaccccatttaggttccctcaatagtcctgaacacaaaaaacagtatagacacatcagatataaacactaaatgtgcatactttcataaaccaagcacacattttatcttctggaccactaaggagacaaagctaagtaacaagtaatgtatgtaagtacaagtgtacactatgttatgaccagggatcaatcattcaaagggcatggacccacataagatgggataaagagtcatcctcaacattttcaaataccatttcaagtggttttcacataagaaatcaaaaggctccacgagaaagtcataagaaaccacaaagtcgtaccacttcagcgtctatatgtcaaacagagcacatcaccactttgtaatatggttgacaacttgtgccacatcaaaaaattattacttcaccaacctcaacagaatctagaattttaaactgtagtcacctaccttattcataatccatctaccttaactatctctaagaaaaagtagttggggaaatttttttaacatcaaacattttttgcacatatagtcacataccatattcatcaagaggtgcatcataatcatagctagtagcaataaaaggaccaccggcggttcggccaaaatttgttcctccatgatactgtaaccatgaaaacaagcaaataattagcaattaacttcaattaggtgttacttttagatggcaattcaaaacacaagatgagtaccatgtaataattgatgaatgctccccccttttgaataaatctagcaactgcaaaggccaagtcttcagctggtcggtatggaactgcgccaccaaattctgtatacctgcaggtagacaaggaatgttataactgatatagccaaactaagaatataattcccaaagaaagcaacaagcctggaaattaccagccagtccaggcttcagtccacattttaggtttataagccttgtttggagaaaagtagtcacagtagaatccattgcaggcattgatctgtcaagtgacaagaacactattaagttttcaatccaaa

SEQ ID NO: 43889 - DNA, 2309 bp, Cannabis sativa
ttttttaggctgtggtgaataatttggaagatgcacatgaattgattgatacggccatttcaacatctttgaaggaaagcaaacctgtttacattagtataagctgtaatttgcctggtattcctcatcctacttttagtagggaacctgttccattttccctttctccaaggtataataagattgataatctttatgttcatgttgatcatctttaattaatgtaatgttagttctgatatgatttaatctttatgtagattgagtaataaaatgggattagatgctgcagttgaggctgcagcagagttcttaaacaaggctgtgaagccagtcatggttggtgggcctaaactccgagttgcccacgcttcagacgcctttgttgagctcgctgatgcatgtggttacgcccttgctgtgatgccatcggccaaagggcttgtccccgaacaccatccacatttcatagggacttattggggggcagtcagcactgccttctgtgctgaaattgttgagtctgctgatgcttatatctttgtagggcctattttcaatgactacagttctgttgggtattcccttcttctgaagaaggagaaggcgataattgtgcagcctgatcgggtgacaatagctaatggtcctgcttttggatgtattctgatgacggatttcctcagagcactcgcaaagagggtcaagcataatcctactgcttatgaaaactacagtaggatctttgtccctgatgggttgcctctcaagtgtcagcctaaagaacctttgagagttaatgttatgtttcaacatattcagaagatgctttcaagtgaaactgctgtcattgctgagactggggattcttggtttaattgccagaagctgaagctgccaaggggctgcgggtaaataaatctgaaaggaagatttagatttgcttttttcgattccattatattaaaatttatgatttaaaggtaataatctgaagatggttttgcaggtatgaattccaaatgcagtatggatccattggttggtcagttggagctactcttggttatgctcaggctgtacctgaaaagagagtgattgcttgcattggtgatggaagtttccaggtataaatctacttactcaactacttagccatgtgaaatcttttaacctctgttctgttctctaaatgtttatgttgttgttgtatgccttacaggtgactgctcaagatatttcaaccatgatccgatgtgggcagaggacaatcattttcctgataaacaacggaggatacacaatcgaagttgagatccacgacgggccttacaatgtgatcaagaactggaactacactgccttggtcgatgccatccataacggagaaggcaaatgctggactgccaaggtaaacattgcttgaaaatctcttaaaagaagcaatgcaatgctgctgatttgagaacaatctattaactaataccatatctcatttcaggtattctgtgaagaggaactaattcaagcaattgagacagcaaatggtccccaaaagaactcattgtgcttcattgaggtgattcttcacaaggatgatactagcaaagaactactcgaatggggctcccgggtctctgcagccaacagccgcccgcctaatcctcagtaaacgaagaaaagaagaacaacattaaaaaataagattttcccttaattaagcttgagtgattttagctttaaaaagtttgaagatttcttagtgatcagagttttcaaattatctgtgttcttttttcaatggtttattattgtgcattccataagagtacattccttgtatttttctctgtctcttaatatgttcaatcaagtagattattattttgttttcccgttggcgtattctcaaatatatatcatttttgggttcatttttcattttcatggttgtattatgaatgaggctattttcatgtgttttctaagaggaaagagaaaaagtgggatgcatttgatagagataggtgagtccattcatgatgactcacgtgtaaaaataataagccatacactttttattacttcatagatttttcctaagagtgaggaccaccacacacacaatagaacaaagaccaagacttcatcaatgtgcaccgtggaacattcataccattttactccaatagcatatgaaattggtgtgtttcaaattttacaccattaattatattagattttgagtttacacttagtataagatttttctttttcattctagtctttatttttaaaaataatcttac

SEQ ID NO: 43890 - DNA, 2332 bp, Cannabis sativa
catgagctctgttagctgtgttgtcggctgtgatcgcgccactttcttcctttctttctctatttgcttccttttttttgttctatttggattagtgtttccttatgtaatcattgttgtaggagtcatttttctcactgaaaggattcacctctctttcccatatatattcttttgtttatgaatatgtgaggttgaactttaatgtgattatgtagattttgggatgccactgatccagtcaaaatggatgaggaggcttcatctttgacacaacatcaatcgggagatgttcaccccttagtaaattgtgataagaaggcaagttttataatttggaaatcatcttcaatgttgtgggaaggctatgctgatgtatgtgataatgctgttaatattacaggaggtttcagaccaagtgggagacatcctttctcaggtttcacagacacacgatgtaatcttgtaagcacacaaatatcttataaaccttttaaatcggtggaagttattaaagtttttacattactatctatttgcttactcaactttatcacttagatagttcgtatggaatatccatgttgcaaatgctttcaggacattagacaaaacaatttcctcattggaggtgcagctagcagcagccagagcagccaaaggtgacaacagtgaggaaggatctccggtggttacaagacaaggaaccgagcaattcaaggagcggcagaaggttttctttgttatgggaattatgactgcatttagcagcagaaaacgaagagattcaatcagagacacatggatgcctcaaggttcattaccaaacttgaaagccaacccttcccacaagtatttagtatatgcctattaagttttttttttttctcgacctcatttcaggagaggagctaaagagattggagaaagaaaagggtatcataatacggtttgttattggacacaggtaggttagctcaagatcgcaattgactggcaaattttgtttgcaacttcagaaactaactgaagtgtttttttgtctccagtgcatctccgggtggtgttttggaccgtgccattgacgctgaagaaactcaacataaggactttttgcgactggtatcttgcagacttactttaatcagatttacttgctattgctgaaataatttgataattagttcacctgtggcctgtgcttgtatctttttcactggcgtagtataaatttgcttttgatttggtacattgtcaaaaataagttaatttgctaaatttccttttaagactaaaacattttatacatggtctaatttcattttatcaaaatcatggtcattttagtttttatttattcttttattcaagttacaatcgcgaagcttatacgtttgcttttgatattttggtcatctgcagaaccatgtggaaggatatcatgaattatcctccaaaacacaaatctatttctcgacagctgttgctaaatgggatgctgacttctttatcaaagttgacgatgatgttcacataaatcttggttagtgtatgcactttaatgtaaatggtctatctctggtataagaaagaaaattttgtctgcagtttcagtggcattattaaatagttgttggtgtttggcaggtatggttggttctactttgatgcgccatagatcaaaatctcgtgtttatattggttgtatgaagtctggtcctgtcctggcacagaagtgagcaatgaaatgttttcaattttctcttgttgtcattctcattcatctttagtacatattaatttctctctttctctctcagaggtgtccggtaccacgaaccagaatattggaaatttggtgaagatggaaacaaatactttagacatgccacaggccaaatttatgttctctccaaagatttagccacttacatatcagtaaataagtaagtcttttggtaattcatgtatatttctgtcaaaaagaaaataactgctgacaattgatgttttccaccacaggcacatacttcatagatatgctaatgaagatgtttctctgggttcatggtttattggtcttgatgtcgagcacattgatgatagaagcttttgctgcgggactcctccaggtaaatctttctcttaacatatatctatagttaatatcatcatgaagctttgctttcttgggtacctactattagaattccatattgactgttgatatatacttgatccacttaataatatgagggatatcctcccctaacaagccggttttgttaggctgagttaagcctaataactttcctaatatggtacctaattg

SEQ ID NO: 43891 - DNA, 2664 bp, Cannabis sativa
tttttttttagaaaaaattactaattaattagtagctcgaaaatattgtacattttcatttaataatataagtagtacagtttaatacaagtataacattataattaggagtttaatacaaaggctcacaatttagcaatattaacactacgggtagaaaataataaagttgttaggagtctttaatcttgtaatttataatcttgtttatattaatggtgaaactctttaaaagtgacaaaaatctacacaatcatctaaaatataatattttattttatctctttcatattatttttaactctgttttattttaggagcacttacatacgtttttctactctatccttttaaaattttacctaaaattttactttatacttttacattgcatcatacatcggtttctctatattttctttacattatttaaatattatatttttacatatattttattaattaaaattaaaaaaataattaaacaaagtaaaaaaaaaaataagaacaattaattaaagagtgagagaaaaaaaacataaaatatatttagctcaccacaatttattgaattatacatagacatattttttagaatttagatgtgctataatagctaaacttttagagcatttaagatcaattttaagtcattagctatttttttagctctttataaaacatttgatgagaacaatattcaaatggtatatatacaaacaattctaaaaattattaaaataatattatattattatttaatatattaaataattaaattttataattgtataataataataataataataaaagaaatagaaggtaacttttttaagcatgtttatacttagcatcatttttcaagtaatagcatgaaattaattgttcaagtgatacaaattaattcacaataatgcatcgtcgtcgtttggagagacatagtgatgaaacgcaggaatattttggtcgttcaatcttatcaccatcaaattattattattattattattattattaatattaatagaggaggaggacttctctacttctagctctctatacctatgcaagtacctcttcaaagggcccgcatactcatcgaatcccaaggcggccagagcccagcaaacgtcgtctccgttcaccgtcttccgccgctcacggcggcacttctccgatgcctctccagtgacgaaactcacgaactccgacacgcactcttgcatggtctccttggcttcctttgagatcttagcgttgggtggcagtatttgcttcatcatcctccccacgtttgctatcggtagcagccgttgatcttgatctactaacctgtttacaccgtccgatgatgattcattgtaattggatgaaacaccagccccgattattgacttatccatctctttatatatttatatatatgattaattaatttagagagagaaaaagaaaagaagagaatgaagtagtagtactatagatagtaccacttcgtgtgtatttatagtactactacttattatttattatatgttttaggtaaaaagaacaaattaaactatatttttatatgcatatatataaaataatttcttattattagcatttttatgcttttaattttttatattaataatatctcttaaaatatagcttttacattaagatggttattttatcacattctattaattttattttttttttatgaaatgattgatacaataaataataaaataaatacaaattatatacttttactttttatagagatccaaggctaactacaataattcaaacaaagacaacttccaatagctaaaaatttagaaacaaaaaactctaacagagcatataaaatatttacattcacactagctagttataaaaatgagaaatggtaagggctttttaattaaagtgtgaataagagatgatatatattattggtacaattttttattgaatttcacatattgtaattaaaaaaaataatatcataattaatactatttaagtgccttataataatgttttataatattattttcactccaataaaaatgttatgtggcaacttattatatttcttttcaaaaattagcctccctatggtgtccaaaaattgacgctaagtagttagtaattttttataccatatttagattttctttttcgattctcttatatgataaaagtaatttttaaaacaccaattttcttttgttggaacttaagtaacgtttgattggaaggattgaaatcatagaaataagaatgagaatgaaaacaaaaataagaacggaatagagtcaaatttaaaatgcataaaaaaattgataaaaagttattaaattttttctcatcacgcattggaatggtatctttttctattttaaaatataatagtcattctacataaatgatagaaatcattacaatactttaatatgcaaccaaacaaaataataaaataaagataatttctttctattctattctattacattacctttatataacttatccttgtatagaatagtattttgagattttaagatatataagatagggtgattctataatgcacccctttaaaagggatgtactgatgcactcttaacttgtttcggcatccagaaaaaaaatttagtctaa

SEQ ID NO: 43892 - DNA, 2795 bp, Cannabis sativa
cactgctgaaacaacaataaacaaccaataacagaacaaaacaaaggatcaaatgatcaagaataatgaactcttatgaaagagtaagaaatcgaattcaccaagaaaacatatggctgaattatgaacatgaagaagaatctttattgctgaattagatttgattacaatcaatggagagagagggaaaaccagcagtatgaatcaattacaatgcagagacaattacaaaaaatcctcacatgagggaagccatttcatgaatggacactccctttaacatccctccataaacactctcacaatctctggtttttagtttctcaaactttctctctcagcaataacaaaatcataaaaccaagtcctatctaaacaagtgagcaagttaacctatttatagttgttggttgtaactgtttagaggctaactgaattagttggttaggacagttggtgatgatgtggcaaactaacagttcacatgcatcttaattataacaatttccaccttaattgagacacaagtgaactgaagtttgagaagtttaaaattcttcaatgttgagcaaggttaggcaatgcctaaacttgttcaaagtgacacacttggtaagcatgtcagcagggttgtggtctgtactgatcttcttgacatgaacccggttgctagtgattatgtctctgatgaaatgcagccttatatctatgtgttgtacttatttattacgtggatgatatcttagttagtgacagtgttaatgcagctattcaaactcttattacgcaaccttacacatgttttgccttgaaagattgggtctgcttaattactttttcggtatttatgtttactcaactcctgctgggattcttctcatgacaggttctgaaaagctccattcttggtatcaaagtgtttttggtgcacttcaatatgtgaccatcactagatcgaaacttgcctacttcgttaacaaggtgtgtcaatttatgcaaaactcccttgaagctcattggaaagctgttaggcattgtgtgctatttaaaacacgtactctttttcatgaaaaatgtaaaatcataaatttataattcagtggaaattgaaaattaggtgcaaaaaagggagtcgtagagaagaaattcatcaaaataagggaacaagagcaaaacagtatgaaattaaaggtaaagtttagatttttaccttagattatttgtagagaagattggtgtgattctagtttttctttctgtttttggttttgaggtttgtaacaacagctcaagcaagagaagaattaaatgattgttcattcctgtttttgtacttgctctaaactcaactaagtactggggaggtctattagaatgctttggtcaaaaaaatttaaatagtatctttcttatgtggtcagagatttaaataggtagctgttaactctgttattgtgctgatctaacaatgtacatctactcatttatttacatctttttataaaattgaagatagaactaaatttctgtttacaatatccacatttgtaatgctatcatttgacaaggcgttttcacttgtcacagagcttttgttacaaggtgtggtcgagtattaaaagtttccaacataacatgattgttctccttattcacaacaagtcctcaatgtgatcatccattattaacattttgttaaattcttatgcaccccagtgtgctgatccattctgtaagctgttcattctatattaaaaaaaaatatatagaatacgaataaacatatagccaaaactatcagaaatcatgaaagggataatgtaaaactacacatatatgcatactagaggagcaaactggtgtgaataacgagacgagagagcaacatttcttgcttcaccatcatatcaatttctcaggcaaaagtatatctgtttcatacaccaaacaggatttattatgaaaatgaagtcataacatctaaactcacttaaattaaaaagtactaatatcatacaaattcatacgatgatgctcttgctcttgtgcttcctgttgaaacagtcactctttcaattgcacatcctcctgagtacccttacattcctttatactttgcttcctctgcttcttcactctctcttgctccttcagtcataaataatttagattcaattaattaaacaaagaaatatacaagggaataaagatttcacttaacatatgctaacttagtttagacacccatcggactgattaaacaaaaaaaaattaaaacaaagttattagtagttgaatcccactcaaaataaacctttttttttatcatattattgatgatctttaacaaaaacccagttcaaaaaataattcaaagtacttacactattcaaaacaaaaattaactcatcatcatggaaacagtcaacttttcaatcaatagaaatatcagagtttatattcttctcctccatttgttcagtaaaatcagtttatggaaaaatttctggattgtatgcgttaacaatgatatatagttgctttaaaaaaaaaaaacaatgatatatagcttcagtccatgataaattttactctttttttttaaaaaagaaaaaaaaaaagaattgttttttatataaatcatatcaggaggaggtaattgcatgcacagtaatctcgtacacattgcaaattaattaattacctatccatgatttcttgtattgcaatatattattaggataaacatcataagcgttcattttaattttatttgaaaataaaagcaaacatta

SEQ ID NO: 43893 - DNA, 2881 bp, Cannabis sativa
aaaaaaaaaagataaaggaattaagtgtataaaaattaaaacataagggggttttatcactaaaaaaaataagaggttaagtgtataaaaatcaaagcataagagaatttggccgtaaattggtctagtatatattgtagttaatattttgaaataatttactaaaagtatgattaaaatagtatatttcatacttgtataagataatttaagaaaatgcctacaacaaattatgtgaattttatttttcacatgttaatttttttaaaagttttcaagaattttgtaaaatgtattaaatatttataaaacaattaagattaatctatttggatacgaaggtgtgggtgtctaaaatttccctatgatattcattgtactaaattgatttcataagtttcttaattagtttatatataatatatttatatattataaaatattgaaaataaatcaaaggtattaaaagatataatatttaaataatttagaaaaataaatagaataaacgataaatgatgtaatataataaaagtttgatttagaatatagaaaacaagattgttgatacaaaaatagagaagaaaaatgttgggagtgattgttttttcttttcttttcttttcacatgatagataacactttctgattaagtggagaacaacattattaagttttgaaggtgagtgatatgagcatgtgagacctccctcttaagtcaagatttagattcattaattaaatcttcaataaaatatcagttgttacaaatgcaattaagagagagtgatctacacgcaccaatatggtctttagtctcttactcaattggaatttgttgtgttgggatgggaaaagaaaagtcacttttgcctatgcaaatttcataatgtggtttaactataatggattaaaaaatcaaaatcttaattagtatggtccatttggagatattatatcaattaatttaccatttgatccggtgatctctttatgagttaaaagggaaaataaggtaaacaaattttacaacttattatatatgtctaataatctattggattttagtaaatagaaagatgtagatataggtaggtgtcagtaaattacaagatggggtaaagttttgtctttattatcaaagtacaatgtaaaaaagaatgattttaataaagctttttacagtaaaaaaaggtcaattaaaacaagacaattaagagggatccatgtgattaatgaactatttacatgtaataatcactaatttgaaagccgttgatgaagttttgtgccttagtgagaaacttatccaagatataacaagtggattactacaaaagggacccatagtatcattgcatgccatgttcttcaattggtgtttgttaaaagagatttatatgctttaagcttaagatatattgagagctaagcactgccacacatcctgagagaatgtgaaagagtgatataaacttagaaaataaatgatttagtagacattctaaagcttaggataagaaaaagttaggtaaacttaaatgttggggagggttttgggaaatttcccaaaactagtaacaaaaatattttcacctgatatcattgactcatttatttcatccccataatatattattctttaatgtttagcttaaataagtagttaatttgcatttcctgatggcttgctcatatgattttatctaaaaccaatactatgtaaactattttctaattcattctttttttaagaaaagcactggccaaaataaacagaattacatcaaaataaagttctaataacgaaaacaaataagaaattccgatcacttaacttttaggtcctaaaaaatagagcaagttttgtaagtttctaattcattcttttagaaagggtaaaggtatgttttcagaaaattcttttttatttttgttcccaccttatattatgaagggtagatatagcagtagtactatagtcggtagaagtaggtactaggactagtaatgaaacaatatatcaggagattatatgtgtctttccttttattgataaagtattgttaggaggctcattatataattggtttggttagtaattttgtatgatatttattaaaattgagttgcaccaaaaataatattacacattacaaagatgctaagtagtaccatagaagccctttaacatttctgtgggttcaagactatctatatcttcaaagaagcagacatgttcacttatcccctcatcattgtcatcaacacacttggtttgataaaagaataataaagaaaatcgtcggttgatgctttttgaaaacttgtttcaaattatcttttgtgacataaattcataatatttcttcgaatcgggaaaagttcctgaagtccttgtcttctttgcacttgacaggaattggttttatgagaataatttggcaaattaaattgataagttcctcaagaaaaaaaaaaaaaaaaatcctgagaagatcaactacacattgacattagaaggtcattaaatgtaggtaaatattaattgaaaagagtagcttggcttggtggtaatttgaacaccagtagtataatcatttatgcttgtaaatgccaaggcgtgtagctttatactaaaagaaaattaagaaaaggtattgtgttaaggaaatatgagtatttttattggccattagtggtgttcagtactttttatacgttgtgtagtgttccacgattagttagcaatattttttaaaagttatttttttaagttacataagatcggatacttaattacgttaataacagtatgacacggagaaagatgctaaacacttgtttgtttagcttgggaatcctagtgtataaaccatcc

SEQ ID NO: 43894 - DNA, 2089 bp, Cannabis sativa
aggagccggaaggtggtgacgaggtttctcccgccactaaaaatcgagtctcggctcttaaatctgagccgttggttaaatttcttgggaccattcgatctcaccggctcggctctgttttccaacggcggcttcgtacccaggtacttcttttcttctaattttatttttaattttataattttaattatttactattttattttctttttaaaaaaaataatattaatagcggaaagagccagattcctttgaacgaaaaaaaaaatctctctttcttcttaaaataaaataaaaaacgaaacgatgggtaaaacgctgtcgttttatttaagaattcattcgatttcggtataaacgacaaacgaagctagcactcggttacgaaacgacgagtaaaacggtgtcgttgcattttatataaagaagagaacagaattctattcatcacatcatggggacgaaacggcgagtgaaacggtgtcgtttttattatttaaagtaaagaagagaatgaaggaacgcgattggtggaagaatgtaggacgtttgtagcgaatgaatgaaaccgtatttaataatccacgtggcaaagcattatgtcgccatgtcatcttacgctggcgatgttttaaaatatttttcttctccatcattctttgtttttaactaccaattattaattatttttttaaaaaaaataatattatctatcggtttgaacctactgatttttgcacgtgtgggcctgacacaaagcaatagcccggcccaatgtccaatatcgtaggcccattaagcccattttctcggtttcgtgttggttggtgattatttcgtataccaaatttcactatctatcaactttgcttgttgcactttgatcaaaccttcttacctatttggaaccataatttgtattgccttatcatattattacgttttatgtatatatatatttatatatttttaagttatttgtatatattattcaggattaattttaataaaaaacatgaaacatgtgttattgcatgttgtttgagcattgttcgtgtccaacactttttacaagtgtatgttatgattggttaccgatattctctttgagacccgaaattagacccgaaattagtagtgctttttgtttttatcttttacaaacacctaattaatgcatgtgtttggtttctggttaattacaattttgcccttgtcataagcaacccaatatttaaaaaaaaaaattaattaatttttcaaatttattcttaatattcttttttatttttccaagtaatttatttttaaattcttacgttaacttaattttaataaagaagcctttttaaaacgtgttattatttatatcgttactcaataaatacttgcctaatatatggtttggtttggttacaaactctacgttgtaaaattacaatcttgcccctctttgtataataattactttctatagtaatttacgtagagaagaataataacatggtaattatgatttctaataattgtttttcttaaatttgaacaggaatctcaaaggtataaaaacatgatacgacaacacatggacctgagaacgattgaagctagacttgataaaggggtttacttgaatggtttccacaagttctttagagaccttcttcttatatttaccaacgccgtcgtcttctaccggaaaatttcgccggaatatgccgcggctcaggagctaaggagcttagtgttgaaagaaatgaaagccaaggttggtaaagctcgaccctttattgctaatgatcatagtaaaaaagttgtagttgtagagaaaacagattcatcagctcccaaatcaaacaagtcttctcgatctattatagtaacttgtggtaaaaggagtaataagtcttctgaagaaaaggttgttgttgttgatgatgatgagaagaagaagaagaagaagaagaataagagtaagagtgagagtaataataacagtactactagctcttttgtttcgattgatgaaaagggtattaagaaaaagaggagtgaagaaagagtgattgggaggaaaagtacaaatgat

SEQ ID NO: 43895 - DNA, 1809 bp, Cannabis sativa
aatagagaagaaagctatacgttatagttaaaattctttccagggagtaactttgaatgtaacttgaggttcatctaccttgtgaaatggatgcagatggattaattttgttcctcaactgactgcaactctctataagtgcagctttcttactagtaacctataaaataaaaagatataaaggtgagcaaatgacaaaaaatgcaaaagatttatctgttcctcttttaagagaaagcattaaagttaaccctcttggtcaaaaacagttggaattagttacagaaatttctataagcaattcatgctaatacattataagcttacgtagacataatgcttcctcatatcaaaaagaaaagaaactgcatttgataacaaattcctaatagtaatgaaggtttaaaatgttcctcacctccttaaaatccacttccacatataaatgtggggctttcccttcatcctggcaaagagaacgaagaaaaaattcaatacaatcctatacatgtaatatgtatatctatgcatgtgttgtcctcggaaactagtgatgaaacactggaagacaatttaaaccatttgggcatttaaagactgagaaattaaacaaaactaactgagccaaaatatttacaagtaatttcttacatctaccaacttaaaataagtacaagaaaggaacatctgaaactgaaagtactgactctatcacattaataataatgatgatgatgactcagaaacacctgcaattgaaaaaacgtagtatcaaaaccagctccaagtgataatatctgcttctttgtttgaaccttttcatccccattactctcagtgtccagaaattgaaaaagaagctgtcgaagagcagcccaacgcgcaaagtagccttgatatatacaaagcaggaaagacgattaacccatcactaatcaaatacacacaaatataatcttaaaacgaagaagctaaagcttaattgttgtttaccacgattaattatgggagatctcctcacgggtctccttacaaataaatggatatagtcatccttcatgtacccttttttaacgcaggaccttttcagccatacaaattgaaagtcagtactctttagtctggaaatgaaaatgttttctttggaagcaaacagcagataaagatacaaagaaactaacaatttgctggcggaagcgtcgtcgttggtggcttgaacagcagctctgttgctacgcgaatcagccatctccgccattgtttttcccaacaatctgaggcaacactccaatcaggctttcctctttctctgcctttacaaaaaattagcgtagtttttaggtcatttacagcaaaatgctcctcgcactcctgtcgccttctaactccaccccttcaaattactttcaaattctctattttatctcatcaaactttttacctctttacaattaatacatcactacacttcttttttttttcaaattttaatatattttacaagaattactacatatatttttaatttttttttcaaatttacggtttgaaattctaaagtggttgcagcattagttgcaatagaagtttctatataatttttttgttgcaatttagtttacagtgttagttgtaatagggatttaaatataaaattaggtaaaaatgtaaaaaaaaaatattttaaaatgtataaataaaaaaattcttatactttattcattttaaaatataatattaatatttatatatatcgtataaaaaaaattaattaagatttttacccctcaaactttaacatgtactaaa

SEQ ID NO: 43896 - DNA, 1196 bp, Cannabis sativa
gaacttttgcctggtgatctatagattctttagtcttcttaatcttttagtttggtgtttcttttttggggttgtaggtgtggtggttttgattttcaatactaaagtgtgccctttttggtgttgcagtttattagctccttaaaagacaatttaaatgcagaagtagcactgggcactgtgacaaatgtcaaggaagcttgtgcgtggcttgggtatacttacctttttattaggatgagacagaatcctttggcatacggtattggctgggatgaggtattgcacattcattggtatttcatttttgatgcagtattatggtcctttggagtatgacataactgctatgttatgggaaatattttgtgaggttttcctttaggttgtttgatgcatgctgtatttgtagcatggattcttctaaaaagggcctattgcattgctttttggcaggtcatggccgatccaactttgagcttaaagcaaagagctcttgtaacagatgctgcacgtgctcttgacaaagcgaaaatgatgcgatttgatgaaaaaagtggcaacttttactgtacggagctgggccgcattgctagtcacttttacattcaatattctagtgttgaaacttacaatgaaatgctaagaagacatatgagtgacagcgaggttaactctgatgtgctctgtttattaccacgatgcctactttttcaagattttcttcaaaatgtttcagtgttattactttattattctagtatcaagactatcttgttgtaaagaaattctgatcccctatctggtgctaagtgatcttttgtcttgggcatttagttttaggaaataaattctcttaccttatttttttctcttctaaatactaaggttttgtaatgttggtagtaacggatagaaactagaaatctagagattaatcttttttgatatcaagacagagttacaaagttcctagtttttgagacacttggagatcttttaaaaagagtttaacttttccaaaatatggaaatgatcagcctcatatgaggcttctgagtttatttatactcaaccctctgacctctcttaattgctccctaggctacacacaacttagcaacaaaactccttacaattcagatccctaatagccaaacaaaatacttacataatgacagctaggcatcactaaa

SEQ ID NO: 43897 - DNA, 3018 bp, Cannabis sativa
catatagtcaggatcaagcttaagctttccttaacgttggattttcctcttaacctttgtagattgcgcttttgagattgacacttactatatagacttcgcttttatatatcttctgggtggtaatctttaagctaatgataatattcttatgatctatcctagtcgagaaataaccattagaaagacatatttggaaagatagataagatttttattattcaaaaacttgtccccttaacagaaaatgaggccatatatataggccctcaactaacaaaaaacattacaaactttaattattacagacagaaaacgttaaagacttaaattacatctttccctagatagagaatctctgacataccagactctttttttttataactacaaacagacaaaattttcaaatggccagaggaatctctgttgtcctcaataaaatctaaaacagtcaaatctcactttttcatctttctattagttatattgaaaattctaattttaaaatctcttttaatcaacttcccaagtgaatgcacaaaaaactatctgtcatatacacaacttaggtgtaatttccatgctcataatgaagaaaattctgataaagtttactaaccttggacacaaaaataacttcttaagattgaccaattttcactaataccaactaatatttgctttcaaagaataagaccaaaaatcatgatcctttaaataaatattatgcacccatatgacacgaagaagatcttgcttcatagaaatgtcccaaatgaatttagctaaaacaaccttgttccatttaatactatttctaaagccaataccaccaaactcctttaataaaaaattcagctcccaaaaagtgatatgaagtttattttgattctcattaatcccctaaagaaagtgacgatgcaaactatctatttctttagcaacactttgtaaaagtaagataatacttatctagtaacatcgtaaccctaaaacacatactctcgctgcaaaagaaaggtagcaactgtcccaagtatgtaacctctacttgaagaataaaaaataatactaataatcatttttataaatattattttattttgttcatttaaacatattttgattaatttgtaggttggtttgggtccttggtagaataagtagaacagaaattgaataaacaaaccagaaagcagagattcaagaagccaataataagtagaaaaacataaaatcccatatgcatagagaagagagatgaaaacttaaaaacaataaaattaaaacagatggttatgaaaaaaccattcttgagatgtgaacagaaagagtccctaagaaaagtaatatatgcatctataactaaactctgtgtcttagtcttcatccttactacactgggcataactagtatccatcttccaccttcatttctccatttctctataacaacaaagaaaatgcaaatgcatgatttaagattctgttccttgcagtacaccttctccatagccattgttgactgatttcttctctgacttagaaagcacagttggaggtggttggttgagttcaaaattcggaattttcatctcgccctgtagataactctttctagtgtcggagctcaaaacctgatcttgattcttagacttctcaccaacagcttcaatgccctgagagataatagctggtggaggtgtgtgtaccacttttgattttttgtttaccttcacattgtcaagtcctttcacctgtatggatgtttctgtaccaggcaatatctcagaaactggtgcaagtgaaggtttaacttctgaacttctttttgtgcctacttcattaggtcctttcaccactgtggatgtttcaatatcaggccttctctcagaaactggttcaggtgccactaaaacaacaggctgaaattgagaatgttggcttcggtctggaaatttaggtgcttgatttttcacctcagcagattgcttattgctgttttctgggtgtgcagaaccggaaggctggggatgtggattgagagttgggattggcatctcttttcttttgtacataggaacaagaggagccacatcgtttgttggattaactggagtgaaatgccccggtagaaaaacaacacccctgagctcagtatcagtgtcacctaccttcacattaagaagatatccatcatcaaatgaaccctcaattacacctgaaaccacctgaccaaccattttatcaaccccatcacctgaacccaaacttagtctacttttcttcacactctcggatccagccactgtctggacgctctcccccttgaccaaacttccgtccttacgcggccgtcctcgtttccgcttcatggggagctctccagacgaaaaagcattagccccttcaatctgttggttcatcttgctgaaacgaatgaaaaaaataaaatttatgaaatgtttactgcaaaaaagaaaaaattgtatctataagtgatatggaagctttcacacaatattttttcccatcaagcgctatactcttgtcaaacagaagtaacaggccagatagatattagcacagataatttattaatttctctgccatctaagcaaatgtcatgcatatgaaacaactaatatgcttttaaaacttaataaaaaattgagcaatgtgtagcaaaagaaaagacatgcatgaataaagtaattcattctgtgaacgatctccattctgtaattagtcttgattaaatacattgcaataaggaaacaagagcctaccgtaggaaatggcaaattgtttatacattcatcatgagagaaatattgcagtagtcaagttgaggatgcaaaaccaacgagaacaaagggcaaatcaaaatccagttttcaaactcattcggcaactaaataaatatagaagattataattataaataaaggagaacttagaaaatacaaaagcaagatttttacctagttcaaatgttagcaaaccctagtgtac

SEQ ID NO: 43898 - DNA, 4422 bp, Cannabis sativa
ttaaatctaacaacctcaatagttcagggacatttttaacaaccttaaaagttcaggaaacatgatttggtacatactaaaattcaaaattcagagagcaaaaatcataattacccataaaagtatataggttatgttaattaattgattataaattctaattttggcaggtggaacaatcgactgaacgcgtgagagagtggggaggtgaagacacaaacgataaggctactcaagatcaaatatgatttatttcttagttttttacatttaacttttaacttttttttttcttccctaaattgaattagcaatcacattttcgctcaaattgtaatctgaatgatgtttttcctttaattagtaattttggccattgaacttatacattgatattagtttacggagcaaaaatactaattaatatttttttagtaagataagttggaaatttaaattttgtgtcccttaaatttaaattaccagttcatagagatcattgcctattgtgtcccagtgatgagaataaaagcttactggaaacccatccggtccaggagctttatcattccccatttctttgattgctgcagtcacttcgtctgagttgggaatggtatttagcatcatgttatcttcgtgtgtgatgacccgctcgaagagattactaagttggggggttcggcagttatgatcttgtctgaaaaggtcttgaaaattcttaaggaagcattctgcaattgccttatgatctctaatccactgacctccgtccgaatcctttatgcactgaatgaaatttttccttcgacgaactatggtagaagtcatgaaaaactttgagcatctatcaccctctttaatccactgaattcttgatttttgcctccaatgaatctcttccctaagcaaagcctcctgatattgttgcctggccacctcaatggcattgacatcatccggagaggattgctcagtttgtagaaggtttgagctagcctccttcacttggaaactcacctttttgaattggtctttgttccactggcacagtttccgtcgtgtgagtttggctttcctatggaaattcaccattggattgacatggagtctcttcgcccaagcttctttaaccacccagtaacacctcgggtctcttgcccacatgttttcatatctgaaagggcgacgctttcctttgtatcctccatgtgtgtcaagaaggatgggtcgatgatcagaggaagaagtcgatagatgattcagtatagcatcaggaaacaaaattctccattcggtggacgcgagcccacggtctagtctggctcgtttcaaagcctttccgtgtgcaggttgtttgctactcttcacccatgtgaaagacggtccgatgaatcccaagtcgattaaccctgcacgatccaccatacgacggaaatcgaatgcgtatctagcagagttaagtcttctagcatagttaatacattctgcatcacagagtgtaccattcatatcacccattaaaaggagaggggatgatgtggttagggcaaagtctcccacttccttccagaatgtctctttgtccttctcatggggagggccatacagtccaaagaaattccaccgcacaccaggggggtccaatgcaatttctcccaggattccatacttgtgatgcgaagtaatggtacacttgactcctttcatccagcagagccccaatcctcccgacagcccaacagggggaacgtatatgacctcctcaaattgcagtcttttacagatcaagttgaatttctctaatggtattcttgcctcagctattagtaacatctcgggtttgtgatgacggatcagagccgtcagttggcgaactgtcgtggagctcccgagaccacgacagttccatgctaggattttcatggcgattgtggagacctttccgggcaagtctccgaggccccaaagcaaaaatccacatgtttgttagtagctgaggttttagccgtttcatgttcatcttcttctagctcttggatttggcaggcaggttttggtggattggttttctctatcaccacaaaatgattgtcaagatcaatcttcaagtcaatggttttgccctcccaatggtgtttaattgtagagttgcagccattttttgatttggaggagtttctccatttgaatggttttgcattagccgctaggccttgttgaatttttggtggtcttcccctcttctttagcgattgcccactgctcgggctgccagttgagttcttccttggtcttcctcttcgcttaggtgtgtttatatcaagatcatggcccgtcgtgaatgaggcatggttttgtgttgcctgttcctcaatggcagtatgttgcttttcagtgctaaggttctcacaggaagttataattgtcgtggctccttccttggcgtattcacgatacatttgatttgtgggcttcgaaggtgggctaaataggaaaccatcagtggccttccttttgcgtgggccttttagatgttcttctacccgaaagtcatcaatgctcagcagtgggttgaacagtgtaggttccctatgaaacttatccactgtgagagagcccattagcaactcccgggccttcggttgggcccagcattcattggagggccagctgatgaattgggcttgggagcccaaaggggagacactatacgaagggtttaaatgcgtcgattctctttgtggtgtgtcttgactggccgaactctgattcttcaagtttgagggcgtattgtttgattcgtttgctctgttgggttgatcctcttgaagagtatgttgcagagtctctttcccagcgtacgactctgcgtctcctgaagaggtaatatttccttgggcatttcgaattttggagccgttaggctgtgctttctgtggtgtacagtctgttgagttgttttgcacgccgtcctttttgggattagagggttgtgctgcatcaatgaggtcttggattagtaccattttgttgttattaccataaggggcaatttctccaatgcccggcagataaaccaatggtaactgggtaatgatttgcgctggctcccctccgttctggtcttctccgtcgtcgtcggagacgattctgcgtttagaggggagttgaattctgctttccctcatttcatcagtttcaccattacgaattgctttctggatcttgaactggttacagagaaccgggtcttttccaagctgtttttgaagtacccagtcctggaaccatttgggtagtggggatgaaaatgtagatttttccggagcatcatttttgagccatgttccatataaaggataatagtttcccatattgtctttgactactgttggcggcttgaagcatgtgctttgatcgtgagtaagaatgccgcatttgaagcaaagtttggggagtttatcatacctgtattggagccacaaatctttgagtttctgccttctcaagaagaagcctgagaatagaggcttgtttaaatcaatggtggctctgaatctcaaggtgctcatcccaacagcatcctcgattccaggcggcaactcatagacaggggatgcttttgcagcaatctcctttaggttggataggttccagtaaaaaggtggaatgctttccacgtgaacccaaatgggagttttatcaaatctaatctcggccggagtgagccaagcaggccacagcattaagactagaagtgcaccacaaacaaaccaagggcgtcgtgctagtacgttcattgcatcttctcgtttggcaaatgtgaactgaatgatgccaccctctatttctttccatttccaacctttgatagcatgccacgacagttttagcgagccttgtatggcagccttgcccagtttatacctgctgatgatcttgcccaatagaactttgtttgactcttgaggttcatcgacttcgcctgggtttaggctgaatgtgatgtcctccgaatttagctggattgtgtcttcaaagatgccacttatgccggttggatccatggcgagcgagtagttaacagtgttatcagagcaattgaaccaattctctattttcctctaggaagaaagctcagttagagagcatacattgctattttatactagttagttattattagtaactttttatttatttgtagacatccactttattaattttgaattatttagcagtggatacgtttagtaaaaaataaatagaaaaataaaataaaaagccaaacaatgaataataatgtttactaaactttttggacaacatgataccatggtattatagtactatagcgcaaaaatgtcaacaaagtcaggatggccgagtggtctaaggcgccagactcaagttctggtc

SEQ ID NO: 43899 - DNA, 1444 bp, Cannabis sativa
aagaaaagaaaaaagtttagttgaagaatttttctcggaggagagagaaagtgagaaaatgctggaaaatctagggattgtttacaccgatccgtttctgtagaggtcttcgatccgtacaatccccagacaaagcaattaatgtgttagatccggctgtctgatacaacattcgtcgcattgtaatttgacatttcaactctttttgaggtttatcttcgagtttggggatctctcagtggtactaccatggagtttcatataaagagttcgaagtcggctttgacttggtaagtttgagttgagcaaagatactctcagtttcatcggaagtgtgtgtagttttttttaagctatgaatggagtagtgggaatggttacttggaagttgaattcgagtctgaattaggcttaatttccgtttaatactcttcactcaaaagaattttagggtttttgagattttgttattgatatgtatattattaagtatgttaattttgattggtgttttcttctgttagattggaaatggacgttttggcatctgcgtttccagtggtacaattgcttcagtgaattatgctaatttatgcaacttttgtaaatatgataaatatatatattacgaggatttgatgttgaggtgacttggacttaccatctacggttcctatggggtattgggtcgcttgcattggaaatttattatttctgtgacaagttttcgataagggtgaatcggaaaaaaagggttttttttcgtgagcgacagtgatagcggcctttaattattttcctatgcaatatcccattacgggttaatctttgggagtttgggcttttttatttttgggaataattatcttcactgtggctaacagtgtggtatatacattatggataattcttccttgtacaagggttgcttgattttgggttgtattgagagattggcgttgagattttgagagactgtagctttcttggtggccggtggagatgcctccttctccggcattgaggtcttctcctggaagggaattgagagctaacaataatcacaaacgaggacacagtttcgaaggtggattgtttctcagagaaaaagatgacgatcttgctttgttcagcgaaatgcagacccgagaaagagagagttttttgctacagtcctccgatgaccttgaatttacacttcgtaatttcctattcttcacacttctattaatcgatttgttttctccccaagtttaaagttcttttttttttttggtggtcatctgccttacgggggggttttttcttttctctttcaacagcttcaaaattgagacacttttcagatattaagctggggatctccattccagtacgaggagagagtactagtaacctgctcaatgccgatggggataagaatgactatgactggtaagttttt

SEQ ID NO: 43900 - DNA, 1857 bp, Cannabis sativa
  modified_base (1166)..(1167): a, c, t, g, unknown or other
caattctttaaaaaagaaattaatgtactatttttaacttatattttacaaaattgatagattggaccatttattttttataaaataataaattagatcttatatttttcaaaatagtactagtttttgaactcaatttttgatatttttttaatatatataaccaactcgaacacaatttcgagtacaaacagatgcagaaaatatacttaattttgtcctaacaactttagatcatgttattattaacttttattttgacaaaaaaatagttcatagtattattttatacatttcagaaaatataaaatctaatttattatttaataaaaaagaaaatccaattaataatttttacaattggaaaatagtatttacctaaatgtattatataatagtgatgtatgcataatatatgtagtacattgcactagccaccctatgtacaggcattgaaaatgataaattgccagcttcggaatcttagatataaatatcatataaactttataaaatatataaatgtaactcaaattattagaatggcatatggacgaaatttaatgaaagaaccaagggtatttatgtcatgcaattcactataaaagtagttgctaattattaatcttaattacgtaaacactttagagtatatatatatatatttcgtctccaaatacattatatatatataggctaatttgtataatgggtataacggagacatggtctagattaataggagatttggttcaggtgattcatggaggaataagatcatcatcaccatcatcatcatcatctttatcagatcaagatcaagatgaagatcaaatcgataataattcaattattattgataatgggaaagaaaagaaggtggtagtcgttaacgattcaatgtctaaagctctgatcacagtgtttggcatgcaaaacgacgggaaaatccacaaagaaaaggcgagaagtgttgttgaaaagcttggtttgataaggttgaatgaggaagctgtagtagttggcgctcacgatcatcacgtggaattagatcatcatgataatagtaataatattggtcatcatcagcaaagatcatcatcatcatcatttgagttgcctggagattatgattatgattatgattatgattatgatgatgatgnngatgatgatgatgatgatgttgaggaggaggaagaggaagtagtggcggttgaagcagtggtggtgctaggcgtagaagagatcatggaactggactactcaaagcaacgccaccttttgcaacaagcttttgagatctttgatgagaatgggaatggtttcattgaggcagaggagttgaagagggttttcgattgtttaggtttggattgtggttggaatatgaatgatatagagaatatgttgagagttgctgacttgaatttcgatggtaaggttgattttcgtgagtttgagttgatgatgatgggacttaataataataataattaacaaaactagttattattaattccttgtaatggtaattgtacgtatattaattagttattatagatttcaaaaagtagtgctggagatccaataattaagtgatattgttgtgtaataattataattataataatataattatatatgcattgaaacacttcaattatattattattattaattaattactgtgtaaatttctgggatttaattatctcacgtcacgtgcgtagtgtttctctcgatcggccacgaattattaactaatatcggaaacagtttaattaagttatatcaatttccaaagcaaatcgtcattcaagatatgatctgaccaatatatatataatatatagt

SEQ ID NO: 43901 - DNA, 3501 bp, Cannabis sativa
gtcgacaccatactcatccatgcagtagcatattttgggggatgtgagtacttaactgagcatacaatatggattctctgatctttgatgttatgatgttctacatcttgtagattctgttcatcttccttccatgcatgcatagctatttcaaatgaattgaatatttgctgagtgctattgctttggtcattgtagtgcatagttgaagaagttcagggtccagcaaatgctcgttctcggaaaaatcgtttcatatctgggtatctttattttcttgaaaaagtatatacttgcatggtcaatactcaataacatgcagttttatgctttacattaattgaacttattgatgttgttgtagaagggatttagtagtaaaattgattagttagaagaaaatgataaaaagattattgaactcagaagctggttaggtgtaaatctatagaagattccattttatatgtacatgatgtgtcatagttaacaggcagtcacacttttgaaaaaattgaaaagagcattgttctgtggacacacatgcatatgtcatctttgatataaaaacctcctgtcacgatttcttcaaacaattttccatgtcacaaacccgatttgttttctgcaaatttgaaatatttctaatatcatgtagtgcatatttttttgctctctctttcttggttgcttagatagtttcatagtctcaagcagtccatacttttttataatcctaattagttaagttttgttaagtaaaggtgcacatattaatattcaatttttcaatctgctgtccaaatttttcaactgacttttgttgttcattatgcttgatgtgcatcaagcaattttcaaatggcagacgtgcatatcttgcttctgacttattttcttaagcatgcaggcatgcacatcctggtagtccctatgtctttggactagttggtcttgatcatgatcttgactttccggaaccaatgcctgttgttggtatgacttaaacactattacaaaatgcatttgttttggaagatattatgcttaaattaataatctttttttttgttccatgttgattttatttcctttgtatacaaatcatttatgcccctgtctcctggtgtttttatgaagtcaaattgctatctttgtcacatacgttgcttcatttcatcagaggaaataattttatttaacatcaattaaaagggattctgattgattagataataaactatactgtcattttaggcatatctcgttctgccagaggatattgcataaatttagtattagagactatgaaaacatactcatctgaagatggtttgactgaggaggccttggttaccaagcttcgtacgtgtcggtgccatcatttatttctgcacacatcattgaggcacaattcatcaggtttgttcaaacttcttaactaattgccaaacatgcatcttttatgacaattgtacggaatgttgcataatgtaccgtgataaaatgaagtcttttcacaatttctgcaatgaaaaatcaagcttctctttgtttcaatgacacaactcactactttaactagttcattagttgtctacatatctagctgctatatggcctagtaataggttacataaagctccatgaggatataatttcttgttctattaaaagcttgccctcacaagggcggttacctacagtgctcgtgattatgcatgggctttagggcattaatctcaatgtattttagatatctagcttcaatatgttgatgccccttcaatttgcagtttgttatttggctgaataaaatattgggtgatgtgacatgattgataaacaattaggtcaggtcatagtcacacacttgagaagaagggaaagagcagaaatattaaatatttaagggctaaatcaaagctatgaaaaccatggagacccaacatctaatctaacatttagtgtttgaaggtttacataaattttgtttgttcataaccaagaggggtagctcgaacgatcaagcatttggtttactcctgtcatgtctgcggtttgagtccctccttgacacgtacatggaaattgttgtaatgtttttcttcgcaaatattgtagggttaggcggggagcctaattaaaaaaagaaaatgtcatctgtaatttttgctataattttcttacttctactgtagtcatattaacatgtaattggtgttcatgtttttattctcctcttttgctcctttgcaggcacttgtcgttggggagaatatggtgagggaggcctactatggggagaatgtgttgctagacattttgaatggtttgatggcaatcctgtgactgacctcttgtctaaggttcatatttgtggcatgttgttgtttatcgtaactttcagtgtcattttatgttttggatgttatggtcattccatgaacttttaggtgaaggaactttatggtcttgatgatgaagttacatttaggaatgtcactatttcttcggaaaataggccccggcctttgacccttggaacagcgactcagattggttggttttgtttcataacgtaccacatatacacatttaagaatcctgataaaataatgtgtcaaacaatcctaattggttttgttctctcaggtgccattccgaccgagggaataccttgtttgttgaaggtgttacttccatcaaattgtacaggtctaccactgatgtgagtattcattattcatgttcctctctttaagaatggtattgttgaaaaggtcactatagctcgaatagtatgttaaacattttccaaaagctctcacattgtatctgttttttttacccacctcttttttctgttgagcacaacaatgttttgcttccttatttgttattcttttattgtttcagatatgttagagatcttcttctcaaccctcctgcatatgacattgcattcactattcaaggtgagctgactatttttaaattgattcattctttggttgcaatttcatatgcattttgtttgccaatgctactcattagacctttaaatttacttgtgaatcacaaaactactaattttatttgcttgttaatgtgaagcaagatttttctctagttttgtttcgcatgtcacaatctaaatggcactgtggcttaatgatgtctccatgtgaagtctctgttcctatcattctcatactgaatacaaaagattgatgataaggcaaattgaaaagattaacctttatggctaaagtagtaactagtggtctttgaaaccactataggtttcaggttaataatgtttatagtaatagttaatgaaagactggaaaacgctgctatagtttcaatgtaattgttttgtttgtttgtttattttctattattttgagccttgcctttgttaccacggttttcctccgccacaagtgagggctttcaataaattcaagtgtgggccagtctaagactagtggttcc

SEQ ID NO: 43902 - DNA, 1836 bp, Cannabis sativa
aacagtgattataaggatggataagccgagtccacaaccactgcaattccctacttgaggtatcatcactgacaaatgctaagaaagacatcgtaagatcgaaatagttataccaataaatgagacatcccagaactcgatttttcttttccttcttctttccctaaaatcaccatctttggaaggtaacatgaaaatcataactacattaacccaggtcctaaaatttcaccaaatacaaagaaatccctcaccaacccccttgtaaacagcgaaaccagaattagaactaagaccaatatatgtaatgtaataaaaacatatgaatatgccatgtcaatcaacaaccatcgactgaagagaatgtattaacactaaaactttatcagaaaaaggataactattttacctgtaataatcctcttagaaaagtcgtcccaccaatccttgggattcagttgggaacccagagcaacaaccaacacatccttgtcagccttcttctcatggttcttcttcctctttaaccctctaatgggtcccattacaaaactcaaaatggaaaactcagacgagtcaaggcaggtgaaagaaaataaaaatgacccaacagcgtcaaccaagaaaaattaaaagaaaaccctttaatcataagcctcagattcaaagccagaccaatgaaggagattatgatgttaacatacaaaacatatatgatgttcttttttcctcttctttaattttcaaagcatgcaataataaaagttgaacttgaagactatatatatattgtgctcaaaaagaggaagaagaatgaatgaggattatgtgtgtgagagcttaaatcaaaagagagtgaaattgaaaaggatcaatggcaatggtgagtagcatgaatatttgataacgcattcattcacaacctgagactaatatcatgaaggcgtagtgtatagtatacttccatctatatatgtatatatatacacacacaataatcaatatgatgtgtaccaatgtctttttttgtttctttttcttctttgcttatttgaattgtaagcctcaaattatatgtcttccaaaattatatatgtaaacacatatcctcaaattatgtcttccaatatgtgtaagcacattgatattatgtattactggtgtattcccttatatggttaataattttttataataattattaaattaaaatatatttactggtatataataaattagtaaataattttaaaagaaaattgtaaattatatattttatttaataataattaagtaataaaattgtcttaaattttaactttaataattttaaatatatatttttaatttttataatatttattagtaacactcatataacgtttttgggtataagattatatgcgtaacaaattcgtataactggattaaatactattttttaattttacttaaattatcaaaataaaattaatgtgcaagataaaatataatatcaacatctctttaaaataatttagtacaacaatcaaactttgtcaacaaaaaaaaatgtaacaaattacataattgagtacaccaattttaaagatatatttatatatatattaatatactttcacagaatgtattccgtagtacatcattagatggatctcagagtacattagatgagtgtcatggtacgttactattttttaaccctgattactcctagatcaatctcagccctcagatcaaataactccctcatctaacggttgtcgtacaatcacaggacaaaatcatgtccctatatatatatgttcatataagaaaaataattgagaataaagt

SEQ ID NO: 43903 - DNA, 1732 bp, Cannabis sativa
tgaaaaagaattgcagaaaatcaccgaggaaaatcgccacaaacaaaatcaaagcgaaaaagatttgcagaaaattgtggatgaagatcgccacaaaaacaacacgaaagcaccggtggtggagtaacctaaattcgtcttgttttctttaccaattttagttactcaatttttctagtagagatcaatagatcatgtcctagtgaatagagcgtccattatttctggtttggtataaaattcttttgggggcctgtagggtcttgtctaggggctatcttatgtatgttagtctggttaggtttttcagttataagtggaattttttttttctattattatccagttttgtttctgagaaaattattatttataatagttaatctttgtttccttttactatcaactttgattaactaagtgtttgaattattgtttatggaaagtttatgattttaatttagtttgtaaatgttatgtaatattataaagtgtatggcctaattactaatttagttaaagttcagtagtctagtaagtatattttaaaatcaagttacaaagttagcatatagtactaaaaagtgctcaaaagtttaactttgtaatacattactaaaagttttaacttttttcagtgatttttatccaaagtggtacattttttattttttcacttacaaaggattttttaaaatttttattggactatctatgattaatttttcttttttgtaaggcaaaaactaataccatgtaatttgtggcagtagggtaacagtgacacttatcaaattatgctctcctctcttacattatcttaaacaaaggtagattgtcattgaagaacaaacacttgcaaattaatatacaaattgaaatgagctatttagaaatcatttgagacacaaggaaaatccctatatatcctaaatagttgaggctttgttacataaagccacttgaggtagacaatgggctaaaatattagcagttctaagaagaaaacaaatatcaatcagatcagaatctttccataaatttttcatatgtttcactaatgactaattttgatttttatttattagcaattcttagaagataacaaatatcaatcagatcagaatccttacataaatttttcatatgtttcactaatgacttattttgatatgttctcctacattatcataataaagtattttttttttttttaaaaaaaaaaaacccaaagaatcgaaatcgaatataaccactattatcattaattttttttaaaaaaatttttttgctaggaaactattatctttatttgagtctcttattttaaaatcattattctcccgccattcaaaccagtaaaaaattactcattggttttagtcctattgtctgagcttaatttttctggtttatttactgtgaattaaattctattttcatcattattttggataattatgttttaagaaattgatgaaattttatcaattaattatacgttagattataatttcaattaattatagtaacaactaacatattgtatcctcataaacttattaaatatctatttatttaaaaaaaataattagtatttttatctgttaattcttttacatgatcaaattatggctcatatagtataatactttaacatgatcattctcatcatatttaatttaattttatagtaaaacgaacataactatgaatactagttgataaatag

SEQ ID NO: 43904 - DNA, 2677 bp, Cannabis sativa
ggtaaaataattccaacaaatggatctccttgaaatgacaattcaaacaaataacagtgatccaaagcttgtcgaaagtcatccatttgagattcatttctcaaggcactcccttgcttattcacattagaaagtatctcattaaaatccctaatcactagccatggtaaaagtggagctacatcaagtaatctctttaatatcgtctatgaatggcactgattattctattttggggaaccatagaaagcagtaaaatgccaagtaagaccattgccaaaagcaatataacagtcaaacatatttgaataaaattaagaagtgttacattcacatcgtctttccaaagtaaaagtaaacccccacctagacctaccagtgtgacttcaagtccattattaaaatttaaagtatgacaaaaatgagaaattacattagaaattagtttagtttccataataaataatacatgaggaaattgctctttgacaataaaataaagatggaatgtgctcgaattccccagaccccgcgcattccaactgatgattttcatggctggttgtggggctaagagttagccactgcataattgtctaagaaacccgagtgatctattttaggactagaaatgctctagtttggctcatctctagaagacaaagttagagagaacaagatttgcttaggtcccttgcatctttttagagtttttctcatagagaggttgtccggttgtcttttggagattcgagttggtgatgtattttctttattcgtagactgctttgtagttgaacatatgacaacatctgttgttgcaacggtgttcatttgtaaaggcttgaaactagatccaccatgaggagtgtatatcgtggatggaattggaggataagtggcaatggtaccaacatctggtatgtaaagatcaaagagatcatctacatctaaagccttcactattggtttatttactacaattgctaaagaaaattgacttgaggcttcagtctttacaccaaaattatggttcatgatatttgtcaaaagggctggtttaaagaggctagtagttgcagattgtgtatttgtagtggcattcttatttgcatttattaccactacactttgaacagaaactttcgagcaattagacacatcattgttaatcaaaggagaggttactcttatggactgagtggatcttggaataatagctccagggctattattttgttgtctctttgatgattctgctagcagaagaggccatgaatctggtgttttcttgtttgagagggctggaactgctaatgataaggaatttcaagtcaagtgcgtaaggagtggccagacattccctttagaaaaatttgttttgtacctatcatcactagaagtagggagtacaacccttttaattcaagatcatatggtaattctggttcaataccattatcaattttttccatccactacaagcatttctgaaaatgggtgtccaagccttccacactccatacaccattttgaaagcttttcataatggaattccacccataatttgtcacaaatttacttaagtcatatgttgcaacccctcaataaaggcttgatgacatccaatttgactcaaaatcgtaaaaaaggactcccaaccttttttccaccgaatcttcatggactttcaaaatttcaccaatgatgtctcctaaaactttggctaatgctttagacttactaagaaaagaaagtctaaaacatggatccaaaagggggagaagataagatcttcaggtcaaacattttgtagaacacttggcgtgtatatcacaatatggtagttttgaaaatgataggtctctgagaagtactcttcgtttgtctccttcacatctaaaagtaagaacaaacaaatcatgtggattctcagttatcatcgtgtggtaccttccattccaataatttttcatctacctttgtagtgtagacaagaagagaaatttggtagtgagcactctagcgaccaatgcattattcaaattagcattttgtttatcaacatcatcaaagataagcgttgattcatcttcttcaacaagagtcatcgttcctttcattttatttaccttaattttttatttatttattttaaaaatagcatcaatgccaccgtatgacatcaatacaaattcttagaatgccacctatttctttccaatagtacaacactctcatattttatcaactaagttatctacctcaacaaacattctccaaaatttaactattaaagatgctcttacactatctattatcattcctaattcttgttagccaaagttgtaaatactaaaaggtattagtggtgcttaatatgctctttgatattatatcgctattgatgcaattaagtatcaggtttcatattttaaggtaataacttttaaaaaatatcgctaactaatagtcttttataattaatacaatctctatttttttcttttcatttataaaaaaattaaaaaaaaacaagtaaaaagcaaataaaacccaaataacatcgggtctcatgatttggttttcatttagggggtaagttgaaaaatgtctcttttattaattaattaatcaaatttgcctctaattttatatttatttgaaacatacctct

SEQ ID NO: 43905 - DNA, 2689 bp, Cannabis sativa
cgtgcgcttgcgagttgataaatgtaaaacgtaccacttttggtacacaacactcagtcaccaaaccaaactccaccctaccgaatctgcatctcttcttcaccaagtaaaattgtacctcgtctggcttgtcagatttgattttgtgcaacattaattgatggatcaatgctcctcaaaattgtaatggatctctctcgaagaacattttgaaaggggattccctcaccctatcccataatctgaattcctcaaattcggccttaatctttgagtagtaataacttctgccacaccaagtgacacgacctgtgtaatgctccaagagtagaattattagctgtggaggtctctgcaaaaaaaaaaaaaaaaccaagaaattgaaggttagcaattaaagaatcgaacacaacattggaccttaattggacccatatcagacaaacaaaaagcattcgtcatcacacatcggaccactatcgtcctagcatcggacccaataaaataaacaaaaccaaaaaacagtatatacacaatatcacacatatatcgggcacaatcagaccgtatatcggacaccatcggaaaaaaaacaaataataaactaaaaaagcacaatcgaacacatatatcgggccatcatcaaaccatatatcggacacaatcggacaataaataaataatacattaaaagcacaaacggacacatatatcgggctccatcggaccgtgtattgaaccacatcggacaaaaacaaataatacacagcaaaaggacaatcagacacatatcggaccacctaccgaacccatcagacctacgtcttctacctcaaaatctttcaaattcattgaatgcatcggacctacatcaaatgtgcatcggacctggcttaaagaccaatttcttgcccaaatcacagatccaacattctcaacatccctaaatctaacaaaatttaagtttcacaaacaaaattaatctttaacagtaaaatcacaaacaaaatcaataaaaaactaaaaattaaaacacggactcaccttcgacattgtctccgatggcaccttcgtgcaccgtaggtcgtgggttgggtctcactttggttgtacgtgcaccaagggtcgtggatagggtcgattgaggtctactgtgggttgattggggtgcgccgcgggtatgttgtgggtggagtgggtgtgccgtgggtatgagcgagagggaaatagagaagggagccctgtttgtttttttgaaatgtgaggggtattatggggaatatatgaatgttgacatatatggccaattttaatccatacagcaaactctggtgactttttcagaactagtaacaaataaaattgcctaaaaacaaataaaaaatattaaatatgagttttaataacttaatttacatataaataaaaatatggcatatcaaatactataaaaatacttaaaaataaaaaaatatcatataaattgatcaaaacctaaaaatactatatttaagtaaacaacttctaaaatctcataacgagtctaatttcctctatattttgtgcaaatgggcaccaaattacaacatttgtatttaattcatctccataactgcacaaatggcagtgactatgtgaagatgtattggaagataaatcctatttattattttatttttgacaaacgaattaataactacataaaaactatcatttatagcaatgaattatataattatattaataatattttgtaattacataaatataaataattcaatttttatgttgaaaagtataattaaaattctaaattacattgattaatgtgtaattattagttaaaaaactcttcaagtgaaaaaaacttacaattatttagttacctataagttataagatttttcagtcactatctactagtttccccataattttattttcttctattgtttgttttgcaatgaaataaataatatcataaatatttaaagttttaagtttgtaaacataaatacttaatgtttgtaaaattataattttccttcagttttatcagtaaaaactttgttattgtatgtactttcatttttttaataaatttaaaacgaagtctgtactaataaaactgaaggaaaataaattttttacaaatatttggtacttatactgttaaaataaattatttaatttataccacttacaaactcaaaattttgaatacgtatgtgactatttacccttttacaattatatttgcctttgttaattactattttaaattttattgttttatttatttatttattatcaatcagtaaaataggagactgaactaaaatcaagataaaaaaaaaactattttagttcaaataaataaataaaataaaaataaaaaactatgatcagataagctttcaatttagtgtatttcttgaaaagaaaacccattctctataaacaaacattaatttcatcattataaatttataatcaaaacttaaaatcccatttttgtacttttttttttcttcttcttttgactttcacatttatgatataatcatcaagctaaatatttttctagtttctccacttcttccgtgcttccgatgtaaagaggaactcgttgatgaatctgttgtcacaaattgaaattaaacaaatcaatatataaactaaatcacac

SEQ ID NO: 43906 - DNA, 3018 bp, Cannabis sativa
  modified_base (2206)..(2209): a, c, t, g, unknown or other
gatcgacctcactcctggtgagtttactacttataacgatacgtacacttgcgtgtgcaaaatatcgcaacaataatcataaaaataacatacttgtttacaagtacaaatttgtgaacactatttccaagctgcaaatccaaaacttgatccaaaaattattaaaccccctttaacaatctgaaaaacaataaaataaaccataaataaattataacatcattgctcaaaaaaataaataaataatactacacccacactgtcttgtgcttaaaaatgagacgccctaaacaagcaagcaaaatcatttttaaaaaatatatattgaatattatatttataatatgtacatatataaataaatataccagtactgtgggccgctcaaaatgaatggccacagcggagatggccggttctgcttggggacgaatgcgaactgtgaaggggatcatgtgagacctaggacgagcgacgaacaatctgaaatgccctgaagggtggttggaggtgagcggaggaagtatcgtcgtcgtggttgaagagaatgaggtatcgaagagaagaagaggagaagagaaaaaatgaggagagacattttttagggtttatatatataactattagcagcggggcctgccgctaatgctcgaccgctaatactccgccgctaatagtattaatagtaataaaatatatatatatatatttttaaatattttagtaattaaaaaatattattagcggcagaatttgccgctaataattctaaatttaaatgggcgggaactttattcacagttgtttttgagattattattagcgggtgacattagcagcgggtcctgccgttaataatggaaaatattatatttaaaattttgaactttattactggcgaaccccattttccgccaccagactagcagcaaagaccatcttccgctaataatttcgccactaatagcttttattgttgtagtgattgattgtgttcatctacgtctcaacccaacaaatcagatccatctcctactatattagtaggaaacaaagctataaaaagagaatgttaggtatttctccattgcacaaggtattgcatagctgaagtgctcctttcaatttttatttcatagctattttaaaccgacaaaaatagtttaaaatttacaggtattctccattataggcattaattttaaactctcacttaattttattagaagaactccaactagttttgtggggtattaatttcttttgtaaaactttgtatatggttcacactattggactttaaggatattgtaaccatctaatgagaagattccttaaggggagagtaactgggaagtaggccattgtttggctgaattaatataaactttgtctcttttactattatgttttggaaaatactaaaagacattttaggtatcaaatatcacaagaagtgatatattgttattagtataaatcaatatcaaatttcacatattttaatttaataaataataaaaaaaattgttaaccactcacaatgttttacatcaatattatagtgttgaaaacaattaaaaatacctaatagtaatattgttattatgttttgaaccttacttattttttaggtttatgattttgttatatgatagtgtctattgagttttgtcaaccatattttggtaaaaattaatatatagaaacttccccagagatcgatatgatccaagtgacatcgctatgatagccacactttgcttgcaagtccctataatatttaagttaatagatcaatttccctacgtactattaataaatatgtactttagcctacgtactattcttttttacgtagctagcatgtgttagttattatgggccaaatatattaattcaaaccaactaagtaattgtgagttaattcatttaatccggccaacccatttcttagccaaagctgctatattattcgttttagtctggagtctgttctaacaactttgctacattatttagtagcagaaatcgttatttaattaataaaaatcaaacttttattcaaacaaaaaaaaaaaaaaagaagagtaggttatagcttattgggctgaaaaatactgataggtcatataattgagttattagacacactttaattctactagatagatgtgacgtgtcaagtcacgtatgttaattttannnnagtttttaattttttttaatatcataattttaaaattaataatattcaatgtagtgatagttattgaaatttgaaagcatagtagtgatttaaataaaaataaaaattactattatactatgtaatagtaattcaaaaaaaaattattttcgtcccaaatttatcttcgaaattaatgaaaatgctcatctggttaaactatcaaaacattcaataatttaaaatagtatttaaaatttaactaattctaaatatcaaaatttgaaaataatttttaataaaaaaataaacaatttgaaaaaatttattattaattgcaacactttaagtggattaattatatttaggtttaactaactacatgtatgctgaccctttacatggcaacattaataatttgttatttttttttatttaaaaaaaagttacccaataatttcccataaaccaagaattttggtatatagccacattttatatagaatagatttaacccaacttaacctattttttgaaggaccttccaaatttaagacaactttcaagtataaaatatattttacattcacaaaatatataaaaatttatattttacatttgaataaataaattatatttatatattacgataaccttaaaaaattgaattgactaaaacacatcagtaacacgtaattcatggttaccatactacttttacaaacaagtttaacgtgagaatcaatcacacgctattattgacacccaaacaatgataccaccaccaccttagattttttgaaagtactatatttacacacatacatata

SEQ ID NO: 43907 - DNA, 3029 bp, Cannabis sativa
gggataatatatattgagtttcatttcaaaaccaattagttaagagaggagtagttcatgtatcttatgtatgatatttaattttcacatattatcaatgtgagactctttaacattcggtggctatttatttgctaaccaattttacacgactcgatcacaagtgactttttttgaaatggtttttggatttggatcggttactcgttagagctttagtttgattaccatgttgagaaacatgaaaataagatgcatgatattccatctcaaaaccaattgactataagaggagtaactaatcttatatgtatagtatttaatttttacatatattatcatgtgcgagcttctctaacattttatagccaatatattcataagtttttcctccaatcaaacaaaaattaattaattcaaattcaagatctaatatatatcaaataatcctaaatattcttcctttcttggtgatattatgcatggactaactatatgatggtcatgtataatttcagcacgagagtaatgaaagaaaaaatagatatatgaatgcatcttattttgtgtaccaatgaccaaattatgagtattacgtacagttttgtaatgtgacagagagtgctactgttgaaagtacagtcgcatttgatgaagggattataggatggatcttcgatggttggtgtatcagctacggctgcaccactgcataattccccacttatgttccattgttgcgtatctgcttttatatcccatttttcaaacaacctgttcaaaactctcactgcatatatatatactataattaaattaattataaaaaaaaagacatgatatgtaatcttatattgttgtgaaagagaaaaattagagagaagtgaccttcagagggatctgtagtgggttgagctgttgttgttgttgttgttgaagatagaaataagaagaagataacatgtaaatgagtagtgaaattaatactaataaaaattggtgatgatgaagatgaggcacctcttgacatgagtaattaataatatattattattattattgttgttgttgttttgataactctcttttttcctcagctggtttttactttatataatatgatgataggaataaaatgaaatttgagttcagagagatacatcatagataatttgtataattttcacaaatgaagcccccacacaggactaaattattttaaatttcaatgggtagaaaatatgtattaagattaatcatgacaaataatcagatatttatattatatgtattaggttggacatggcaggtgttgagttgaaataattagaaacattattataataagtagttgccacatgaaaatattatttttttttaaaaaaggaaaaatggcctcgttaaaaccgttaaaactacaagagtatatctagtgataaaaacttcaaaaggaaaagagtgtcaacaataatacaattagagtagttaagccaccaaacataatgatcattgaaagagagtgctagcttagctaaagtgcgagccactattagcatccctaggataatacataaaaaaaaatataaataaagtttttacaataaataaggatatttttaacaataattgatcaaccttgttatgagggatgacattaattacaataaggcaatcagactccaacactatcctctggtaaacaagatgacacacaagcaagaccctagagtagatatacaaaggcctcaacaatataatatcaaaagagaaacaaccattctaagttcaagtaccaaaagctaagacaaaactagtatcatcacgaaacaactgcctaaggtccaaatttaatcaaattggaactcaaacctacatcaaaattgattttcaccacctcaaaaggaggttgagaccatctgagaatcggctgattctcaagagcattgccaagacgaggagtgcaactattggtagaacaataccgctgttaccacccatgctaggaatccaccagtcataataaataaaaatcttattaccatcactaatgagccaacaaccaccagcttcaaaaatctccttatcccataaaatagacctccaaataaaagaggttttctttggactcttcatccatcaaaaaggaagaattagggtagtaaataaactcttgccaccaaagaatcaagagcaaaatacaatctcgttgctttagccaaaagagcatggttaaagagagataagtccggaaacccatacccttatcaaacttgtgccaacacagttttttccaagtataccaatgaaactttttttaattctcattaccccccaccaaaattgcagacataatccatgaatctcttgaataagggaaatagggagtttaaaagattcatagaatacgtagaaatagacttgataagaacttccttgtcacctgacaaaaaagaatgagacttccaatctgaaagtctatatcttatcctatcaaggaaagactgaaaaaatgccattcttactttgtcccacataggaagggagaccaaggtatttctcatgtcaagaaaccaaagtgacacaaaataggagccaagcgacatttgttctcataaaaaatatgagtactgaagcacatagcagacttggaaaaattcacagattgcctagaagctttcctaaacaaactcaagagctgtttaaatcttataaaagcaaattcattagtcttaaaaaaagaagaggctatcatcaacaaaaaacaagtgagataaaggatgtccatttctgccacaagatagacaatacataacccattcgaacaatcacgactaacaagagcggataacccttctgcacaaatgagaaaagggaaggggaagagaggatcaccttgacgaagccccttagcaagagtaatttgaccaggaatttccacattaagattaaaagaatagtcaaccgaggagatacattcctgaactaaattaatctaattctcatggaaactaagtacatgtttggcatca

SEQ ID NO: 43908 - DNA, 3386 bp, Cannabis sativa
attccttttctgtttccgtgtccatgtttttgcccactgatttttactttttggagatgacaagtattattgggccgaagattgtaactgggcctagtccaagtactaattgtatggttttgggcttcacactatgcatctgtcatcagcccaatatcagctgtgaatgctctgtacaaccttttctacaaaaatatgacgattattaaaatagtttttaagattatgaagaaaaaaactgttactaaaagtaaattttgtgcaaaaatgcaggaaattaaaactcataaaagaattttaattaaaaaagtccataacataataatattttttctcatttttggcataataatcaccataagtaatagcataagtaaacaaagaagaatgaatcaatcaatgttgcttgatcttctttatgagcttgagtaatattgtcattaaataccttgaaggtgtgtaacacaatataaaatggcattttacaagtagataataatttttttatattatttattaaattaaaagacagaattcaatataaaattgtacttgtagtaatataattttcttatatatataatgttgttggacaccaataatacaatttagtacttctcaacaaaaaatagatatattaataaagtgtattttaaaaatggatgtgatgtgtattttaaacatatttaaaaaaaaattgtatgatatcattttattttatttttagtataagatatatgattatgatatatcaatttggcaataaaaattatatgttcgtgacaagactaatataataatataatataaactaaaacaccaagtaccaaaaggagtgaccttggtttctcaattgagttcagatattttattttttaaaattaaaattaataagagagacccaacttggagtttgcaatgttctttttgaaaggaagttaatatcattttaattatcattgtttcaggaatgttagatttctatcaacctcatgtactttatacgtgtccataatggtcattaccctttcccctcttgatttcttacacgtaggtttaattgttcatcacacgtagtagctgagctgagggataccacccccaagggcggcccaagcattttggaggcctcgtgcaaaattttattacgagtttttttttttaagatttatttataaattttttatttatgtgtatataataggaaaaaaaaaaagaaaaatataggccttttctttaaaataaaaagtaaaaaaattaggccttaaaaaataggggccttgtgcaatagcccaagctgctcaatgcttgggccggccctgaccacccctaatcacaaaatatccttgtaaaaagtaggtattatttgtttctagaatttgtttttcccacttgtttctttttaattagttagtaaggttaagtttgtttttgcttatgtatttggcaatatagaaatcacaacattttacaagttgcttcaaaatattaaaatcaacaaaactttacgtacattgattagtatattgtcttggctggtaacagcactaatttctcaacttggttttctaatatggtatgtggggacatagagatttagacttataaacacactaatgggagaaaaccctttaaacaaacaattcaaacaaatttaatacgtggcacaaatcaggtggtgatgtttaagtgggctccaccgttcttcgtgtcatcctcaatatcgaaccttatttttctcaattcttttaatttttttaaatatagaaattaaacatatattatgactctctctttcccctaactgcatatgtaaggaatattaatatattaaaaagcaaaataaaataaaataaaatcttcttaagctctgcctcttgggttttactttaaggcctttttttcgtaccaaataattcgatcaagctagctgtgtgaaaaggtcatatttcttttcttatatgtataaccatcgaacacaatcaattctgactcagaaatttccaagactatggaagatgaaagacacagcctgatattctcgaagcccagcatccatggggggaaagaattaaagaagttcggatcattccttagatgggtctgcgtggaccaatcaagtatatggcgggtcgggttgtcgtggtccgttttcgttgtgttcaccattggtgtacctttagcgtctcacttcctcctctcctgtccgacctgcgacgacaaccatagccggccgtaccatgtgccagcgcagatatcgctctcgctttacgcaaccctttctttcttttgtttgtctcgttgggctcgtaagtacgggttaaggaagtttctcttcatcgacagattgtgcgattccagccagaaggtccgacaaaaatacgatgaatatgttcaggtacgaatgaattaacaaaacccctttaattttttgatcaaagaaattgaaaattcagaaattttaatttggttatgttatattaattaaggatgtatattataaaaaacagcaagaaaaagttcagaagagagagacatcatagctaacgaaactttgagaatcgatgaatgagtaaagctgcgggtgaaagcctaatggcgtgtccttcttttcttgtcctcaaaagagtctaatttaatacttttgtagttaaaaagtaataatgaacaccgaacacttgtcactttttctgcgaccgccactaaattatatgtagagagtagacaatagccaaattgttttgttcaaggattttttgtttttttctgtgaacttttgttttctacattcttttctgacacctacttaaccaaatggtaatcaataatagttgagcaaatattattcttatttactttctagtttctatacacaataactttgcatcctgttatttacttattaaggacaatgtcacagttagtattggattaatttatggccatattgcattacaatttggttctccgtccctagatattgcttacatacttttattatttaacattaaaactccattaaaaaatattcatttatataacataatttctatttattatatttttatattggggtgggggatggtttccaacttggaagttgagacctcttctatgtgagttactgtttgtttagatacatgaataatttgtttaaaatagtttttttttttttttttgttaactattattggtaaggcttaaaatcagcctaataataagtcaacatctatgagactatttaccaaatactatgatttatcaattccgtgagaaagaatcattagattttaatatagtcaagttacaacttttttttttattatttttttaatttttttaaagagaaaagttctcagtcctcacaattttttatttttattttt

SEQ ID NO: 43909 - DNA, 5055 bp, Cannabis sativa
tattttggttgtcagtatttttaaatcttgtatcatctgaattggctttaggtgaatgcaagctagagaacatgagaacactttgcatagcctgtcattctgatgttaccaaggcacaatgtgctgaacgacgcttgacaagggcaagggctaagaagcagctcaaagctatcatgaatggtcttaaaaatgttcagaacaatgaacaaacagaagcaaatgtgagtacaaatttttttctgctttcctgcttagtttgattatttctttttctgttttttcaaagctagaggacttgaatattcatagttcttaaggataaaatatgatctaccaagtctattgtcttgagttcagcattaagtttactgtgaaattcatattatgcgtagaagacatgcacaaacttttttttttggattaaagaacagtagtatagaataataaaatataataacaatatattgagaatctttgatttcaggaccaagggatttcgaagatacaggggaatgtttttgaggatgagcttttagttaaggttcctgggagtgcctactgttcaggaaataatatggatggtggtggagatgaagggccatcaaccagcaaagaaatttctgcatctacaaacagtgtatagtatactcagcacattgcaatgagagaaaagaaaaaggaactacatagagggtagggtctttagtaaaatataaaatatcccaaagcgtacatatgttttttgtaacaacactccctggttcaattgtatagactaattgttacagaatggagctaatttaaagtagattctggggtgtctgtcagtcgaagaattttgcatgaactcctttgccatcaaacaagattggatatctgggctgaggactgaggtgccatggcccttggcttgagtgagaaagtgtaattcattatgggctgatttctcatggtgtttctttcttttagtattgagggctggatcttcttaagatcaacactggctgatcatcactagattcattcacttgtgtgtcccattcaactcaacaaccagttatcttacctataaaatgtcccagtggaacaaaaccgattttcttgtatttgagtattcaaatcttcatcataattctagattatcttagaatagagaataataattgttgaagatgaaattgactcttcaccttcttaaaatcgttattaagcgtatcttattttaaatgtaatgtttaaaatccatatttaattgttacttgaaaatgaatataccacaaagaacaaaggtgtaatggagaatatgtctgtttatttccagaaaaatgctctctgtatgagttccttttttgtactggtggtgaacgtttatttagaggaaagtttttgatcctcttttaagtggtctagggtttgtattctcgagtatcgttgtgtatacatcttggtcctcctagaatgttgcttgagtaatggaaggtcctttggaagaagtccaagtggagaattggggtacaggatttctccatctccttcaaatccaactcggagctaggtaatgatgttaatgctaagtttgtggtgcctagattgttttagaaaaagattatctttaatggttttttagctctgttcttagttgtaaatggaactgccaatggatggaagcttttggaagttggcactaatactttcattttgagattgacaaaaaagtaggaagctgattatattgtgagaaatggcccttcgccggtgtgtgatgggttatgctggaggatggaagatagtttagacaatgaaaaatactacagtgattgctaagaggataggcccatttatttctatcaaccatttatggagaaatggctttctgtctaatgattacgtccgatttcaattaagtatacaacttaataagcctattctagtctagtcggtttacttcttcttatggatgaatgagttagtttgtggtgttattttaaatatgagaatatgccttgtgtggactacaaatgtggagtggtgggacatgaagaggctttgtgtcgacgtaagaggtgtatgaccactaatgattttaattgaacaatgccaatgtataggccttggattcgtatggggtctcgtattagggattgcttctctgagtgtgccctttatgagcaagataggttgaattgtgaagtggcagatgttcgtttctaggcagaagcgaggcgtaatttggttcatggtttggataattttaaatcggctttagttggaactgagattcatagggatgctttggtggaggcagctagagttagagagacccggagcatggaggagaatgttaatagtcaagatgctactcagagtgtaaagctagccacgatagaaggcatggctcttgctcaaggtccggctctagtagagggataagatggtcatagtgaaacttttccctacgcgcatggtgcggaaggacaatcagtggtagtggagcaagagaaaaacgtgtttcacgtaaggagtggtggtcccaacaacatttcaaattttggagataagggtaaagggatttttgaggtggacaatcaacaagtggatcattttgctatggtcttccaaggctttttggaccttaatgctaaaccggcccataaaaaatccagaccctttcttaaaggggtagagtatttcaaatgctctgagagttgggtcgagtaatgctccacttgttggacctaggataggaaagaaaagaagaatagatgactttgtggatggcccgtgtgcttggatggatgggcttcggataatgatatctcaaaggcaagtggtacaaaaaaaatcttattttaaagattcttccactgagatagagaatacaactccagtaaaggcggttatttcttatatggaggttgtggaagtagtgtttggagtagattcgcaagtctcaaaggaaaaactaaagagcaatcttttgggtgactcagggtttaccaagaatgcaaactagcttgtagatggagggaagagcaagaaggattttctcatggccgaggaggcgagcctacacatgccaccctaatctccatgttaatcctatcttggaactaccgagggcttggaaaacctgaggcagttaactctctctgaagtttgattcgaagtcccaatccagatgtaatttttctaatggaaactaagaaaagtttgctagacacagaaggtatttggcaatgtttgggtttcattaatggtgttgctatttcttcggtaggtttttttggtggtttggctctattctagagacgaggttgggatatttagatcgtttctacagatatcaataaaataatttctcattttggagcaaacaagaaccttagtgagtgagttagttgctttacttacgctccttctcacagggatttctgatcagagttttaggaagatcttagcaaggtcatgggggagattactaatccctggatggtcttgggagatcttaattctcttctttttgcaaaaaaagtggtggcagatcggcaaccaaagcggaagggcaagggctttgtaattttatttttaataatggagctatagttttgcctaaatggatcactcaattgaagaaggcaggggttagaaatttacctatttgttattcggaccatgcaactattgtgttagatactttcttggaaagagagaacttcaagtctcctttcggtatttggatgcctcgagttgagatattgatttccgttgagtcattgaagaggcttatgatgtggctattagaggtttccacagttccattttatgtcacaagctcaggctaactgccaaggctttgagtttgtggaacgtccaaatttttggccattgtcagactaaacttaagtcgttggaagggtttctttgtgaggtgcaaaaccaatccccttctaaagaaaatattgagctcgaaggtactattatgttggaaattggtgaagttgaaaatcgacttgagtctatttggaaaaaaaaaatcgcgagaagggtggctaaaagagggggaaaagaactctagattcttccttgcttcaattttggttagacgcaagagaaattttattaaggtggtggcagaggatgaagacagttggatcaaggggagggagaatctagctgactatttttgttctaattttcaaaagatctatcaatctttgaatcttttttggatgctgagatagagcagatgatgccaaggtgtatttcaagagaagagaatctcaggctgtgtaactgtccttcggtagaggaaatcaaaaaggtggtctggtctttgcctcctctcaaatctcttgcacatgatgatttcctgattaagttcttcaagcagttttgggatattgttagggggcaagttgtggactttgtttaggagttatttcgaagtggtaaattttgcaaggaggtgaactgcactttaatcgtgcttatcccaaaaaaggcccaggtaagttcttttgatgagtttaggccgattagcgtttgaaattctacttataaaattgttgttgaaattcttgctaacagattaagtctagttatggataagttaatctctccttaccaatcggcctttgtgaaaggtaggtgaaccgtagaaaattctattattgcgaatgaagtcatgcatgatataaagcggaaacaagggacgcaagcttttgtcagcataaaatgcgatatgtttaaggcctacgaccgcatggaatggagttttctcttaaaggtgatgcaggcttttggttttgataatcatttctgtaatttgatactgcaatgcattttttcaatgagttttcaattccttttcaatggaggtttaacaaagaaattatttcctaaatgaggcctgagacaaggggatcctttatccccttaactgttcatattgtgtgtggaggtgctttctagattatttctgaagaatgaaaatgatgggatgttgcgtggatattcagttagtagagaggggcttccaatcactcatttgatgta

SEQ ID NO: 43910 - DNA, 2840 bp, Cannabis sativa
  modified_base (2804)..(2804): a, c, t, g, unknown or other
ttaacattgttatggactttcttgttaagacaaaactaaactctccaaagaataaccataaccaattcaatcatctctttttcaaggggattgataaatctatgaataaagtcaataaaatccacacaacgtgtccgcaaatctcccaacataaactcacagattttcgtgcattgtgccaaagaattacaaccccaaagggcatgatgagtagcttcatctttcaccccacacaaagaacataatttgtcacataaaagaccatgacgagccaaattagctttcgtaggaatccaattatgggaagcttgccatacaaaaagtcttactttaagggggaggttaagagaccaaatccttttccaccatcttgacaaactagtagctggtgaagaacgaggcaaagctaagttacaaagagcaagcaagtatccactcttaatagaaaaccaacatgaattctcaaaattctaaatacatttgtttgaaacatcgtttgttgaccacaggataaagagaatagcatcaacttcagcagctaaaaaactggtctgaactagttctatattccactctctcgaatcatcacaatgcaaagagtccttagctaaatcatcaagcaaatgaggtgcagataaacggcctgatggcaccgaagggatccaactatcagagtatatagtgatatctatgccattccttacacgccaaaccgccccaaatcaaagagtttcttaccgcaaagaaaattattttagacagaagaaccctgcttggacttagtgatttcaacaaaaagcctctttctgaaatataacccttttagcacacaaccagccaaagaattaagaaaattgtcaatgcgagaagcttgttttgccaaaagggcttgtttaaacatatgaagatattggaagcacataccaccatcttccttatgtaagcaaagcttctcccaagtacaccaatgcatctttttaataacatcattgccaccctaccaaaaacaagcacacatacgatgaatatttttgacaaaagcttttgaaagcttaaaacgattcattgtataagcaaggatagactgaataactgctttgatgaggatctcacgaccgatccttgaaaaaagttttgatttccacctattaagcttctttcgattctatctcgaatggtatcaaacaaaccattcttgctatgccccgcagaacaaggaaggcccaaataattctcgtggcaatcgacccctttaacacccaaaacatccacaaatttgtttgtcttagaactcaaaatattggggctaaaacaaactgcagacttttcaaagtcaaccaactgtcctgaggtagctacatactagtgtaacagttgcttgaatcttacacaacacacatctgaggccttaaagaaaaacaagctatcatcaacaaacaaaagatgagagataacaagaccaccacgagcacaagggagaccatacaacaatttattatcacaatccattttcaccaagcttgaaagaccctcggcgcaaaaaagaaaagagtaaggagacatatgcatggtaaccttgtctaagaccccgttgaggagtaatagagccagggacctcactattcagcaacatagagtactccacagaagagatccaatcaagaatttttctaatccactaagtatgaaaatcaagttttcccataattttctccaagaaacaccactcaactcgatcatgagctttggacagtccaacttaagagcacagaaaccatctcctctcttctttttctttaacgcattgatgattaaaacccaataagtgcattgtcagtgataagacgtccaggaagggaatgcactttgctcatcagatatgatatgtcctaagacgccacacatacggtttgtcagtcttagtaataatcttgtaaaagatattacaaagactaataggacgaaaatcaacgacactaataggataataaatcttcagaatcaagaagataagagttttattgataccttttaagctagaaaccccatgtagaaaagtcaatgctgcggatataatgtcaagtcgcaccgtattccaattttttttgataaaaaccagctgtgaacccatcctctcctgggcttttagatgggtccagttgaaacagtgcttctctaatatccttggcacaaaattccaaattagacgagcattaaaatccttagagatttttctaggaaccgaattaatgactatggcaaaagcatactccgagtggaaaaccaaagtaaaaagagtagcaaaataatcttcaaagtctgctccaatttcaccttgacttgagacctcaatgtcattcctattttgaatcttcaaaattttattattagcctgtctacccaaactacacttctggaaataagctgaattcttgtctcctaatttgagctagtcttttttagctcgagaagcccaatacttctcttctttttcttaaagaacatccagttctttctcattttttcgaagctcctcacagctaacattgtcaagattagcatccaaaatagaaaaattcttgagctttttatttatagaaatgcgtgtctcttatttattccagccattcagtttacctcccacttcaagaacattgagttggacattgcaaatgggatctaaatctttgaacttccaattttggccaataattttcacacaatcttcctcatctgtccaagcatattcatagtggaaacaagaatgcaagatatggacgttatgttggaaatattttaccagnatctagatttactatcatgtatgtttcattaacatc

SEQ ID NO: 43911 - DNA, 3118 bp, Cannabis sativa
ggctttgtctataagcgctggaggaggtcccaacttgacccattaggcgatgccctcccacctccgccggattccggtccggatcctgaggcggaggagatggctcggagagagcggaagaggaagacgctgttgaagctcaaagctcagtaccagagggaaattgaccagtgggagtatttatcgaataccttgtgtgcaatggaggaaactacgcttcagctccaacaacaacggcgtcaaacggtggttccggactcttctccgttaccggtggttccgcgaacggtttccgtttgtgggtcactggttcaagaacttgtgttgcaggtaaattgggaattttctacttccttcttcttggggtttgtctgttactataatgaaattggaattggggaatttaggtattcgttatttgggtattattagaacgtaaaatgttagctgaattggacaaattcaactatttgggactcaattgagcttaatttttgtttgttttagaaaatggaagaggaaagttttgaacttttattctagggtgaagttttgaaatagatgtttttaaggttatattacatgaataggttaactctagaatttcataacatgttaataagaatttcttaccaattataagacagagtattttgtatgttggtatgaccaaataattcactttgatcagtagacttgtatttgaaaatggaatcaaattcttgagagatagtattattaggttatgcatatggtttcttgaagatagaaaaaggaacctaaaaactaactaagctgtggtttgactttgactttgacttatccaacctgttcattacatccaaaaataaaaagtaagcttcctatgcaaagtgcaaactccttgttttggttgcacttaactttttgattatgagtgagagaagtgaaaacaggaataacttttttcatgttgtgaaagtaaaacctttcatttagcatatagtattgaacacactctccaattactgtctttcattatgcaggtggaaactcaggaagcaattattagagattcttcaaatctttgtgatatagcagaagcaatttgcaatgctcatgaggaagagacaaatcagtctttaatcgatctcccgatatgggctgtaccagcttcaccgcgagagcttttagcatcactttgtgattagtgagtattttctttttcttcttttgttgatgattatttggttgggtttttattagtaaggaaacaaacaggagggtcttccactgctattggtgatccctaccttcaaaagtaatctcactgtttaaaattttactgtaatttgttgtcgtgtagaatttctttctttttttttttttaccttttgtagtcatttgatttagtggaaagtttgtaagtaatcttcctataatgaggataagaaatatgtgcaacttaaaactgagtgttgtttaggagtaagcattgtacgatgctgtaagttctctatagcctgtatattttgtcatgaaatttactcatcatgtgttgaatgttgtatatgtttggattgtcttatattttcttatggttattagaaattactttgattattgctacagggcttatttagaagtgaatgattgaggccagagaatagtacaatcctatgcttttccaaaggcatgttattatgcctaacaatatcttgacataatctcattatgattgaaaaactagtgaaatcctaggcttctataactgttttgaaaggttattaacttataagaaacttacttatttctatactcgaatttgagtgatcagtcaatgttataatttgtatttgtgtactaataaaatatgcaattaatttgtattataaaagaaattttcttttttgtttggtttctactgaatgccattctttgacgagagccaaaaaaataactgtgatttctaaggtttccatctaagaacacaacttaaaaataaaatgtcgcaaaataaaagaatccaaagtaagcttgaaaagaatacgaatggtggttactcaaatgattccaattttgctctggtacaatttcctaatttccaagggttgtgagatcaacttcatttagtagagaaggaactacttcaattggcacaattctgaaaccagctttgtggcatgcatcctctaattgcttcacttgcaaaggaccatcagggcaaaacacaaccacagctccaccgctacctgtaaatttcgatgcagcttctacccctcgggctacttgcaccatttctaagttcatagcaccaagaacatcatcgccaaacatgctcctgtacatcatccatttatcatgatttagtataaagttaataaaatgcacaaggactttaatttgaagattcacagaatgttctttatccctattgacttgtttacagggcatgtacttctgataaacatattggtaagatacctacctagtacctagtgtaaatgacagttggataatcttgaattgaagtagagtataatccattaatagcctctatagatgcctgagacgacactagctgacatttcatatgtggttgaacttaaatagagagtataatccattaatagcttctttctataaggtgcctaaatctagtgttttataacagtcggatacatatggaatattgctatggaagaccaagagtcctacaaaatttagtttaaaatttaattagagataacatattaaaatacactaattggtgttggtgtatcgattaatagtgttgaacaccatttatcaatatgtcattgttggttgaatttaaaaatagaccccacttactagagaaatgttaaaaagtatattcatgtttagtacctttctcggtatcatatcgctattgatagaattaagtatcgggtctcatataattttaaaaaataacttttaaaaaatattgttaactaattataggacgccacttataaaaggtacccaataacaatgctccacttattataaaaacatctcaaaccacacataacatgacatctacttgatgttgggaaacttaaggcgccgtgcagaagtacatctaagtcattcaaaaccagatatcccttacctt

SEQ ID NO: 43912 - DNA, 2816 bp, Cannabis sativa
aaagcctaataaaattaaaagtaaaaaatttatttttaaaaaacaaattattttacatcatccaaacatattttttgttttttgtttttggaaaactgtttttaaaaaaattagccaaacaactccaccttttaaaaactacaaaatactttttttgttttctgttttgagaacataattttaaaaacaaaaacagaatacattgccaaacatgcacttattttttcttactaccaaacaattaagggttgtttgttttaagttttaattagcctagaaaagtgtcaaaataggtgatggggaatgtgaaactcaactcttcaaatgggttaagattactctttaaaatctagtgggacccataaaaattaacacattcccacctaaaactttgaaccaaacaaggggtaaactacacattcgcccatatctaatccctacccctacaccaaacacccccttagggtttagattgaaatgcttatggaaataatcaagcatttagagatttttctagctagtgtttgtagataaaaattagggtgtcataaaagttgaaccaatacctgtatttatagtgtttaggtgaatcaaaacttgaaatctaatacccacacattcatggctgttgttactaataataaaagtgggaataaatgggataaaaatattggcatggaaatagaaaacgttctcattgaagagatgaacattattgaaagtttatcaaaaaattggtttcagtggtacacggtgacatgtcgcctggagagatagcttaaaacccttcatcgagaaatattacaaaacatcaataaccccataacacaaccttcatgtgacatgttgtctgatacattttcattcaactctttttttgaggtttgtaacttctctataagacaactctttcacgaacatttaaatcatcattttaatggtataaattagatatgaatactttccaacaactatcaaattcataatctattgtgtaattactcatatattaacataatataatcaagtatgattcataagttacaaatcctattttagatttgtaacttctcatggtatctttagttttggataggcgacatgtatacttcccaggattcaagaacaattgaaacgggcccatttgcaggcccaattaatctagtgggtcagcccacgatgaattcagatcgaagtcttgagtcctattgcaatctaataagaatcacggttaggcggtattttttagttttggaaggatggctcatgcaaaaaaaaggaaaggctcgaccgagtatacccagatgccctcatatggtgatctgggaagggcagctagaaagttaccagggagtaatcctatgtggcactttaggattttgcccccttctcgggtttaggaaatgggcagagcagcaaaagggacatgccttttgtccaatgcccatgattttgattgataatgtacatgatcgacagcgaaagctacctgtttctatcaagttgtccccttctatatggatgaccattgtctcacaagatgaggctcacatattccacccaaagtcaatataataatgtactttaccccatcagtaggctttatttattcgccaaaaaaccctaattggtttggcttcacccaataaccaaactctagcctataaatataactttattccttcatgcaaatggttatgatttcaagcaaggctaagggtttcaaacgcgggcaagaacacttgtttaaaatacttaataataaagagcttcaataatattgactcgtgcactaaggctttttaacgcccaaaccacgtaaaaagccccttctcatttatttcttaaacaattttccttaccttaatttattaataattcagtttttaaaaatttcagtgaatattttgatactttcattaagagctaagaaaattattctccattgttgtcatgtacaacaatggttgcaacccaaaacactatggttagaccctattaggctatttttagcctaagtttttggtcactttttatagttatttttcttctttattattatttttgaaatagaattacgcttgttttttttttggttttaggttgcgacacttgaaatgtataaattcgtcacatttcagaaaacggtgatctacaaaatagaaaaaaatttgcaagataatgaagctaaaacttcaatcctaaatttgactatgttttggtccgattttggaaaaattcaaaacataaaagtttagatatctttttcagctttccaacgcctcttgaatcagctcatttagagtttgtatctgaaagttatacatattttactgagaaagggaagtaggaacgattttgtcgtgactaatatttgtggtcgtggcgagcaaaacttatggctgcagtgagatggctacagaaaaccttgaattcaacttaagaacttcagcttccgcagcgtcaacttcgtacgggtcaaggagaacttcatattttctcatttttaggctaaaaatctctatttaatgaaaggggtcgtgaattatagcagtatatataaaatggaaccctaaacacacaagaagaagcttggagtgaacatgcgcgatccatgaaaatcccgatgggattttatgccctaaataaaactcatttcaatatattctgatttgttatcaatagaagattagaaatattttatgtttacatatagttattcatgtttatggtttaatatacaatttatgttaaatccagaatatatagttatttacaattacagtaatgtcaacacaaatggaaggtaattgtga

SEQ ID NO: 43913 - DNA, 6096 bp, Cannabis sativa
acctctaatggcatgcttcatgaaacttcttgtgttgatactgcaccttaaaatgatatagcaaaacgtaaaaaaagacttcttgaaactgcacgtgccctcttgtttcaaatgaaagttcctaaacttttttgggccaaaacttattaatcacatgtcattctctatacttaatggtgagatcacatttaaaattctttttacttgtgagttattgtttccagttgctccttgggtatttgacaatatttttttttactcgcgatgtttgtccacatgtcaccaaattagaccctaaggcattaaagcgtgtctttcttggttattctcgttttcaaaaagggtacaagtgttattaacctgatctcaacaaatattttatttctattgatgatacctttgtggaaaatacaccttacttttcatcacctactcctactcatcaggggaggatgatgatttgttggtatgttctatcacatcctctgcgcccgatacatgttctgacgactctcttgttccttcacatgcctcggtcatagctcccacaatacctacacatccaccacctccaccactacctaggcatcctatagtgtacaccaggcatctacctctcgtttcatgtcctgcacttgcatcttcgtcatcagatccagaactcaagatgatcttcccattgcactacgtaaaggtaaacgccaatgtacatatcctatttctttttttatttcttataatcatctcttctcttcttctttctcttttattacttatcttaattctatcactattcctaaaattgttcgtgaagcaatatctcatcttggttggcttactacaatgatagaagagatgaatactttagttgcaaatggtacttgagacttagttaatttacctttagaaaaacgagtcatagggtgcaaataggtgtttacggttaaattcaattaagatagaacaattgctcgtttaaaagttcatcttgttgccaagggttatgctcaaacttatggagtggactatcgtaatactttttctcctgttgctaaactcacatctgttcgactgttcatttatatggcagttactcatcattggtctttgcatcagcttgatattaaaaatgatttttttcatggagatcttgaggaagaagtgtatatggagcaacctcctgagtttgttgctcagagggagttaggacgagtttgtcgtcttcgcaaatttttatatggattgaaacaaaatcctcgtgtttggtttagtaaatttagtcaggctgttgagaaatttggtttgttgaaaagtaattctattcattttgtgttctataaaagatcaactgctagtattattttgttagtggtgtatgttgatgacatcgttattactggaaatgatactgaatgtatctcaccccttaagtctttccttcatacccagtttcacacgaaagatttaggggtgttgtagcatttctgagtgttgaagttactcgatgtaaacaaggtatttttctatttcaaagaaagtatgcacttgatttgttaactgagacagaaaattgggagcaaaactttgtaatgctccaatgaatccatttgtgcatcttacacgagatggggaaccatttgaagattcttagaatatcgcagattggttggaaagttgaattatctaattgtgactcgtccagatattgcattcccaattagtgtcgttagtcagtttatgtattctccaacaattcctcattggccagtagtagagcaaattttatgttacttgaaaggagcaccaggatgaggtatagtttacaaggatcatggacataccccgatcgagtgcttctctgacgcaaatcgggtaggctccaagacaaaataaacgatccacttcaaaatattgtgtatttgttgggggcaatctgatctcttgaaagagtaagaaacaaatattgtgtttagatccaatgctgaatcagaatatagagctatggcacaatctgtgtgtgagatgataagaatttatcaacttttgactgtattcgggtttaagacttctattccagcaaaattgtagtgtgataatcaagttgctcttcatattatctcaaattttgtgttccactagtgaactaagcacattgagattaattgttattttgttcgtgagagaattcaaaaacgcatgatctccacaggatatgtgaagataggagaacaattaggaaatatttttacaaaggttttaaatggggtgtgggttgattatttttgtaacaagttgggaatgattagcttgaggaggagtgttagaatattagttgtatattaattataaaaattaaggtaaattgtatttagtagtttcctatttagtctcctacctttgtatataaatatatactattctacggaacacaatacataattcaatcatcatattttacacaacttaagatttaataaagtcctaaatataaatttatagaaaaatagttttatagtagataagtattattctatggaaatacaatacataattcaatcaccatattttacacaacttaaaatttaataaagtcctaaacataaattcatagaaaaatagttttatagtagatgagtcttccaatgatatataataaggtagagttcatttacaatgatgattatgagtcactgttagggattaaaatgaccgattttaaaagttttaccttgtatctgtcctcagcaaaaagcatacgcaaatcacccatataggagaggctgcatattttggcataaagatcttcctgcataaaagagcagtgaggaaattcatgtaattccaaaatgattgagcatattgacaaagaaacaaacctcaggaaacttcttcggcagaaggaggagagcagcagaaagtgcagcccttaaattaactgaatttaaattctcaacatctaaattatccaccagtatatgaacctgaggaaaaatgttttataaccccaagttaaatatcacatcgtgaatggaaaaacggtcccttaaccataagagtgcaaaggacacaacaaatctaaattagcacaagaacccagagcattgcaaatgatgctcctttaacagcaaattaaaaatattatgcaaacactctttcctctataaaatataattacacgagagattttcaattttaaaaaataaataaataaataaatcaaatattctagtttgtaaaaaagtcgacccaagtgcaatttaatatgaaaaactgtctagataaacgtgacatgacaaggcataaatgtaatgaaggcttcacgtctgcaaaaggattttcttttctacatgtccatatatatacatgtgtataggacgtgtatctggtggaaagttagaaactcctatcaattttttaaaattctatgtcgaaaataaatttaaaaataatttgtttcataaacgtatagaacaggcttcaacctttttgataaggtaaattatttaaaattttccaaaaatttgtaagaaatcaaaaaaactaattgtactcttataaagaaattagattgtaacacctatccatgtgtcgaaaacacaataatgaattgctttgaagcctgatttaaatcatattttctgcacagtaaattatccaaaatttcataaaaacccgtaaaaagtcctaaataattataatgcacaccatcatataaaataagcatgtgccaaaaacagagacgcttctaacattgggaaaaaaatcatgctcctaccaaagaattttcttaaatatatatatatacacacacattgatatagacataagaaaagaggaatgttaatacaaataaaagtgaagggaaaatatgaagatgtcatccaataataggattcaaagaaaacatcccaactcctaacaagactaggtaatttttcctaaaaggaaatttgagtttctatgtttaaaagggatccaaacaaccaaaataaccaattattggaccccattacaaacttatgttaatctttcattatgtacctattattaatataatgtgcacccatactctttaaatgttataagcaaacttactcagttttatcaaggcaaaaaaataaattgcaccactttaattatggttttaattattgcatacgagttgaagaaaaacactgaaggcctacaggtttttgcaatcgaccacacaagtagaacctttcccagttaagtatgtcctgaaccaagttgtgcatcccaattacaccatatttgaacatctgcgaagagttaagaagttgacatatttcaggagtagcagatgcaaaaggtgaaaaataatataagaactaaaactcaacaaaaaccttaataatttcagtgtcaaaattaccattaagaaaaaaaaaggcagtagaacccatatcttaaaaacagtccaacttatcattagagctgattgctcagtaccttgtcattccaagtaacataagggttgaagtgagctccgacaccaatattgtcagcaatgtcagtgatctaacacagtcatagatatatagtgttagaatcagcaataagtaaaagtaagtgtgaatgaagactgtagaaaattacagtagcacctggttgtaatgaatgattcagtaagtgtgaatgattcactgttctgtttggtaaccaaagatgatttgtcatcttttgtaattatccttccatgactaataaaacccaatatgtttctcatttttcttttttttgtttttagaaaacgaaaaaaaataagttaatttcattaaaaaggtaacatcaagataatcttagctagttataagttttatacatgttctgaaagtttttatattcgtgatttatttcctatattttttgttagcgtgtaaccacagtgttcctttggcataagcgaggctcgctaataaatttgggaggaagtcagtcttagacatttacctgtctcttttttttaagaaaaaaggcaacataacttaatatgggggcattatcactgtagtgttgacagaacacaaggatgtcaatgtaatgctatatgcatgagagagaaagaaagaaaagtaccaatttttccccaccaaggtgcagcaaacacgaagcatagtgatctccattcaacttgagattcttggttgttccgataaaaagttaaaacccataagaattaaggcatcctttacaaaagaacataagttctgtctttgagcttacctcagcatgccattctagtggatttgacacaccaagaatatagtccaccagtttagactgatacccgtatcagaaattcaaagcaacattagtacacgtataaacaagtaacaaaagaagatgaaaaatataaagagaaaccttgtcattgttatttggatgaagagcagaaccgtagacacaacagaactctacaggtggaagaactttcagaaaactttcaaccacagctttgccatcattcatcatggaaaaactgcttgatcaagttcaaaatgtatacatttactcattccacatacctaacttgtaataaaagaatttcttgtggcttaatagaatatttttaaagatcttgttaattttaacaggaacatgtcaaatactaacaacaatgttgaagagatgcaaatgaataaaccataattgttcacaacttctctaaacaagctattagttggtagctattcaatgaagtattgtccattttggttcaaaacttctccaaacaggttattaattggtaacatttcaatgaagcattgccttgtttgcttctcctattaaaatacctatgcaatttgaaacaactacaaattatctctccagtcaacaacaaaacattgttccaaataacttatttgtcactatgagtactcagaatagttacaatttaaattggctagaaacaccataaatagattttatttggagagaagtttctcaatatcaccaaaaacttcatcaacaccaagatatagagttatcccaaacttaaacacagtactgatttatatataggaaaaaataccatacaaatgagattcacatgaatgaaacaaaaactttttt

SEQ ID NO: 43914 - DNA, 3728 bp, Cannabis sativa
ctggtctgatgcttttcagacctctgtttacttgataaacagattgcctactgctgtattgtgtggcaagtctccatatgaaataataaattctaaggcacctgactataaactcttaaaaatctttggggctgcctgtttcccatgcatcagaccataccagcaacataagtttcaatttcattccataaaatgtgtgaacttaggatatagtgaagtgttcaaaggttataaatgtttaagccctcatgggagaatttatatctcaagacatgtaatatttaatgagaatgaatttccctttgagcatggatttttaaacaactataaaccagaagacacagtaacactaaacactcctcattcctggtttacactcccttcaatggctcgaaacaccactttcaattcccaagctgaagagaatacagaggaagttcattcagaatcaccatctcagttttctgcacacaaccaggtcagtaatgattttcaatttgatataccaactgatgctcaacttattgatgagtctgtgagttcaggaagtacttctcctcagcctgctgtaccctttcaggcagatcaacctgtaccccaaatcactcatccaatggtgacaagagccaaagctgggatttttaaacccaaggtgtatgttggacaagcaaaatttgatctgtccatctgtgaaccagcaaccattgaagcagcccttcaacatcaaggatggaataaagcaatgcaagatgaaatctgggcccttaagaagaataagacatgggttctagtcccttactcatcatcctacaacattgtgggatgcaaatgggtgcacaagatcaaacttaatgctgatgggtctcttcaaagactgaaatcaaggttggttgctaaaggttttcaccaaaggccaggtgttgattttagtgaaacctttagcccagttgtgaaagccccaacagttagagtagtgcttacacttgctgttacaaaggattgggaaattcgacagctggatataaataatgcattcctcaatggcactcttgaggaggatgtctacatgatgcaaccccctggtttcgaatcacctcaacatcctactcatgtgtgcaaactgaacaaggcaatttacggcctcaagcaagctccgagggcctggtttgatcgctttaaaaataccctgctgcagtggcaatttgaaaactcgaaggctgatacttcattctttattctgaagaggccacagtttgttatcatattgttaatttatgtcgatgacataattataacaggtaacaacaccaaggaattgaaccagttcatcaccaaattaaacaagattttttctctcaaagacctcggctcactcaactatttccttgggattgaagtattcagagacagtacgggtatttatttgtcacaagggaaatacataactgaactgctgcaaaagtctgaactaatcaatgtgaagccaagtcctacacctatggtgggtggaaaaccattgtctctgtctgatggagaacccctcaactcaccaacagtgtacaggagtataatcggaggcttgcaatatctgtgtcacaccagaccagacatttcatttgctgtaaataaattgagccagttcctcaaagctccaacaacagcccactggaatgcaattaaaagagttctcaggtacttgaagggcacaatacaccatggcatacacatctcaccaggctcacaactcaatctagttggtttctcagatgcagactgggcctgctgtccagatgatagaaaatcgattggggggtactgtgtttacatgggagactctcttatctcctggtcatcaaagaagcagtctgttgtggctcggtcaagtactgagtctgagtatagagccctggcacagctagcttcagaactaacatggctgcaagaattgttcaaagaaatgaaactgccttctactgcacctgctgttatctggtgcgataatatgggtgccagtgccttagcttccaacccagtgtaccatgctaggaccaaacatattgaactagatgttcacttcatcagagacaaagtgatgcaaaggaagctcgaaatccgttacataccctcacatgatcaagtagcagactgtcttaccaaaggattgtcaccagccaggttccaatttttgattgacaaactcggagtgaaagaatcaccctgtcgtttgaggggtggtgtgaagagataattggtgacctggctgcctactggatcatgacatggctgcctatgtggctcctaagttttaggagatattgtcaggggaatattctagaatagtacaattctgttatctccttttctgtgcattctaatcatttgtgtaatattccctttgtactatcttctgccatctgtcccttattcaatggccaagatcatctcatgtaatggttaaatatcaatcgaatcactcatgccaattgagctgagttttgctattttcttattcctctgttttgcctatttgctgcaatttctactatattttcttcttggagatgaatgctttttgaattacaatatgtgcaattatattcttgcttgacaatgagttctctgtcttggtccaagggagattcttttttattgtgagcagccgaccttaattaacaaactatatgcaaggaaaagaggaagaagaagaattgagaagatgataaaaagacaaaatgtaaacaagctgccttaaccataatccaacaatcaaacttgaaagctcctctttcaaaaggtttagctagatataattgtgttttatgcatggagaaagtacaaaattgaatcctcattgagaggacagttgagaactcagtgcttacaagcatcatatacatatatattatataaaatattgtgatatgcattgcaacattctaaaagcttgtaaggaataaaacaatcatgttgaagttttgctttatagaggaaaggcactaatatatagtcctaggctaatgcttgccctatattaaaattcaaataactatacgtctctgagcttttgtactaattatatatttaccaaaagaatcttgtgcccactatatacataatgcaaaactatatcagttgaacattataattttgaataaatgggatttttttttaaacgcattatgaccataatttattattagactgttgttttgtattattttttatctacacttaaactgctatatcatgttatttacagaaataaataagatgtaactaaatgaggatatttataacgtttatttatttagaaaaaattttgcaaccgaaaaaaaaaattaaggggaaaattctataaaactcgtaatttcaagggggacatgcaaatactactatttattatattattttttattatgaaattataagtaagaatatggtagaaagatgagtaattttgagatggcacgaaaaagagaattgttaaaaaatattattggtatttagcattcacctcagtatcatagtgctattagtctaattaagtatgaaattttatataagaaaatagcttttagagttagagatgtcgctaattaatcatgagacgctacctatatatagaaagtgctcgacactactagtgttcaataataatattactcccgaacaaaaaaaaaaaagagaatggagaaattggattgctcttttttattcacccaatcaat

SEQ ID NO: 43915 - DNA, 824 bp, Cannabis sativa
accatataacaaaaattcagaagaaaatgaaagcaaaattctcaaaggaagcagcaataaataacaataccttctgatccaaagcgagccattcacgagtagaatcgtcagtcactgtacctccaataaccacattcgtcgtttgcccaactctcccttctgtcttagacacctctgagttcaataataccaaaccaaacaacaaaattttttatttttatcaatatcaatatgcattaacagaaagaaccagaaacaacaaaatcaaatgggaaaaaaccatatgagcattttgacaaaagggtaggacgactaggaggaaaaaaaacctgaaattgctttgagaacaacttcctgagggggaccctgttcgtcctgtgacgaagaagactcaggagtttcgttatggcagcagttgaagtgaaaatctcgagctccactggtcctgagttttccggtaagccttgaaggcgcaggaggagttccacaaatcctgaaagaagagcaaagagaggtccgactgagatgaaggggtcgccacggctccgttaatagaacagaacgaaacacaatatttctgcacgccatttctgattcgaatgattcttttctttttcttctgtttccggcaccacttcgttctttttttcccttccttaagttaaaaattagagattttgaaagaaaagattttttttttttttttttttcctgataagttgggactagcagaaacctgattggacaaacttacccttctattacagtgccgcacatactttttaagcgaggtcataatagtcttttcgtaaagctgatggatt

SEQ ID NO: 43916 - DNA, 3114 bp, Cannabis sativa
gtcgatttagttcctttgtaattatattccactttgacactggttatcgccattggctggtttattcaatcaactacttgtttaaatctacttgcaggctgtaggagttggctcattctcaggaagtgctgctgcagcttctgcagctgccatcaggtaaacctttatctttttcttccataataattgaaagttctacttgtttaaatcatgattttttttccttttttccaaaaaagacatgcatgtaaacgattgtttcattatatacaccaaacctttcaatggactgagttgtagattgtaagattgtttctgcagatgggtatcaaaagatggcattggagctgtggggcgcctattaataggtcaggcaatgtgaactaaaggatcataaatttgttttttgctcgaaggatcataaggttaagtgctagaatttaccagtaactgttgccttgttttgtaggtgggcggtttggaaatatttttgatgatgatccaaaacaatggcgtttatatgctgactttattggcagtgcaggaaggttgtgtatcaaaccttctatttgttgttagataaattataactgaagtcacaaaacatcgaagtcaaacttaacaatttcttgtgcagcattttcgatcttatgacgccattgtatcctgcctattttttgccactggcatctcttgggaatctaacaaaggtattctactactctgctttttctctattgatgaataatgtgataacatgcactgacatttgcataactaactaatttaaattcctatatatgccccatttttctggtaatgagcttgctacctgtacaggctgttgcaagaggacttcgagatccttcattccgtgtgatacaaaatcattttgcaatctcaggaaatctgggagaggtagcagcaaaggtataggatttgaacgtatcttcaatgttaccataaaagattatattcatttatttattggctagtgaatgagaattaccacagtaatcttcgatcaattttggctctgtggacgtgatttaagatgacgtcttatcatcttttatgttaaatatgcaactatttttccttgtagacataaaactttatgccctttgccatgtcatctcaacaaagcattaagtttaagtactacagggctttatagtgttaatagttaaagctaattgttcttgctgtataagagatctagatactattagtaagcaattttttaattaatgcaccataatttttcttatgtttcattagaggatgaacggttcatttgagatgctttagattagtgaacttaccgccgctgctcatttaacgttaccatacatgcacctcaactccattatgcttttattgttgtcaaggtctttttgtatcttaatattattctgtcataagttaatttgaggaagtcttacatggttcagcaataatgaaagggttttttttttcttggaaatacttttagtctaattgccttgtcaattgatgactacctttttaaattatatgtaaccttttcttaaggagaatggtttcctcataaattctcaatttaactgataaaagatttcaggaggaagtttgggaagtagctgctcagctgattggtcttggtttgggcatactattcctggtattctgttgtaccatttctaattcttcatattcttttctgaataacatccacttactaagaactaacatattattgtttaatctaaacttgttttagaataatgaatgcaggatacacctggccttgtaaaagcataccctgttttggcacttacatggttcggtgtgaggcttcttcacctttggctacgttacctatcactttcagttctgcaattcgactctgtaagaatatcatatgctttgtcaaatacgagagcaaacaaaatgtgggaataggttttgagtagattactcaatgctattatttttgttgacaattaagtgtgttttccctgttgtttcaattttcaaagtaatgacttctcatactcttgtattcattttttttatgtataggatatgagataacggttgatgtgagtgtgttgggatactcattgaactcttttttctttatttctcttcttacagataaatctcaagcgtgctcgcatactagtaaaatcacatgtattacactctactgttccaggtagcattctaaagttctgctcttaaaatattttttggttacattaacaaacaataattatgactccatttcaggatatgttgattgcaatagggaagaaaacatattattgtggcaaagattcatgaagccgcgaattgtttttggtgtgcctttggaggagcttatgggtggtgagagatctcttaccatggtaatctttcaaactttttttaattttatgaattaaaaaggagggaagaaaagtgaagttgggaatacggataacaataaaaaatttctccaaaattctgtaaagggtcataaaagcatacagactaatttattttaatgagctttttgctacagagcttaaatttactagttatgtttgcaaaaagcattaaaaattgagttgttgatgcatatgaccactttcttcattctaagatattaagttgatttgacaggcatgtgatttgctccacaaagactgaggttcaaatctttcttttacaattggtaatagtttcttggtccttaaatattgcaggatcaaggggagcttagttttcgattatttagatgacttctttgttgagttcattgttactcagtcagtctcattggcttcattcaccatactacaaattaaatagatgatatgtgcacccaattatgcaccaaacattactcatagtgacattttttaccaagccccatatggaatagatgtgatcggttgaaagaaactgccactgccacgtcattgagtgtaatgttctagtgtataatttgggtgcacatatgtatcattactcaattaattatgacatgtaagctacagtgtagagatagaggaaagcatttgaaccattataagatttgacctttaagccttcgttctaactaattattcattcttttgaattatt

SEQ ID NO: 43917 - DNA, 4903 bp, Cannabis sativa
  modified_base (4618)..(4620): a, c, t, g, unknown or other
tgtgagggtggcataaaataacaccatgtgtgttttttaagcataaaatgtcaaatttcccttcacttttatgaagatgagctaaaatatatatatgcaccacacttttactccattgagatgtagaatatagtctaaattcaacacatgctaaaagtagtgtcaaatttaacacaaaatataacaatagtcaaattttataccacaataaatattactttttaatttactttttgctaatcattaatataattaataactttttcacattttatttataatttaataagatttttatatactttcaattaaagttaattttacttctaatacattagagcgcaataatataattaagatcaaatataacattaatttattttttaaaactacattagtttttttaaaaaaacaaatgggacaaatttagcataaattttgcatcatccataggagatagggatccaaagaaattcattacaaaagctaaaatgacaaaccaaacattgtaaaccaaacgtgctctaaaaattctgatttgtaattagaaaaatgatataaaagagttagtttgtttaaagttcaatcaacagtgtcagtgatgagattcgttttggcttgctttacctaagtatcactttttctgcatagactaatatttatacaaaaatactccacttttctaggtacgtttttgaatctcacgttgcagacaattattaaaaaaaggtagtgtgtgaatagatttcgtctattaaaactaaataataaaagatcattgggattgtatattgcctagtgcctactctgctccccagttttttcttcagaagaatcgagatatagacagcaatgaatagattctaccataaccaaagaccataacatttttaaaaacacaagctcttcattgcaaaagtttgaattattcccctcaactaacatctaaccccagaaggaaaaaagagaaccaaaaaattgaaaacaatcaaaatcgggctaaagatttcgaaaacaggagaaaattgttgaaacaaaataggggcaaattacagcttgaggaaaacgaactcctcgatggctggaacatcaccgatcttcttcaaggactccttgctgggttgatcatccacaccgattgccatcacagcctgctttcttggagcgattcttccgacactcatgaaactaacattaacattttcctctcctaaaatgcttccaactgttccaatcataccgggttgatcgacctgtctgcagagaattaaactaccttccatgctcacatcaacctcaaatgatccaaccctggttagatgagcaatcccatctttaacacgtccctccaccttaatttctccactctctgatatggcactggcaaacttggattccacattggcaatctggacctggatgaaatccaatggactctcaggcgagccatctaaaatgattcgctcttcggttattctgatccctctctgcttggcagtgaaatcagcattgaccaaattgacaaagacactggatatgggctcaatgagacccttggtgatcatggcacgaagcaatctagtgtccaggtcatcaggtgctctagctgaggcgtaggtcacttttacactcttcacaccacttcctcctgctactaactggacagccagtcttccaagcttctcagctagttcaacatagggcttcaattcagtcagaacctgcaaaaatgaaatcggaacattgataagaaacaatttgaaagagctacaacatgacaccacatagaatgatgacactggctaacatgtgataaaatacctaacaattcccacattaaaagttttatatatcttgcacacacattcccaatgaagaaaatgtttaagaaaggcaaaagagaaacaatacctcagcaggaaccattggtgcattgactgcagtggcagcaagctcccctttcaaagctccaacaacagcttcagctatttcaatagccactccttcctgtacatcgatttgaaacattaaatataacaggatgaaaggtataataagcaataaatatattcaattagattattttaaaaacctgtgcttccatggtgctggcaccaagatgaggagttgctgtaacattctcatgcagtatcaacttgctgtctttagctggtggctccactgtaaatacatcaagtgccgcctggaaaaaaaaataagaagataagtgttaccttttactcaacccaatttcatgtattcatttctgacttggaacacacatacctgtgcaacaattccagcatcgagtgctttcacaagagcatcttcatcaatgactccaccacgagcaacattcacaatgcggactcccttcttcattttcgcaaatgtttcgtcattgagaaccttcgatgtggcaggagtgagaggcatgtgcaatgagatgaaatctgctttagaaatagcttcatcaaagctcacaagttccacacctattgcacgagcacggtctgcaggagcatatggatcgtgtgcaataacatgcataccaagccccttagctctccgggcaacctcagtgccaactttgccaaaacccatcactgcaagtgttttcccaacaagagatacaccaacgtatttgttcctctgccacttccctgaattgacagaattataaaataattaagaggttgtttctactaaatgaagcccaagtcacaaggaacgctcatcaaggttaattaacaattgacatgtaaaaaaagcacagagaaatgtggaatattctacaaaacaaggtatcttaatcagttcattgggtttctccagtttcaatattgacaatgaaatagattccataccccaatgaaaaaaagcatcggagaattagtttacgactctgtcttcataaacaagcatctactaaaagacgagctactacaaccaaaagccaaacaagtgctccctttctacagagattacatcaactcgaagataaataataataaataaaataatcttgcatgctttccaagagaatcttttgcgtttaagatctgtcctttacatttcactcttcacaatactaaaagtatttttctcagttcaaaaagaattcaaagattatcaaataaatcatgccttcaaactgtttaacaaaatgcatcaaagttcgaatattaataacaatggaataggaaagaccagaagctcgacaaaaaaaaaaacagatggaataacaagcttactgaccagctttcacggaggcatcagcttgcgcaacattcctagccatagctgccatgagagcgataccgtgttcagcagcagcaacggtattggcagtaggcgcgttcaccaccaagcaaccatgttcggtagcagcagccagatccacattatcaatcccaacaccagccctaccaaccaccttcaaccgtccaccagaagactcaaaaacctcgcggctaaccttagtcccactccgcacaatcagcgcatcacagagcgagatcttggtacatagctcctcaggggtaagattatacgagcaatcaacgttagcaaactccttgagcagatcaagcccagccgcaccgagcttctcagcgacgaggatcgtaggcttggcatcaagaccagcggagacaatcaaaaccaggcgacgagactgctggcgccaccgggggttgagcgagacggagaaagcggaggagagagggagcttggatgagagagaaagggaagcgtttcttagtgggttgaggcggagggtttgagaagttgaggcagccattggaggaagtggcggtggcggcggtggtggagaaaatagaatatgaataagcagtgagaaaagtgtgtccgtacttttataggcgggggttgagaggtttggtttggtggtttttgaggggaaatgaaaatgaaaatgcacgcgacttggcgcgtgagctgcaaagttggtaaagaaagagagcgaagaagatggtgtgtgtttgtattgtgtgggttgggtttttcttctccaataagataggttcggtaatgtaatgtaataataatatgttttctaaacaaataaaataagaaataggtttcctaatgaaatgactccctttttttttttgaaacggaattcattcattcaaacacacattacaatggattaggcgagtctaaccgaacggcatgactcaaaggggaacaaccccaacccacatggcactagctttgttagtcaaaacttcattggctaatacatgagcaacttgattggctaatgactcccgtttgatggacatgctttcaatcacatctgtatttatttttaatatctacctaatgtttaattaccaacgtaaataatcacttggcttagctcaattggccataagtgggtgtgtgaatgttggaggtcctgggttcgagtcccaggtaaaatatgttgtaatatataaacgcttaaatcaaaaaaaaaaaattaccaaggtaaataaattagagaaatcttaaggacctttatggccatgggagcattgctattgaataccaaatgttatttaatatttctaaacatgtattttgtgattagttaataatattttttaannnttattacattaaattatataggacatgatacttaattagactaataataatattaacatatataaaagtgataatcacaactatcggcttttagcatttctcgcatttatggtataatttaatatcaggaactttttatgtagtgattaaaattactcataagtgtataatttaatatcaggtcttacttattttaatttaataaaaattataaaacatcactaattaattataaaaaaaattatcataaaaatattaatcttagacatcttagtgtcccata

SEQ ID NO: 43918 - DNA, 3036 bp, Cannabis sativa
tgtctctggtggtggccgattgtgttaagcgatggtttcaggacacgctcaaggaagccaagactggtgataccgctatgcaggtcttggtgggccaaatgtatttcaacggctatggtgttgctaaagatcctcaaaaggtttattcttctttttattgttttgggtttcgattttagttccatactttgatgttctttatctgaaattgaatttttatgtttcgcattatcatataattgggggttcaaatagaagttgcattagacaccagctaaatttggatacaaggatattaatcatgttgtgtaccaactctttttcaattgagtgatattcttgctttgttttgttcaatataattacttgaaatatgcataccaatacggttattgaatcttggatatgctattgtggagctcatgtttattttgggttcttcatctttatgatttggtcacttcaactagaactctgggtatataattggttattaatgtgttcgttattttgtcactggggttgtgattttgttaataccaattgccaactatgttcattctactatcaatgactttgcagggacgttcttggatcggtagagcatcaaaaactcgatcttctgtttggaaagtaggtgataaacacccaggtattctctatctcagcacccaagtctttgtttctttggttgaatcactgttatggttttgcatattataatcttggtgctttattgttcattaggctacaatgcaagtgattcagattctgatgatccgaacgatgattctaaaaatgtcaaataggtttcatattggatccttttctcccagtaaattgttaatgaggatatggccattatctcaaccaaaagatctgaagcaaatgtagtattacacagataaggagacatcaaaatgaaaaagacagctgaatagttttgtggagtatttttttctttttttcttttctaattgggttctgttatgaggcattcttgtaatattgtactgctgtttatctctgacttaaaagttcatgtttggacttaagagggtcccctcttttcttagtcgtaagtagctgaatattccacaagataagtgaatgctataagcatctcattgagattttcttcagagatggtcatatcatagagctttttcttttgagtttaggtatgctcttttgcttctgcaaggagtcttgtatgtttcgctgaagactgaaacatattgctcaccttttttttttcttttttgaataattatttctctaagaaaattgcttacagattcttgaactacatattcttgaactacataaaccttttttttattattattattattattaattggcattgatattcaatgaatgtttgataaattacagaattcatataaattgcaattaatacaacaaatccataagctggacgaaatacatgtacataaaaaatgactcgtacataaatatacagtttcctcagttttctgtcttttactgtatatatgtgttcagttgcattactctgtctagaaaggaactatcttccttctcgtctgtcctttctccaatcccatggcttctcagggtttgaggaagcccacaaacccactctctttgcacgagcttcattttcccactgtcatcatagattcagaatcataattatcattatccattaatattatatagactttagaaaagagtttaagaacatgggaagttaaaaaatgagaaacattgatgttttattaattattattactcacttttgcaagttcttggcgttggtcgtaggcagagtaatgccaagcaaaccctttcttgagcaacgtttcctggttaatatgtacgttagagtcaaatgttaaacggtcatatttctatctatacagagtgtaaagtattgaacagtcatggttttaatacctgtacaaatactccattggaataaatatcaccaacacaacggccataacgatcttgatcatagacaaggactcttagacactttccttggacaagcttagctagctcttccttggcttctttaccatatggcattttactttctggtgcatctattcccctattttgttacgcaacgtatttcattcaaatccaatgacttaatataaatattaggccaaatttatgcaaaaagaagataaaaaattacctcagtcgaattctatactttttggctagaacttcctcattattctgaagactgatcaccctgcaattgatgaaaccatgaaaaaactcaatcattttgtaaaagcctagtacaagtaacaaatctactgaactgttaacaaaattctactttttcagatctcttattacctgtatccagcatcaactatttgcttgtgaagtgcatctgccttcgtatagttcttaacggcacgcgctttggatctttcatcagcagccttttgtacgtctcttggaagacatgatgattctctggggtctgctgtgctaacataaaccgtcactgtatctccatccgcaattgacttcgcatcgatctggttttcatcaaaatataccaaatcatcaacaaaattagagcacaaatttctaatctcgttccaattagttttgagatagaaataatttctaatctcattcccaatttctgatttagcatacattaaccgataaccttttcatactctgaatatccccaaattttaaacatagagcacaatttagtagtggtaatattttgagagaataccatttgaaagtgataatgattgggtgagcaaaaattctatttatcttattgtctaaaattccgtttcactgcttataaattaagcttttattattatttttcttttttatttttttttttcacaaaagagaattgtgtccttaccggtagtgattgcaattcgaactttactccagcaggtgttgaagttgggaccccagcaggaacttcaacaagagtatgaggaagaggcaaaccatagaaagccaataaaccctacacagcccattaaattg

SEQ ID NO: 43919 - DNA, 1227 bp, Cannabis sativa
ttttgtgtgtgtgtgtgtgtgtgctaagagagaagttacccttattacgcaacaactttacaagaaatgagaaaaaattcaaacgataagaaattgctctgacagtgaacataacaaaaattgaggctcacctcagaaaccagcgccttgcagctccaaacaaaggctccctgcaataataataaataaataaagcaaatcaggatgtttaacaaataagagaagcagctgcaaaaataacaaatattaccttgattaacagattaaaacaaagtatacctagttacaaacaaccctaactaacagcctgttaacaactaacagaatataacagctaagcaacgctagtcctatccttatcagcagccttcaaactcagcatggcctgagaaagaacactgagtatgcttcgaatttcagagaacttagagctttgaaataggcttagtgaaacaatctgctagttgagcttgtgcaagaacatgcttgactgatatttgattatgtaaagcatcatctatcacaaagtataggtccatttctatatgcttggtttgagcatgaagaatagaattagcagcaagaactgtaatttggttgtcacggttgtcacaccaaatagaaggaataccctgtgaagaaatgtgtagctcatgaagaagatattggatttatgtaagctctgaagcagtattagcaaagcttctaaactctgcttcaattgaaaacctggagctggtaacttgtttctgagacttccaggcaatcaaatttggtccaaagaagatgcaatatcctgatgttgatctcctatcatcaatatcagaagctcagttcacaccacaaaatgcttcaagggaaaaagttggagcagatttgatgtgtaatccataatcaagagttcctaccttaggatttgtttacacaaaatgcaagttctgatcttgttatagtagcatactaagagcacctactattgatctgtacaaggatgcatctgccacaggctcacttccatagttagagagctttaatctacagttcattggggtattttgagtgtttacattttgcatgtcttccctacataataagtcttgtaaatatttagtttgagagataaaaatcccaactgagacatgtgtgacttgaatacccaggaaatagtcaatcagaccaagatccttaagagagaaggtggcactgagatgactaaataatcagaga

SEQ ID NO: 43920 - DNA, 4749 bp, Cannabis sativa
tgagatatatagcagggactgttggtgaagggattcagtttacaaaagccacaaatcccaccatagagactttttgtgactcagattgggctagctccttagatgaccgcaagtcaacaaccggctactgtgtgttttttggaggaaaccttgttagttggagctcaagaaagcaaaaatctgtcgcaagatcgagtaccgaagcagagtacagggcattggctcaagcaagtacagatataacatggctccaatccttgttctctgaaattggaattaaacatgacaaacctgccataatatggtgtgacaactcaggagcacgacaattggcctcaaatcctgtttttcactctcagacaaaacacttcaaaattgatattcacttcatcagagacaaggttctaagcaaagatcttgaagtcaggtatattccatcagaagaacaaactgccgacatattaaccaagtccttaccgatctcaacctttcattacctgaagaacaagctaactgttactcattcaccacaacttagcttgagggggcatgttgaaatgaaagggttagaatcggcagaaattgaaaatgaagaattaccttgacagctgttcattttccctacagcagaccgttgcaaatgattgtgcaaatcattggcaatgatttccttgtaccgtatctggtgtggtccccaaaagaatatttttctgttattattcaatttgtaccaactctagaatattctgtaatcttgtatatattgggcattttgcctccattgtatattgagttgagccatacaataatattgaagttcagagcctattgtttttcctctgtttctttcttttaaacttggtatcagagctttgagactcacgaccatagatcctgcagcagaccaaacctcttccaccacaaacccagaacaaacacctctaccagccgctgcacccatcgacaccaacctttcacctcctgcagtacctgtcatggctcagttccaaagtctagctcctctcactatcaaacttgatagaaccaactattcctactggaaatctcaagttcttcccgctcttcgagcgcatgaattggagggttatgtgcttgggacaaaaacctgtcctccacagtttgtcgacaacaccgtaggtggtcctatacctagtgaaccacgacagttgaatctcggttatgcgatgtggcgcagaatcgatcaatccatcctgagttggttgctcaactccatctctgagtcaatgtttggtcacgcggtcagatgccaaaccgctcgtgacctttggaccacacttgaaaaattattcactaccagttcaaaggctcgcattcttcagttgagatttcaattgcaatctctcaaaaagggaagtttatctattcatgattatatgcttaagatgaaaaatatcgctgacagtctttcaactgcaggacatcttatttctgatgatgaactgattctgtacatccttggtggtgttggtcatgaatatgaccctgttctgattaatcttactgctagatatgaacaacttgacttgcaggaagtctaatatatgttacagagtcatgaaatgagactcgaacaactgaactccagctcgagtgaccctaccattccatctgctcagttagctactcagatgcgaagatccctcaatcttggaaacaactccagtgtttcaaaccagtcggctggcagaacctttacccctcgtggccgtggccaagggcgcggtcgaacaaataataaccgcccaatatgtcaactctgcaatagacctggccatacagcccctaaatgctaccatcgctttgatatttccttccaagctcctccgccaaacccgaatcccaacaaccattcaaacaacttccatagcaactcatcaaatgggcagcaagcttacttctccaccacagatccaaacactgacaatcaatggtacatcgacagtggaactacaaatcatgtcacagccgattccacaaacctacaacagaaaactgacatgaaaggtacaacccatcttctcattgaaaatggattacccttatctgttattcacattggcagtagcaacataaacaattctaaacatcctttagtgttgaaaaacattttatgcgtacctgaaattaccaaaaatctcttatccatttctcaactaacaaaagataatgctgtatttgttgaattttacaataaccattgtgttgtgaaggacctgctcacgaagagggaagtgctgcgaggagtgcttagcaatggtctgtatcggttacaccttgagtcatcatcatctccttccacatccagtttagagtctaatttaagttgtttactttcctccaagagcagcatagctgccaatccgcatgagtcgccctctgtcaagggtaaatcgagtcagtccctagttccatctagatttcagtccttatttgctgagtcagttttccgtaatgatatcaatgtatggcacatgaggcttggacatcccaacatcaatgtaatgaaacgcatgttgataaatgaaaaagtctcctttaaatccaatccaccgttttgcaatgcatgtcacattggtaaatctaaacacaagcattacagcccctcacatacagtcactaacacaccccttgaactaatacactccgatgtgtggggccctgtaccaattctctccaaagaaggctatcgttattatgtatattttatcgatgacttcagtaacttcacatggattttcccaattaaactaaaatctgatgtcaaaaacaccttcctcaacttccaagcttttgttggaaagaaatttgatgccaaaattaaaacactacattcggattgggggtgaatatagaagtttagcttcctttcttcagtccattggggttcatttcagccacccgtgtccacatactcacccccaaaatggaaaatctgaacgcaaacaccgtcatatcatcgaaatgggactcactctccttacccaagcttccatgccactaacatactggtgggattcattcaacactgccaccttcttaattaatcacctctcaacaccaacactctctcacaaatctcccatagaaaaactattcaatgtctcccccaacttatcctttctcaaagttttcggatgtgtgtgttttccttatctccgtgcctacaacaaccataaactcaattttcgctcttccaaatgtgtcttcctaggctatagtcccaaccacaaaggctacaagtgtcttcacccaagtgggcgcatttacattgcttctagtgtcacattcaatgagctcgaattcccctttgcctctggttttggatcactgtcccaatctactcattctccacaatcttccattaattattatcattggctaccctttctctctctctctaatcaggttgatgatgactccaagggttcaattgatacatctcattgctctccactgcctgcagcatcgtcctcgcaccaaccattgcctccatcatctagtccccaatccattggctctaacccgactgtccctcttgccattcatccaccaccaatatcccctccttcttcttcccctccccctcccccccttccatctcatcctatgattacccgatccaaagccggcatctttaaacccaaaattttcctcgcctccgtcctcaaaaacccttccctccctgccctctctttatccactccccagtctttatccattcccatttggaagtctgccatggatgatcaatacttggccctgaaacgcaatcgaacatggcacttagtccgccgtgaacctcacatgcacattgtcgataacaaatggatctttcgcattaagttcaattctgatggctccgtccaacgctgtaaagcatgccttgttgccaaagggttccaacaacaacccggcatcgacttttttgaaacatttagtcctgtggtcaaaccatccaccattcgtgtcatcctctctttggctgtcactttcgattgggatattcaacaaatcgatatcgacaatgcgttcctcaacggtaccattgaagaagacgtatacatgtcccaacctcccggctatgtcgatccaaactttcccactgctatttgcaagcttgacaatgcactctatggcctcaaacaggcccctcgtgcttggttcgatacccttcgcaccacacttcttgctcttggcttcaagaactcaatctccgattcttctctgttctacttctgtcgagatgatgcacttctctatgtgctggtgtatgtcgacgacatactactcacgggtaacaactctaaccaagtcttttccatcatatcccaattggtcgatcgctttgctctcaaaaaacttgggtccgtaacttacttccttggatttgagacaactagggggcatgatggtattcatttgtcccaaaccaagtactccattgaccttctcaagagaaccaacatgataggggcaaaaccttgtcctacacccatgatacagagtaacaaactgagactaaatgacagcctcccacttgaagacattaccaaatacaggagtacaataggggcactccaatacctaaccctcagcagacccgatatagccttcgcggttaataaactaagccaatttcttcaagctccgactcaacgacactggcttgcttgcaaaatcatattgagatatatagcagggactgtt

SEQ ID NO: 43921 - DNA, 1612 bp, Cannabis sativa
  modified_base (1571)..(1573): a, c, t, g, unknown or other
tgccttagcattagggcgtttcactttataaggactggtttttcagtcagcattctaaacgatctctggctccctgttgaaaatgatggctatatccactcatctcattcgactctttataaccagttcgtctcctctcttctcaaaccatatgccaaagactgggatctcgacattttgaatgatctttttgatgatcgtgacagagacatcatcattcagctccaactttcgccatttgctactaaagaccacttgtattggctcaaagatcaaactggtatttacacagttaaaactgtttaccacctgctgcaacagttaaaaggcaactggggtgatgatcctctgtccatattttggagttccttacggcaattacacctgccacctcaagtaaaagaccttctatggagagcttgcagcagttgtttacccaccaaagttcaacttcaatccagacatgttgctatcgacactacttgctcactttgtcattcatctcctgaaacttctctcaatctttttgttagttgttccttcgcccagaattgtttaaggaaagctctcggttctgcaagagatagtattgaacacacttttgttgcctagtttcatcacggtctctcccactggactgcctcaaaaattgaaacaatttccatgctttgttgggccctctggcgatgccgtaatgacctcatttggaataacatcgaaccttctgtcgacagagttatctcatctgcaaaactcactttagatcaatggaaaagcgctcaatcattatcaaagactctctctaatagtgctcctgctactgtagaaagtcttgagcattggactaaaccgacatacccaatgatcaaagttaatgttgatggggcaaccttcggtgatcaaaaaagtttttgttggggttttatagcacgagaccatgatggcagcttcttacaggcctttcaatcaagaaaacttggttcagttcgtgctgaaattgctgaggcggtagcaataaaagaaacgcttagttggataaaaggaaacaattggcagaatgttcaagtggaatcgaattgtcttaatgtcgttcatgctattaacagcaaagtccatgtattttctccatatggtagtattataaacgactccaaaaaaactactttctattctttttaatgtttctatcacttttgtcaaacgatctgcgaataatgtggtccatttccttgcaagggactcttattctaaaactggttgtactcttagtgggacttctattcctgctaatttatcgtccttattattgaaggaccttctttaataaagtttcttattcaaaaaaaaaaaaaagttaccttaacaaccattttgtcaagtgatttacaagaaaaagaaaaattcttgtgtttgagcaatacattggccgatgtcaataataaagaaattagttcggatttagatgagttagaacttgacaatgaatctttggcagaatcttatatggtaatgtggtgagaattgttctttggttaaagttaataaagaattatttgttgggttttatgccnnnaataaaactcatttcaatatattcagatttacttattaa

SEQ ID NO: 43922 - DNA, 3196 bp, Cannabis sativa
  modified_base (1292)..(1298): a, c, t, g, unknown or other
tggattggatttaaatttaaactcttatgcagattatgcagatcggattggatccaaaatatgaaatctgcacttagtgcgaattaaatattgtttgatcaaaaagtacaaattgaatcggatgaatacttctactataaattgctacgtacaagcggaccttagtcaagtcattttgaaactttagtcaagatttttatagtgtctttacaaaatttcaaaagtgtaaaaaaaaacatttatttattattgctagatcatatagtcaatgatttaagtaaaaatactatatataaaaattgaaaaatccaaatataataatgatatgtatgccctcaataatgtacaccacttttatttgtatactttttgtttataaaataagtcgagagttcccttttgaatcataccatatttattcttctccttttaacttaaatatcggcagtttacaaattgatcagcacactaccaattattgtaaaattttaaaattttaataatcttatttttttttaagaaaaaaatttgaaatataaacttttgaccaagtagttataatttgactcaccgtgttattcttccactcaactgaatgtgaaaattcaataatatgggtatttttaggtaaatgatgaaaataataataataattaaactgtatagatctacgtccaattaataagctaagtaagagaaaaacaatcatggtaaattaaacagtatatgtaagggttacttaaacgtgtgttgataaacaattaatgtaaggggtactttaacttgttaatatgcactacaagaaatagtatactattataactattaatatattttaacattcggtcttatatattttgattttataaataatataaaaaattactaatcaataataaagaggaaagtataggttgaaattgttagaatactgtaaatttaaatttagccttaaccttaattaattcataaaaattaaagaataaaattaaatattaatgaaagtataccggagtctatagaatcgactttaaatggtatgatcttctaattttttgtcaaaattttttctaaaaccaaaaaaattcttgaacatgggaatttaagaatatatgaaaagaaacgatataatacgatgcgaaaaaataagaactaatatttgtttattagtaactgtgaaaatagtaattaatcatttatttattatttctaatttggttcctcattaaattagaaattgtcttaatagtatccacatattaaaattatgacaatcatgcccttaagtcatnnnnnnnagagcattgctgttaggcaccaatggtgcctagtactttctcgacatgtcgcgttgcaattaactagcaatactctttaaaaactattatattaaattatatatgactcgatacttagttagactaatagcgatgttaacaaatagaagagtactagacaggtgccctttaatatttctctaaattttattctaaaataggacacatatttatttgactcatttatataatgaattagtacacatttttatatatactaaccccaaataaataaatttctatgagaaatccaatacctttaagtgaattatttgtttcaaggtctaccttaaagcacctatgtgatagagcccgcttggcttgaccttctttctatatctaataatattattctagaaaacagcactacgcaccctatctaaattgtagatgactaatatagaaacaatctattctttatttatatgtactttttatacgaaataaatttccatatttgcgttctgtttatagtaaataataaataggagctgtattatagtgtatgtcattatatttagtactgtaatgcgatatgttagatggtcaaataaatatatataccaataattgtataatagattatataggatagactatcaaaatcaagatgcgacccggtcgggaaatgaaacaataaaccttgaattggtcaactcgaacataccattcaaatacctaaaaatttgcagcggctaaaaaaaaatgtcatttcaaaacacacacaataaaagacagttaaactttgaagactttattcaaaacacccactttaactatcacaacaaaattatatgcatgagactggtcttttttgacttgtttgaacatgcaacctctcacatggggcataaatgctatgggccataccctaataaaacttttaccaaagtgggcaaccatcaatggagtgacatataacggtaaaggggcattgttatttgtcaagacctacatatttcccacgtataataagatcatataatatatattttagtgccaaactaatttaatacctaatgaatcaatcatacacatatatatatatatatatatatatatatatttgagaaatatgtagcaatgctctatatgtataaacacacattattgcagttgctaacattctccaacgcgcgatgattaattattacttcttaaaagtgaaagtcccttattattattataaattaattgaaaatccattattgtaagtacaatgcaccaaatatggtcggtaagaagggaatttaagaagtttttttttttttttttaaaaaaaaaaagggaatttatgagctttgaaaaaaaattaaaaataaaaaaaagaatcaatttataattttttcttatggtgtagagtttcggaacgtggtataacttcattgaacaagcatttaattccctttttgccataaatccgccttgttcaactatagaataatatattctactctttaaagaacagaacacatactaaacatatttttgtgtgtatttaaaaaataaattaaaatgggatagaagaaggttctgcgcatattttagtccaagtaatatttatatgtatatatatataaatgcccttttcaattttttatctttttagtcttgaccttaggtacaatcttttggttaagattccaaatagtttgaccaaatttcaaccacttagttaagttgatgaggttccctccaattgacccaagttattgcacgttgaaatcaaattaataagtggcgagattttaatttaaaattgcttgcactcgtgtctgactcaaatgtgagcaaattaaatgttaagagattttcttattactattagataagagtttttaatcctctcaaagaaattt

SEQ ID NO: 43923 - DNA, 2767 bp, Cannabis sativa
aaaaaaaaaaaaaagtgagaagaaaaaacttgggatttatgaagaaacttaaaatggtattttcctaattgaagtatataaaaatggtattattgacatagttcacccgaaaattgggttgggcctaataaagcccattaagtcacctcagaacaagaatcaaacaaatattcaaacacaaactgtcgtatcggtcaatggtcattcagttttcccctttctcggattttcccccaattttcgattttgaaatttttctagggtttcggttttcgatttgaaaactaacactcagaaatccaatatcaaattgcagttgcagagttcagagaaatccaatgtcggcttcgaccgtatccattacggcgaatcccggtactcggcggaggtcggcggttgtggtgtcaacagagaagtcaaagaatatcgagttggtttccgccgagccccaaaacaaaaccggtgatgataaatccaccaccggaaatggcagagatctgagtcaccattcgattaggagtgaggctgttctcgagcgaacttcaagggaagccgtacagaccaagaaatctgctgcgacatccacggtctcgcctccgttgacaaccaacggtcggagaagtcggaaggtcgcctctccgaagccccgttgggccaccgcccttagtgtcttcggtaagaacttcgttcttctgcttttgcttgctggtcttgttcagattgttaggaagtttgctttgggatctggagatgatggggaaggtggttctcctttagcgttttctgatttcgagggtagaattgcggaaattgagaagctttttaagtctactacgaagatgatgcaggttcaagtggaggtcgttgatcggaagattgataatgaggttggagggttgagagaagaagttgggaaaatgattgaggaaaaagggtctgttttagagaatagattgattgaattggagtcccaaggtgaatctttagcgagatcattgggtgaattgaaagatgtgaattggttgtctaaggatgagtttaataagatttttgaagaactgaagaataaaattacaggagatgatgatggtaatggaaaagctagtttgaatgacattagaatgtatgcaagagatttggtattgaaggagattgagaaacacgcagctgatgggcttgggcgggtggattatgctttgggtagtggtggaggcatggttgtcaaacactctgaaccttatttggtaggaaaaggaggcaagtggtttttaaggagtgcaagttatgatgttcacaatgatgccagaaagatgttaaagccgagttttggagagccgggacaatgttttgcattgaagggcagtagtggatttgttgagattaggctcaggacagcaattattcctgaagctgttactctggagcatgttgccaaggtattattttctctacatacgatttcatatagagcgaataaccttgttttggagtcttgttatggtagaagatttcatgcttattgcatgtgatatatgaatgatttaattacagcaggcactatattgataagtttttccaatgcttaaattgacaaggaatatttagtattgaacatgttgatgatgatttctaggcaagttgatacgtcatggattgtatgactatagacccaccagattttatgtatagtaatgtgcatcacttaccaaaaacgtctttgatgaaattggccaaatagattttttagtttgtggatgaatctctaataccgtttatttataacttgtatttatctttgacactgtgactatatatttttaattgaatatttgtatatcagttttcttatttgtcaattgcacttcctggatcaataatggtgtttttatagaccagtcttaaatttttgttgtgttgtggttttagatgtgtatggggctgagctgattctgtatatgttttgatgttggatggttcttccgattttagtctatgtaaatgtttatgcgctgatatttgttgaagcttgtcacatgatgtagcatgcaagaaatagagtttcatatactggtattatgtaataaagtttcaagggtaataatatgctagatggctttaataaattctgattttcccgggcagggataatggtacaaatatgtgttgcttttgagttgttatttccaattctcttgggaaattttaaacttgggtgtttggaaattctcttaggccagaacagttgtttggtaattactgtttggaaattttctatcctcacatttcttatgaataagatattcatatatttattttgatacaagtggggatcgaaccctttccccccaactcacacacacccattagtagatattcatattgatcaacagtgaaatatgggaggaatggaaaattttttatgtgtggaaaataaagttaattgatacaaatttctttctaaaagtcaaaactaggagtattctgagtaattattttataattttatattgaagttagtttcatattggttttctgtcttgcatttgtagtacctactttttctcttctatgtgcatgttgtactaacactaaggtatatatgttttctgtatagagtgttgctttcgacagatcaagtgctccgaagaattgcagagtctccgggtggctgcaggagcaaaattctgaatggtcatatgattcagagaagatgtttcttctagccgagttcagttatgaccttgagaagagcaatgcacagaccttc

SEQ ID NO: 43924 - DNA, 2456 bp, Cannabis sativa
atcccagacagatgaggttagctgaattagttatccagacttctaacatgcccaaacactggattggacaaattaacatgtctaatccaatgtagtcctgcgtaccaaacgggccctaaggggtttataatttgtcctataattttatgggatggactataattggggtgtgtgacttttgttggacattttatgtattttcttcattggaagaaattataatttaaaatttttatataaaaatgtaaaagggcaacttaaggtgccaagtgctatagaaaataagtactattattggtatattttaatattgagtctcacacattttgatttaatcattaatataaaaaattgctaaacaattaaaataatattggataccttaaattaccaattataacaataatatttataaataagtagtcaacattataattatagtttccattccaccctaaattctaaatatttatattaagaaaaaacatgtgtgtaaatgaacttttaattcatgtttttggcacaataaattaaatctaaattttctaaaaacaagtggaaatatcttttatgatacaaatatacacaatcatataattaataaaagaaaatcttgagttataatttttttaattacttatagttaaaaatagggaaaaaaaaaatacctatcgatagagataacaccccttaactcaaccatagaactttccatatatagttttatcacaattaatataagcaaccaatttgaataaacacaagggttgagtagtaaattgccctaacagatagattaagatcaaattaatgtgatgtatatacttgtaacacatatatatacgcatgtctctcaaagcaaaaccatgcaacaaagtaggtccatgtatataatacacatgtacgaaatgatagagcaactgcataatattataagagagaataatgcaaatattttcccatttttgggcacatttatccaacaattgcatgttagattttggaatttcagtgttgaaaagacaactatttggtcaaagtacatgtatttactacatagtcatacactcatagagataaaatagacattgtactacaaaagttgtgattgtgagaccttattatttgttagttagaagacataacataactcaatttatatacatatcttataagtattattgttaattcccactacaaaatcttaatgaacagttggtttgttgttcccttaacaatgtagacccatggccatgctccaacctttttaatgtccattacttactcccataattaaacaaaattaattaatttttttttcaaggatccaatctcaaatcccattctaaaagataattataaaatgaatttttaatagataaaaaataaataaaagaaaaaaaatcttatctatatggagaataaaacattgatttttagaaatgtacttttatatttataataataaactagctatttaagtaaaaattgtgatttttttttaaaatcttactaactaatttgaaacataaatgtttttgccataacccttttgacttcggggatccctttttaaaatatcaccaaaaatactattacattactttaacaaaatacacgcttaagttcagaatatcgcaaaatatgaatcccgacaattcgactctacttgccagataagttgatatgtacatttattggagaagatctttgactcatggttgccaaacgttctttatcccttacctgtatcacacaacacccgtgagttatataaagactcaacaaaaaaagtaataaaataatatcacaaattagtacacgaatatcatccacacaaatttagataatcacaattaaatattcacaagtatataaatattcaaataactgccattgtcttataagacaaccttgatatctaccctgaactccatatgccactgtagtttacataatgagataaccgacaagtaagaaatctagtaacgatttcaatttatagtcatgacttacagttgttcgataaaataacctctattacagttgttcggtaaaataacctttctcatggttgtctgataaaacaacctttttagtttttaccattgtctaaaaaaacaatattttcattacataaaaataattattgtatttaattttcgataagaattgattaataaatgatatatcataactcaacatggcatgctatgtagtacatatgtacttttcttacctttaatccaaacgcatgcatgccgaccaaccaaattaagaaacattcaacaatcttggccctatgtcataataacagtaaattgatcaataacttgatctaacccactctaggtcttaaattcataactcgaagttcccctatcgataactagcacgacaatatcctgaatattgagaaaatataaaaaataatattcttgagcatcacccaaaat

SEQ ID NO: 43925 - DNA, 1467 bp, Cannabis sativa
tttgtaccttgacttcatcgaacagtttcttttcccaagcatatagtctgtccaatgttgattggtgactccctgaaaacatgcattcctctgagaaatcactgctactgctctcttcagtttcctctctagaggagcttgaagaattcgctatgaatcttgaggaagatgaccgagatgaagctgaccgaatcagtgctactgggtttaaaattttcttcactgaaaggggaaacactttcataaataaacaacatacatacaagaagacttaatgatatatattctatggttatttgaaactcaatcatgtcttaaaaaccatattatgccatgtttgagtgagctaaaagaaaaacaaaaacctgtgagttcgttggaggatgatgagtactgagctttgttagcctctaacattgatgatacctcattagctgcactgcaaacaaccatgaactgatcttctagctccttgattacctctgccatgcttgtaggcctccggtttacataaacagtaaaacccggtgtctcatctttacgttctctaccaccaccagccacttcttgattactggtttcaactacttgtcttgcagtttgagaccttgaaacctctatggtagttgttctcccatgttgtgggttctgtgctctaatttcactctcacaatcacaatcacactcacactcagattcttcctcttcatcatcatcatcttcttcattctcatcaacatcttcaacaatgacttcatcttctatgtttcgattcatattagatttggttctttcatctatcacatttgcattttgttcaggttctttttgttcaatatcatcgtcttctaagtcgggaataccttcttcttctcggagctgccttagtcctcttatgtcatcatccacaattgtatgctgctgatctagactagctctatttggatagccatagtagtctaacgatgaaaagggattccagaaaaaatcccattgagaattttggggcgaattaggggggagattactaggcctatttggtgagaaagaaaaaattgaaggattcattggtgaagaagattgcattgagaaaaaaccatcaaaaccatattgttccattggaggataactttccactcgaactcttccaggtgattgagacatttcttcaacagaaacagctctgttcccacctgatcttaggtaactaggccttggtgaacgagggggaagattaatagacctgtttggtgagtaagaaaaacttgaagaaggattcattgatgaagaagattgcattgggaaataaccatcaaaaccgtattgctgctccattggagggtagctttccactcgaactctttccggtgtttgaggcctttcttcaacagaaacagctctgttaccacctgatcttaggtagttaactttgatagttgaactgggatgggactggatttgagctgg

SEQ ID NO: 43926 - DNA, 5020 bp, Cannabis sativa
atttatgttattttttttagttttataatttagtgttatattatttttttattttatttaatattattatttttgttattataatattatatttttaactatgttagaattttaaaattattatttttctgataaattttaatttaaaaactaaaatgtaagattagtttttaaaattaaataaaataagagctaaaaattatgatggtggtggggatgatcggggatggtggagatgatgatagtggtagggatgcccaggttttggtggagaataagagaaagaaaaagatgatgaagaagaaaagagagaaagaaatggggaaaaaggagctttggttcgaattttgttgatttaacttttgctggtaaagttaggctcgccggcaaaagttttaacctaaactaaaactgaaatgcaacattttatttaatgcaaaatattttgccagcgagcttaaccttgccggaaaaactttttcacctaattttttgtgcacgtttttactgcgcatgaattaaattgctaaaaatttcacaatttttgccagcgcatttactcgcacggaaaaagtgaaaaatatttattaacttttgcttacaaaagtgaaatcaaatcgccaaaacttacctccttttggcagttggtttaccgtccactttttaccagtgaaattactttatttcgctggcataggtcacttatgccaacaaaataactcgctggtatagaagtttcccaaagtgaaataggggataattttgccaccttttgccagggaggttaatgaaccgccgacaaaagttaacttttatcggcatagttcataaaatgcgtcagcaaaagccctttttcttgtagtgtcttcaaattcaattgttatattttaattaattgtgataatgagactaatttaaattcaaagtttaaatctatgaataaaaaacatactagtttgaacttatatatatatatattaaatatgtatgtaaattatatattatacataaatatataataaaaacacacatgtatatatataaaactctcttcattattgagttgtccagattagttcgagttgacattatttttaacctgttcaatataaagattgggtgggttatattttcctccaatttttattttttgtcgtgttatcttagtttggttcggagaggttattcaagttgggtggtttataaaagttcatgtacacccatacctggtatactgtgatgtgtgatttaataaaaaattatgttacaaatacaaaatgagaaactgtcatcccatttaatcaaattgcttgaagtaggaatcaacttcgaccctagaccctagacccgaacctcagacccaatcgtgaccccgaccctaacccttacccaaacctgtacctcagagctcgagccaaactaggacctcgaacccataccccagagcccagaccttggaccccaaaccccgatatatctcgacctggacctaaaccttgacccgaaccccaaaccttgtgttgaaaaatcttttacgagaatcttatttactactcacgtatgctggattaattctaatctaacattctgataaagaatttcctaaaacaataaagcaacacataaatggattagtagatccttacagtggttccaacataatgtattgtctccttccgttcggatatctagcccttgattcttgtctgtagcagagcattatcaagatctgaacctgaatcttctcattattcgattgtgttgatcacagtcttctacaaaggcctgagtatcacctggaataatgtgggcataaaatttacattttttctctattttgcaacgcaatgtcaaaaaaaaaacctttgctatgaaactcaaaagttttgatatagccgattgtgcaaaatcattgccaataatagtttgccaacagtttttcactgtcgggaaaattttcccaacatttttccaccgatacctattctatccaattttacgatggtcgaataggcattggccttagagaccctaaagtctaatgaagtcacttagatgtactactgaccctaaagatttgctagcatctaatggctctaaagtcactcagtgctactacaagatttcataatggaattggaatacatgaaatccattttatgtatttgttccttatcagattttaccattttttgtttaaaggacaatagtttattgtcactagtgtcaccaatcaataagttgattatattatccaaattataacaagttgagttccttaaaacccttccactatatgacatgtagtattatgacttgtctgatgagaaacaacatcgatatttcctatgtagatgataatagaacatctcttggagtcaattttgataacttctcttctactacaagtcttctacgcatttgtacaaatataggtacatccaaactactataattaattaattgttctagctttcattctttattactaaggtcatgagtaagggaactcttagattttatataatgaggtaaattatagtagcttagtataaatatgcaagttatgatttacaagtggcgaatgaaatggatgagaaaaatgaattctcttaaagaaattgactcagtggaggtttcaggccaaagggtgagtggggctacgtcagaatctcagatggtgacgaagaaggggaccgttggtacaaaggacaaggggagtgggcaaaaacgtaaagatgttcatggtggcacgtccactatccccatggctgatctgcagtgtacgggaaaagatattgcaaaggtgacagatggtatttcgttgcaacctgatacgcttgtgcgaaatgtggaaaacgtgggcaataggcaactggaaatggttactaatgaagttgggcctaattatttgaatattcctactccagacttttcgttagggcctgaagatagtgatatgattcctgacattgggcctactattgctcaaactttggatattcctcattcgtggttatgtagatcccaaaggcctcatgactttcaagagcccaccccaattagatggcccaatgacgatcttgaagcccaaaagatgttctttcaactttatggaccggatgctactgatatgtacaaggcccaaccctctcttatttgcaacccaccagacttatcaatgatgataattcatctattgggaaccaagaaaaggaagcctcacacatggtatcacccctatcccgctgttaccaatttccagttaccagcttgtcctgtttcggaggaaaagaaagatggggagagtctcacacaagcagaacctgtggaaatgaagaagttcaatatgggtgctcatgataattcgggtagtcgtaccaggaaaagctcaagaagaagtgcttggaagtctaattcgggggctacgacttcaaacataggatcgtgggtcaagactcgacgaggaagacgaaatgcagagaatcagtatggagagattaatggcgatggaactcaactggctcaattttcgggtaatttggaggtggtgttacaagagggtatcgttagtgaaactcattcggttcaaaattttggcaagggcgaggaggcggcctcaagcatgcccccaccatcatcatgaggtgtctatcttggaattttcgtgggattcgtaggcccacgacggagagaacccttcggggtttaatccatgatacggatgcggaagctgtctttcttgctgaaacaaaggttggtcttgatgatatgtatgcttttatgaatcggttgggttttttaaatgtgattggtattccttctgtgggaattgggggtggcttttgtcttgcttggagacaggcgggtttgattgaggttcagcatatttttgaaacggggttccatgttatcattccggagatgcacggtctaccgaagtggcctttgttctgtatctatggaactccctatgtggagaaaaaggaggagttttggaagtggttgacggacacggttgcagactgcggggagccatgggtggtgataggtgatcttaatgtcattttggatgaatccgagaagagggggggtaggaaaaacttgccccgtgaggggactttcttgcgtaatttcttggatgatacggggggtgttgatctgggctttcaaggggtttggtgcacttggcaaaatgcgagaaaagggatcaagaatgttcggaagcgccttgataggggcttaacggattcctcctggtgcattaactttcctaatgctaaagttataaatttacctatcctgggatcggatcattctccaattcttttgatggatagaggtgagcagaggaaacttaattaccctttccgcttccttgaagtgtggacgtcgagttcggaatgcgagaaggttgtggaatctacttggaattttgaagtcaggggtaggaagaatgaaagattacctctgaaattggcgaatacaaagcgtgaacttaaaaaatggaatcaaaactcttttggcttttgtgatcaaaggattaggagacttaaacgagaacttggggagatccaaaacaaagtgccttctagagagaatttggagaaggaagctacggttcagttaagtattctggagatggaagccaacatggaacgaatttggcgtcaaaagtctagagagctctggatcaagaatggtgacgggaataccaagtttttccacgcatctactgtcattagaagaagacgaaatgctattgaaagtgtggaagagaatgggatatggctttatcaacgggaggagattgggagctattttaaggaaaattttatgaaagtgtttgaatctcagaatcctgtcattggtgatgattttaataccctcttcactgaaggtgttacggcggaggaaaatgctagtattagtaggtgtccgaccgttgaagaaattagaagtgtggtttttgctatgcatcctcttaaatcgccaggaccagatggtttctcgggcatct

SEQ ID NO: 43927 - DNA, 1613 bp, Cannabis sativa
tgtattatttagcaaattaagagcagtacccttctgtatgtacaccatacatggtcatcaagaaattcagacacataccacgtctctattcttgaagtggtgtgcatgaagagggcaagacgttcttgaatatttcttatctcatgaatgcagcttatacattagttcctatcaacatggtggaaagagatgttcatgaaagaattggaatatgtggcacgcctgctacaagagtaatttgcattaccttctcatgcacttggtattaatcagttttataagtgatatgcagcgccaccactcccaagtgatcctacagtgaagaaagttgctgacaaattagcaagttttgtggccaaaaatggaaggcaatttgagcatattgctcgtcaaaagaatcccggagacaccccttttaagtaagtactagaattgttgaacttttaggtattacattttggtttgtcctttctttgtctccaatattgttattttgttaagcatctcaagcatgcattctaagtcaatgacatgaatttttcatgatttatagtcttgtgaagtttatcttctgggattattttcttatttaagactaaatttttatgctctttgtggttatttttattgttattaggtttctattcgatgagaactgtgcagattacaaatactatgaatgtcagcttgcggaagaagaaaaagctcttgcaaagaccaaggaatcacaaacatctcaaagtggttggtcctttaatataactattttttcttgattttatacggaaattttatttttgatccttacacttaacgtagaatctgtagaattttatcacctgtggtatattgtaattatagtgaaggcatctattgctactctggttttcaaagtataaaactggactttgtggtggttgaaatacaattctagataaggattgacttttaaaatttgcttttagtgggcacctaaatgtatatggtatttggatcaaatcaacctttctaaattttatgatgagttatctatgaggtgctgtgtttttatttatttatttatttttgaaaaagagacaaaggtcgattaaggattgacccctcccaaatttattagggagtctcacttatgacggaggaaaaccgtggtaacaaaaataaaattaaagcataaatttgtgttatttatttatttatttatttttgaaaaagagacaaaggtcaattaaggattgacccctcccaaattcattagggagcctcactaatggcagaggaaaaccgtggtaacaaaaataaaattaaagcataaagctggataaaaactagagcaaaacacaataaatgtctaatctaggagggaaatggcctagaatagtttacaactccactctcttagaaggtcttgaaacgacaagttatcaaaagcttttgttctataaacccatgttgcaacccagaatttaatcttatcacaagtcttctctcttattttctttattttcaaaaattctgccattcctttctaaccaaacagcccagaaaatagctaatactgttgctgttcaaagtctagaagtctgcttccttcctttgatcttgcaagacagaag

SEQ ID NO: 43928 - DNA, 1457 bp, Cannabis sativa
  modified_base (1185)..(1187): a, c, t, g, unknown or other
atatatataaataaatattgatctatatataatataagattctaaaataatattatattactagtatagattttaaatagtaattcaaaatttgaacctttggagaatgatcattaataaaatatccctacagttactaaacatataaatttgtttttcagttcgaaacttgattgagaaatcagaattcatagctcataagaactacttattcatcggattacgttttaggattttttttaagggattaaaattagtaggcttaaagtatacttaaattaaattaagatcgttttaaagaaaattatatttttttagggaaaaaacctgaagaggaaaaagtgccaaaaggttgattaattaatcacaatttgcaaagtgccaaaaccaaattataaattatatttctaatattatagtggaattagattgtcaaagattttgctataacttctaaggaaaaaaagcttatggctgagtttcgtaccgttttaattgatatttttttttttttttgtatttgtaatgttgttcatctaattggttttaaatacaagaggtatgcaatactagttttgtaaatatgtgtcgaactggaccgacttatatttttctatcacctcgtgttatgtcaatattattaaaatataggcacaatcctgtagggcttgatatttttcgtcccgtgcttagattcatgtcgtgttttactttggccaatctattttcttgactcgaattcgtgttctactttttaatattttgtttttataatttacgagaaaattactaaattatatgtatttttgtagcttcaattatttttatataattttttaacaatattttactgataatcatacaaaaaaaacattagaattattaaaattgaaatatttactaaaaaaaatacccaaattatgtttcaagtcgtgtttttgagttagacttttcgtgcttacttgttgtatatttcaggcttatcttgcttaagctcatatttttcgtctcatatcgtatcaatttatagcattgtgtcatgttgtgcccaaatttatatttttttcctatctaattgtggtcgtgccttccgaactcgtaacaattttatgtcgtgtcaaaaagtttaacccatatatacaactctattcaatatatcctctgttaaatatatatatatatatnnntatatatatatatatacattcttccgtttgacaatactagttttactttgataagattcattttacacaaaaaaaaaaatgtgttattttaaaagtaaaaattctttaaactaaataagttgtcataggaatcgctaaggctaactcaatagtgagagagacgtaagaaaaaggaagaggacataagttcgaacttgttaccattaccctcaaaatatatatatatctattctatataaagtgtgcttatataactgaattcttggttta

SEQ ID NO: 43929 - DNA, 2510 bp, Cannabis sativa
  modified_base (27)..(40): a, c, t, g, unknown or other
taggatgttaatcaaacatacttggtnnnnnnnnnnnnnnctggtaaaatatttccaacattagtatcattgactaaaagtgaggtcaacaattgtagtcaatgctctctatttacgtaaatcctttaaaaactaacatcgccttaccgtgctccttatactcctggaattctttctttccacttgaaaatccatttacatcttatcagtctcttgtacaatggtctcctgactgcaacctaggttttgttctcaatgacatcttttcttcttaaatggcattcaaccattttgcaccgtcttttcctgttgtggcctctaggtagcttttaggttctacactctaaagatcttcagctattgatagcacaaattctctcaacatatccatacttctctagtgctttagctatcctcctctctctgtccctagcaaactaataacctttcagagtctgtttgagcatcttttttgttatagattcatctagatcattttgtgtttcatcaattgtagatttggagattgagtctatctcagtctaaggtgttctactccctgcttcttgagctgatgtaatatttttcttctttaccatggccatttcttctttattgaagacgaaatgtctgctaataatgcacttcttataaccaggttctaaacaccacaatttatacctcttcacaccattaaatagcctaaaaacaaaaacttgagtgctctagtcttaagcttgtcttgcctaatatgagcataggtctttttttttatgcttgattagggtctattccccacattgagaaagactcatttgtttttacaataggtcttttttgggagataatgacaccggataaccactacaccaaaacaatattctatcccttttccattgttaatggaccaatcgcactagttctcttcacatacacataattctattcattaaatctatcataacttattccgaaagattgctagtacacacaagccaattacatccacttattgaaatgattatgcttctttctttttcaaaagtgaaaactttgaaaaatgtttttttaaaaattaacaatattaaatcaagtatagtggaatgatgtaatgtaacgttggtaagggcaaacatttatatatgtatatcaacaacttattcatataatgtcccacttcaattttacagcatataaatatatcttcttggtcttcttcttttttatataaacaattaacgaaattcaattttagcaatcgaaaataaataaataaataactgtaggaacacttaagacactaaatgtacccaacgagcaacacttggcacgccctgattgaccgcaaaagccatataataacccggcggcgcaaccatactattaggcggagccgtacagatgattttataccggccgtcttcgacgggaacggctgggttgacggcaagtttgactaaacgttgaccttgagaaaatgagtgagtagcaaacggcgcgctcccaagattgacttcaacaatcccaacaaaacccaaagttgctgaaaccaccacatcaaatgcttcgccgtaacgtaccgtctccggaatcccctcgattacgggtcggatattggcccggtccgggctcaagtactcgggcgaaaaagcttcgatcctcaactcggtcggatactcagcttccaacttgtaaaaatagtgtgggttactcccagcaataaggacccgcccatcgggtaacaaattggcggtggagtggtacattctcggtaccgtgcccggagtcaaggtcatgaaacgtagcccgattggttgatcgggtcggtaaagaagcgggtataaacacgggttcgaacccatttcgaatccttgagttccagcttgagctccattgataatcaaaacctcaccgctcggaagcataaccatatctcccataatccgcccgaacggcatgtcttccatctcccaaaccggatcggggcccattgccatgatcctcccacaactcccgtgggccggtgtgtccgtggctttctcgataaatgcaccgaatttggctcctccacacactacgatcacagccgttgaataatctccttcgagtgcaagcatgacggacgatccagctgaagggtagttcctgggtccaccatccaacggtggatattgccttacgattttgtttgccacgtggtcatacgacaccgctttatcgttagcgaaaatgaagagatacccatttgggagaagatgaacataagggtatagattgtccatttggctatcctcaacctccgccaaaaacgggaaagaaacggcgccgttttctctcggcgggtaatattcgacggtattagcagctctacctccgaccattatgacggagccgtcggagagaatctgattcgtggaataccacctcccctcgaccaatgcgacgtcgtctaactcgacccaatcgcaagacccattcgcctcgcacggttcgaactttcgtatcttccg

SEQ ID NO: 43930 - DNA, 3702 bp, Cannabis sativa
cgacgctcttccgatttagtttgattagttagataatgccatatttagtggcatttactttttatgccatatttatcataacattaataatttttcccatacttttaaaaatagccctagaaaaaaatatacaaatatactcataccaagtctttagaataaaaaaataaccccgtaacaacaactccaactaaactaaagattttataatctactggctatatatcaagcaaatatgacataaccaatgactatcaataaataatcttaccagtaactaatcaataaataatcttctaataaaagttcataaataataaaccaattatagttaaataagaaacaaaacaacatatgaaatgctctaccaatagataaataattcattatgtgatggcgatgctaattgtttgttttaaggagataatatttgttattaaggctgctgtaatactattgatcagaattatatataggtgagatcacaaatagctgcatacccttagaagaaaacaacaaaacaaaagcatatgaataattaaatccaatgtcattcattgtatttcatgtgatttatttaatctttatcatttttcctcttcaattcaattcctatatattcattcttctaccctttatacccttttattgaaaccaataagaaaattattaaaaatctatgcgtagttagtagccttttcgtgaatcccaaaacggtttgttcatatccataccatggccactttgttcatcatctattttctcttcatgtctcaaatttcgtcttcatactcatcagatactctaaatgaagggtcatctctctcagtagagagaccagaccaagttttaacttcattaaacaaagttttcgcagctggcttcttccctgttggtgtgaactcctattacttcagtatatggtttaatgagcccaactctgatcagcttaatcgcaccatagtttggatagcgaaccgtgatcgacccgtcaatggaaaacgctccaagttgagccttttgaaaactggtaatcttatactaacagacgctagtttgatcacagtttggaatacagatactacgtcaagttcacaaaccaagttgaagctctttaactctggcaaccttgttttaattgcttctgacggtgtcgttttatggcaaagcttcgatcacccaactgacactattcttcaggagcaagcactcgctaaagacactaagcttgtttcttcaagaagccagggaaatttctcgtctggtttttataggcttttctttgataatgacaaccttcttcgtttggcttataatgggtttcagctttctagtgtttactggccaccaccttggctggtaagctgggaagctgggaggtcttcgtataacaacagtaaaatcgctgtgctcgattccttgggcaatttcagttcatctgatgattttacatttatatcagcagactatggtggcagcactcaaagaagattaaagatcgattatgatggaaatctgaggttatacactcgacgtaattcgagcgagaaacgttgggttgtctcgtggcaagcattttcagatccttgcaagattcatggccactgtggacttaatagcctatgtagctatgatattgtttctggtatggtgtgctcttgcattccaggacataaaatgagaaattcttctgattggtcttatgggtgtgaaccagaattcaaactcacttgcctgaaaaatgagtccaattttatgaagctattgaatacagagttctacgggtatgactatggattttttcccaattacacattctcggcatgccgagatttatgcttgcaattgtgtaattgtgttggatttcagtactcatatttttttgctaaagataaggttggcttcaactgttacccaaaggtgttactggttaatggatacaaaacacccatgttttttggagacttctacttgaggtttcctagaaactactccttctctgcattgcctagatttggtttgacttgctccaacaaacttaatagtactatacttatgccaactaagtattttcaaagacaagagaaggagttggcgacattcatactttggtttatatgtggagttggaatatttgagatcatgtgtgttttgttggtgtggtacttcttgttcactagaagccagaaaaattcaagtacacatacaagagaatacctcctagcagcggctaggtttaaacgatttagctttcctgagcttaagaaggcaactcagaacttttcaaaagagattggaagaggttccagtggaattgttttcaaaggtgtcctatcggattctcgagtcgcagcgatcaaaagactcaataatgaagctaattgccaaggagaagctgagtttctaacagaagtcaacatcattgggagagtgaaccacatgaacttgatagcgatgttggggtactgcgtagaaggaaggcataggcttttagtgtatgaatatctggaacatggttccctcacagaaaatctatctagaaatgattatgctcttagttggaaaacaaggtttgaaattgcattggggacagccaaaggccttgcttatttgcatgaggagtgcttggagtgggttctacattgtgatgtcaagcctcaaaacatactcttgggatctgattttacaccaaaggtggcagactttgggctatctaagttactaaatcgatcaggagagctagaagatcaccaattttctaggattagaggaacaagaggctacatggctcccgagtgggttacgaaccaaatcattacatccaaagtggacgtctatagctatggaattgtagtgctggagatgttaacaggaaagaactcagcaacatgtaatgatcaggagaatagatcagggctcgttaaatgggtgagagaaaaggtttacgaaagttctaaagtagcaacatggctaggaaacattatggatccattgatggaaagtgagtacgacttggaaaaaatgggagttctattgggagtagcacttaaatgtgtagaggaaaagaaagatgcaagaccaagtatgagccaagtagtaaagatgcttcaagatcacgattaacaaatgttataattgttgtagtaaaactggtttatagtacttgtgataattgtggtgatatgatatgttacatatgtgtgtaataattatgtcaaagggcaccttgcgcacatcgtggtttagcatgtgtatacatataatgttggattaaaaatattacctgggcacatatgtataatgtatatgctattataaagtgtgatacaaaattaagtgaacaattatgttatgggtatcaaaagggtattaaattgtcatagaaataatgggtacataccatatgttaatttataatttgttgaggggccaaattataaatatccaaaactcattatataatgagctggtccccaagaaatttctgtattctctccttctccatcagagaaaatactttagaaaatagtgtattattggaagatcaaaaccttctctgcaatctccaacaatggcttcagattagtgttttcgctcattttttatcatatttttcttctttaatttagcaaagcctttatagatttatgatttagggttttctatattaaagcactcttaaggaatatatttagatctgtg

SEQ ID NO: 43931 - DNA, 3359 bp, Cannabis sativa
agtgtcagttgacccatggcctttcgaaaagtcgatttcttaatgcacaatgatgatgaactcttttcttcatatggtttgaaaatttgtacatataaaataaaataaaaagttgttttcatcgaaatgaaacaaagtaattagtatgtaaaaatttcatgatcacggctagataactattagttaaaaaaaaaatcccatctcactcgtatgaacatgctacgggcatttaggcaaataataaaaaaaaaaatacaaggaaaacaatgggtaaaggagcacattaaccgaacttgtgtacagtgattaaggcaaaaccattctggttcagcggcttcaataactaatctgaattggtacacatttactgtcaagttctaccatcaacgtcaaaaccagccccggtccaacctggagcaggtggccctttacctttgggcacagccccaagtcctcttcctttaccttgaaactggtttttcttccttcctcttccttctccctcagcggaaatgtgttgattgatcccatccacagcttgagtgtttccagaatttccttcattagtgatgttttttctgcccccaccccctgcttcggttgaattagtagctgaggaagcgtctgttgcaatgatagtcggaggaggccctgttgagaccccatcctagaaatagttccatatgcaaacaatgatcatcatttttctaaaagccaaaatatacttaacatggactctgagtggcaataagtaattaccaaagtaatcataataacatcttcttgcacagaactaacagccgttacacaaaatgcaaatattgttttcatattttgataaacccatgtcagttttttatccatggaactagaagaaaaatattccctttttgtcttccaacattttctggtggcctgatccatggagtggtgcacttgaccaaatttctcaaacatgagtttacattatttaaggttgactatgttaatttattactcaagtcatgcagtaagggtcaaagtttatcataagatttggtgtttaataagtcactttatacctagcaattctaaagttttaagcctcaaaaaatgttgttggaaaaaagaatgaaattaagtttaagataatccaaagaacactactcaagaccacttagagccaccgaaattttaatgagactgaagaccattcagaaccccaaaatttcaatggggttgaacccactgatgagcgagaaacagttacagcagttatcttgtatcctcaaactgcaacatatagatcataaagtgaaatccaggtatggtactggcagatgggtccatcaaagctattaactatgctacgaatgtagaatggagaacttacatgagaaactgcagctgatgatgctctaccaggattcaatgcttctaatcttctctttaactcttccagcctagcaaactgagtttggctactttcttgaacctaatttagaagtagttcaaaagcaatttgttatgacagcaagcatatatacctatccaaaaagtataaataaagaatcagccacatttgaaccagatattataccagctggtttaagtcttcacaaagcttttgcttagcttcttcctcgtccttcaccaccttcgatgctgcttcccacgtctaaagtaaataaaacaagttcaaaaaaggaaccaagacacatttaacaaatatattgcagaatgatagacttgtcatgttataaaaatggataaaagacaatatcatatctcaaatatatgcaacggagatgtgcaaagcaccacagtaaactcatttctaagaagaacataccttccgtgcttcctcttccttcactttggccaaacgaattttctcagtggatatctctattttctttcttaaatgttcaagtgctaaaaatgacagcataatggaaaaaggtgggaaaaaaatcactgaaccatagaaataaacaagaacaccaaagaaaggaaatcatattgatggtgtaccaacctgctttctttggcccagctgtaagtttcaattccatattaagactcgcaagctctcgttcaacatcgcgaattttagagtaattttcatcaatgtatctagaagatattataatctcaaattgtaagccgtggaatttaccgactatcattagatatgaactaatccgtaatcgaaaacatcaaagggaaatgatattttaggaaatgtgaaggaaccaaatttgaattattctagttggtaattaaacaaataaaaatcatgtgaacaattcaccaaaatttgtttccgaattgtgtaagtaaacacataaattaaatagacactagacaggaaaggggaaatacttctcttctgttctatccaccatctattagtattaggatcaataaactttgcctacgattgaactaaaacttaatgctattagtattattcaaaacaaccccatttccatctcaaatacatccttaatgacatcacttaatcctttcaaataatatctaaaaaagaaaaaacaacgattgaaatgcaactaaaactgagttttctttttaccctcaaaagtgctatttttgatcatacatgaagatttactgagttccaactaattattattttttccaagtgatttttcgcattagtaaagcaatttttgtacaattcaaagcattaatccaatcatcaattcacagcattaatccaatcttcaattcagtaatccagaggacgaaacagtaatagatctggtgaaaatgtgaaaaagtgagaaaagaaaaaacttacttcctcaattgaagttgctctgcctcaattatctgccacaaaaaaaaaaaccaagaaattcaataaaatgaagctgaggaaagtggagataaatggagcgaaaaagagaccttctcagtgtaggcaatgacaggggcttcacgagagaggccgtcgggtccgatctcaggaagcagtgagggatttggtgatggggccgaacccattctcgttcgatagggagaaaacttgacttcaatttgaatcagatttcttttcaaatattttctaaatttaatttcaataaagtttagtatagttcttcaatcttgctttgcattcattttgagagcaaacatgtgctcgcacgagaaacaaaacgtgtttagaggttaaaaatagttctctaaatcatgtccaatatctttcaaagttgaattttggttaagaaagtaaaagactggaaaaatataaaaaaataatagaatataataaataataaataataaatttttatatttgatatggaaagaaaaattatattgtaaaacacttgactcaactaaatttttcatat

SEQ ID NO: 43932 - DNA, 1105 bp, Cannabis sativa
  modified_base (1047)..(1048): a, c, t, g, unknown or other
ctagcgtgcagtgtctgcctctgggaaggctcagcgagcggtgtggttccctaaacgacgttctgcaggcttggagaatggaattaccatttcgagtaatggagacgagtctggtttccaggacatagagaaaggttctggtctattaccggttttacgtgatgatgttgtggaccggtccttggggagggaaactagtttgaataatcaatccgttactttggctttggtggatggtgggcctgctattgggccaagctttgttgggagtgggccgtctgttcagtgtagggagctggaggtaggctctttgaagattgataattcttgtgggccttcaaaggtcaagaatattaacttaaatattgggtcgaaggagggggatgcttatattaataataaagcaaattcttatgtggaagcaaatgggccggtggtgactaatcatatttctccttctattgggccggttcttgaagactaagtgggtgacggtcaggttgggctctctcctccacagcccaatgttgatcgtgagtctatgttgctcccaaatgaagatagagctttggctcaatttttcaaagctcaagaggacttaatgaatgatcttaaacattttgggaagctagacttatatgagattcgcaagataggaggtgatattggagtcccggcttcttctgaagttaatgagaggacgactcctttcaaaaaaaaggaagtttgaatcctctgcttctctttgctctaggcctcataaaattcaccgcaagtatcccggtgttgtgcatgacttcccctgggactcgaggcaagaagagaatgatgctgaaatagtggttgatgatccttctgaggatagttccaattccccgagccgatcgggtatcttgaagaaacccttggtcggtttgtttatgatcgatgatgctgtgtcgagtgggtctgcttactctcatacccctatggaggagaatgctgaatctcatccacaggagccatgagaggcttagcgtggaactgtagagggttagggcagacctnnacagttcgggaactgaagtccctgctctggtcgtgctcacctgattttgtttttctg

SEQ ID NO: 43933 - DNA, 1505 bp, Cannabis sativa
gtgctacaaaaaagatggtgatattttatctgtgagaatttctaaataatattattggtgtctagtatttttttcggtatcatattattataagtataattaagtatcaagtctcaaataattttaaaaaaaaaaatttaaaagaatatcattaactaattgtaaagaaccacttatacaaaattttggataccagtacccaataacaatgcccaatggtcaccaaaagcttataatgccgcaatattgaataaatatttttgcagagcctgaatacgtacagatccccttaccatttcattctataaagagtttttcttttattattaaaaagagatgagagagagagagagaaatcaataataaagatgaataaaacagtggtcctttcatttcatttcattatttggcttattcaatatttgatcacctgttttaatcagcaatgcatcacctctcattgattttattttaatgctcatattttgtcggtggaaatgcaattaatacttaaattattattattattatttgctgtcgtatgcttcacataagaatctctgtcaagctttgtgtataaaacataaataaataactttgctgtaactattatttcttatatacatagttacattctaattacattaatttacaccttataatacggctcgcaggtcataattagatcacgtgaaaatattgtacgtaaccaagcaatttagaacatacatttcaccctcgtatcattattattattatattacttctaaaatttcaaatatatttgtatatggttcgatgcttctattttaagacagcttaatttgtatatgttgagagttttttaagtatgtatatcatttttccctaacctaacctctagagacgttttttattttaatggttagatctaatggtttaatgtttttaacattcatattaatattagttatattgaagtaaccattactagataataataccattaaaaattttgttttatataaatatataaaacaatttacattatagttataagtaaattttcttaaaatttatgaataatttatcgtattaaaaataaagttcaaaataataatacgctgacactctttatttgaatcatattttcaatattgtcaattatttaaattttttttttttttaaaaaagcaacaagctataataactattatgtacgtcatataccatctattattttatagtcgtgtatgtgtcaattaatggtgcaattaatttttgttatactcaattttcacaaaaataaaataaaatggctactcttgcacaaggatccacatgctaagagtgtcttgaagccactaaagttaattttgcgactttgaccaagacttataaaatgagttaagacatccttcttgagggcctcatgacacctatagaggactcgagaacattaaccaaccatttggtgttgggactcacacacccaagtgtgcccaaactagggtttatgggcccgc

SEQ ID NO: 43934 - DNA, 2110 bp, Cannabis sativa
actctctatgattttagaaaattctataatattaccaaaatgatagaaagttctagatacttgtagagtaggtgttgatctttaacaatatgtaccacttgggtgagatgtgatatgatgaggtttcttgtacatcatgaaattgtatttttattaagacccttttctagtttcctttcaaataagtgagtagtgagttcttattatgtatggaatttatagagagttgagttcagttaggacacttatgttagaagttatgatttatagtaaagttatcaattataagaatcaatctttatgcaactttgcactagtatatgggagctcattatgatttttttggtagtattgtagtgtttgtatgtatatttctaattgttttcgtttatacatttttttatgcagagatttctttctcaagttaatgataaataatgtttatttttttttatctgatcaataataataatatttattattattatttgcagtgttggaaagtagatccaccggtccaaagaaaaattgaaaaaacatgctttaaacatctcatgcagcttttcatgaattctaaaagcataagtgtactattgggccttattagttctttttttagcaaatttcagaagataaatttaattttaatgtagttggaaagaagttagtatttagtttacaagatatttgtcaatcgattggcaaacctattattggagaagattttaaagataaagagaataaatcatgctaggatttattacaattctgatggtaagtagtatattttttttacagtcttaaattattaattttagactaaattattataaatttaattattattaatattcttattttgcagtacttttttatagtttgcctttcgcaattggcaaattatatatgttaagtaaagattctggtgatgcttcaatttttgatgatgaagaggtgaaaatattacttgtatttccactagtggacctttgttcgcaggctttaatctgttgatcataatactaggatgaaaaattgattttttttttggatttattaaacaatgaggtaactgttttttaattttattttgttttgttcatcattgttttggtttgttatgattttattttttattattattattttttttgtaaatttaggatactgtggttgattggtaaccttatgaaagaagggtcagtagtgcaatgatctctctagaccttgtggcaaattttaccgttaagaattttgatagtttattttaactatctatactagatttcagacaagatctttcttggtaatcgaaatcaattacacccaacaattcaataaatcatctcaggtattttattacttttagaactagtttttcaatttgtttttaatataaataattaatttttcaatttgtttttagaactagtttttcaatttgttttcaagtagtattacatgttttataaaaagaatgaatatgctccaatgggttgggtttgttttcacctttatagattttttttttttttaatttcaatactgatttggtgttggttcaaattttgttgatggttaatgttttagatactttgatatggtgttgttcttccaaattttgttgatatgtttcagctaagaaattttcttcgtatgtttgtcttttttctcaggcagtctccatttctctcatcttcttctgctagttccatcgtctccgttttggttcatcaatgtctggctcttgttcgaatcagttgcggggatgcttctctatagcaattggcttggttttgttcttgggattcttttacgcggccattgtttcgaagcttcttcctccatcgaataacccaataatttccgccatacaaaatgactggtattattgcttcttggttccattgactctccctgttcttgtggttgctgtatactttcattggctcagcatgaaaatgttcaaacatgcataattctttttatagcttcttagtgtttggttcacatgaatgaatgaatggaattgctattcttaaaggggttcaagtgtttggtttccttattgtggttggaaaacccattctttttttatgtaaatatgtat

SEQ ID NO: 43935 - DNA, 4296 bp, Cannabis sativa
tgttgtacaaaaaaaaaaaaaaacccaaaaaaaaaaaaggttgaacactcttgcaacaattgctcagagaaaaatagagaacatatactcattgtatttctaaaagcttttctttccaaattactcaataatatcgactcgtggactaaggctctttaatagcccaaccatgtaaaaactctaatggcgcgtttactaaactgcaattggaatcaaaataatcaacaggagaaatgaattggtttaaaatagaaaataatcggaaacaatattttattatgctatttactaaactatccggaaagaaaactagaatcatattattttatttacataactaggaaaggtaattggaatgctttaatttgacaaaattgtcattattaaaatatgtaattattttttgtttatagatttttaagggcatatttgtttttttcacttttagttaataaaattaaaattaaagtaaattaagttaggaaagagaaatgtattccctataaaaataggggagaacatttttcttcctaatttgtgtgaacttacctcactactttctcattttctaaaatttagtaaacaattgtatgggaatgaataccatacaattcattctcattccttttaagtaaacatgtcataagtgttgtcttgttatttatctttaaattatttatttcttcaattttaatttcttgtaattagttttccaaaaatctcggtaaacaagatcattcagccaaatacaactgactcgtggactggggttgattaataccctgaaccacataagaatctatgtctctattctctattaatttagataatctatcaactctcatttaattagtttctaaaaatttcggtaaataaaaactatttggttactaatatagttattagttactgttttgtaattttttttttaaattttagttagtattaattttataattttattaattgaattatattatattatatgataagtaattagtattcaaaataacaaaaaggtatataaaataattggtatataaaaatgctaacttgttatattacatgacatcttattaattttaaaaataatttttaaagttatctaaatatattttaaattaagctaccatagtataactaataaattatgaagatatatacaaataaattttagaagtagctaaaataaatatcaaattatataatataaaagtgaagtttcttgtgtaaaggataatactagtatagtcattattgtaaattagatgaaaaaaaagtgaacattattgtaaacttctcaaaaataatatcttagatgtaatacttgggctggtttatgggccttcgtatgatccaatctaagccttcaaaagcccattattgtattttgtcactgttatctgtatctgtaatctcataatggcaccaaaacctttctaaacccaaaccatggcgatgatagttcccactctctcctttcaaaacccctctctttccagtctcaaaagcattggagttcgatcccgaacagccccgtttccctcttctataaccaaaattcaatcattcaatcccattcaaactcataactttcatggtttttcagggagaacacctgaactcttgctcagaagaaatttgagggtttgcgtggctgccaaggaggatagcgatgacggttttgatgaagctgaaaagcaggctagaggggagagtactatgcctgagcggttcaggtacctgacgaaagaagctcccgaccctcccatgagatggcctttctttgtaggtagaataataacttatattctttgtttggttgttgagaaaatataattgcttgaaattgttttttgttgaaaaaaaaaaggtgaagtgttgaactttagggtgttcattcgttttcagctttgcatattacctgtaatttatggcaattttgtaaaagattgaactatttattgatagcattttccaatggaagagaatagagcaagtatttttgcaacttaagaaagaaaaaataaaattggaaatagtcatttttttaatctttggtgactgagataatcttcatatgctaaggttcacaaatttattttggaaactacgggtagcatgaatttacataaattatttagtgtggcaactattttgtttatgtgtcttagtttttcatatgataaggttcacatattttttggcaactaagaaggaattcttcccaagtgtttttcctcattagcaatcctcagggttggttcaaaaaaagaaaatccttaagagttgaggaagaacgtgataaattttgatttgttagtcatcaatgtgattaaatgcggggtaaatgatgaatgtatttgtgcgtgtgatttagaataagagagcagaggaaaacaagcaagagataagtctgatcaataggaaagaatgtattatccatgaggttcttgatagtaggatactaatattttaaaatgttctttagttttttttaacctgtttgatcctgctaatgaccctatattttgaagatgtttttattgaattgataattgtttatttttattgatggtatcaaaaatagcagagaaattattccataatttttcttgatgtatctcttttgctgcttctacttctttgtgcctaaggttttattctttcattgtgttgatttttgatggtgactgtaaagtgataacaaatgagttctttatatttattatttgcttggggaaagagaaagtcttacgtatcttcaaatgttaaaaggggttttttgttgtagcgattctctcacaccatccaaactagttttgtagatataacttctcttatgaaacattgatgtgtgtccaaatttcataaatcctaagtgaagcaaataacagctccagttgtactcaaccatcttatccctggttttagactaggaatatttctttcaagaaggattgcactaaattattgcatatgaagtggcctaataatcaactgttactgtaaattattttgcagcggtggcttttctactctatgcatggagggcagttttgtttgagttacataattggaaaaaggctgcaatcgccattgttcattttctaggatatctctccaaacttgcattggcccttatctttcatttcttaggtgatccaattacttcggttatcagatccattgagacgacattttacagcattcgatcattctactctggcattgttgcttatgctccagttcccgagctgaccacaattatcatactgtcatcaattgtccttgctattgcagaagccacagttccagattccatcaacagccaaccgtatatcctcaccttatctggcttaattggttatgcagctgtaggaggctacatctctgagcctttcttctggacccttttggtggggctctacggattttctagattttttaagaagagagatgatgtttcatcgtcattgcctgcagtagccgttctggctgccgttggagaaccttggattagagttttggtgattggttcatatttggctttagcgatttatcatcattcgaagaaatttcccgaaagggaggaagaagcagtaatgacagctaggaaacttccacttccgctgctgggtgttgccttagcgattggaattcgtattgctgccaagtgggctggttaccggcatttgacatggatgatagtatgaactcaaaaaataaaaatctacttgtgatatcccattctatctcaaagttttaaagtaggtttttttttctttcatataatattttgctttttgttctttaaatttttctaagccgcgtgtacaaaagtggataatccagagatccttgttgagtttgtctcccatgttattcaagctaatcatttttgtattatggtcatatttgtttcagcattttactgttttcttgataaatctgtatgttatttcaagcgtatctaaaatttggaagaaaatacagtagtagaaggttccttttgaacattattaagaaacatgatcaatatcatgaatatatatatagaaaaagaatcactctccatttacaagatccaaattaaccgtacttcttttggctagagagtaagaaaaaaaaaattgatgtcctctacgtgtgagaagagaaggaaataatatatgaatatgagaaagttgcgatatttgtagagaagagctctcaatcatttgctttaaatgtaaaattttgatgcatgcttcttctttcttcttcttgttattgttgatctcattgttgttagag

SEQ ID NO: 43936 - DNA, 2914 bp, Cannabis sativa
aattttctcaaaaataatataataaaaaaaaaaaaaaagataagaaagaaaaaattctatgtgactataacacttcatataaaattagtactcaaaattggattatatgtagcaacacaattctgttatgcataaacgcgtggcaatagtgcaacatgtggactgccaactagaaatggaaagaaatatgagctggcaaaaagtaatagtgagaagacaagtaaaaacaaaggacatttattaatttccactctaaataggttcatcgtaatccagtaatacaaaagtaatatattataggcagctaaatcccacgaaagttccaaatatccaaacaaaaaaaataaaaaataaataaaccttcataaaaaaaaaaaaagtaaaaataaaataaaacaattaataattccgaaagcaaaaacccacccacccacctaacccagtcttgtccaagtcctactacttaaacccctcgaaactctcctcttcttcgcattccataaacttaattattaaacccttttcagtgtccgcatcatcaaatctcatctctctctcaagttcacaacaagaaaacattcaaccttcaaagtagtctcttttcaaaatgtgtggcggtgctataattgctgaattcatccatggaaaccgaggagtccgtcgagtttcctcgtctgatatatggcccaactcatcttttgataagcttaacaccaacaactttttcaattctgattttagccagcacggtcatgatgagcctgctcccgtcaagagatccgcaccctctacaggttagcttaagtatacgtgttgtacattaccctttcttcttctatgtggttagtctggttctgagttagccattttcgcaaacagatggtgtgcaagttgaaaagccacccaagaggccaaggaagaatctttacaggggaataagacagcgtccctggggcaaatgggcggcggagattcgcgatcctcgtaaaggggttcgggtttggctaggtaccttcaatactgctgaagaggcagccagagcctatgacagagaagctcggaaaatccgtggcaagaaagccaaggtcaattttcccaacgaagaagacagctactccaaaatccaaccatctcgctctaaccaaactcaaacccaactcgtgaatacgacccataatactcccctgtatcaacaacctcgtgacactctgccccagagtttggaaattgagtttggttacgatctcaataaacagattggagcttttccctctaatgggtttaaggctggtgccgaccctgcagctacttctggagatgaacattctgggtccggttcagaaggtgcctattcttcaaccggattaatgctgggtcacaatcagaacgccgccggagataatggtagcataacccaaaccaaagtgaaagaagaagaaatgccgatgaaagaagtggaagtgatcacaattgaggaggaagaagataacgaggtacagaagttgtcagaagagctaatggcgttcgagaattacatgaagttttatcagatcccatatctggatgggcagtcggtggcttccaacagtgttcaggagagcgatgttggtcagctctggagcttcgacgacaacgatgacgcaccttcctccgaaacctcaccgtccctgtaacgacgtcgttttagctccatataacatattctatttgtatttttgctttctcttaaaaatgggtaattttgtaaatttaatggaattggtgattttgttcattatttccaagtatccgaactaattaaggtgttttagtttatagattaccataataaatttgtgcaattgtcaaaacatcgctgctttgtctgaaattctcaaatatgatcaatgtataattattttttccctgaaattcccgatttatattttacgtataccgtattttcataaagtttttatgggacttggttatgtgataattaaggaatggattaaagaaatataattagtggattaatttaatttttgggtaagaaaagtccgaaaattacttataagaatagtaaagagtgagatgcaatgtacaggccaaaaccactaactagtaattgaggcggcgccgccgttggttttacgaaaccggaggcggtggtacagtggccaactgattttgtttaatttttttggtaaaggaaaactagtacgatatgtgttagtggtctttgaggtcgtacgttaatttgtagtttttgtactacaatagtatgatcattttgtatcattatgcttctttgccatttcggcgcgtgggaccatcctttgcattccaattttacacattttgagagagaaaaatgttcgagtaattaggtaaatattatctttggtaattaaaactatcaataaataaaataaaataatagatagatatattatttttttaactatgattattgcagagctttttttatttgttttttttttttgcaaaaattactcctcaattataaaaataggattttttttttttttttaaggtgaagaatttaaaaaatgcctaatttgtagggcatttaatagtttgttctaattgggtaatttcattgtaatattgtagtcttgaatgtaatatatttaaactaggattgattaaaatcttttgttgttattcatcttttaaaacaatatttatttttacttaatatttagtcataatattatcattttattacacttatgctattaattaaaccacttcattaatttataaataactgtatatttatttttaaatatcacatttttttttttacagttttaaaaaatcactaccgtatagtacatagattattataaatttctttaaaaaaatttaatagaatacacacatcaaacatgctaatatactatatata

SEQ ID NO: 43937 - DNA, 2273 bp, Cannabis sativa
aaacaagacttttaattaattaaagtaaacgaggactttattttattaattaatttctagagagatgacacaatatttgacattactatcaataattggagaatcatgtatactttaaaaccctttatttatatagtgacttaaataaacattatatatttctataactaattaattttaccaataaatatcataattaaagatgcatatagccaaagcaaatctcaatgtcctgatctccctatgtaacatatttatatccataataattaattaatgaactcgtattttgtcttcattcagtccaaaattatttgattatatatattatatagtgatttatagtagtgatgttagaagattattataaaaatttgaatatatatgcatttaaataatcaaatttaatttatttattagtgtatagatatacctggttagccaaagaaaggccttagtggagctaggcccttttcttgcaagtccttgggtgacctcttttttgaccatctcaaccacatttgcatacaatgttggatcacattcatgaactttttcaagtctctacaataattaacaacataattatatatataatcaattaattaatatatatgtatagattataaataatagaattagttatatatatttttgttattacctgaatattttggtggacatcttgtcttagaactgccatagttggtccaatcttatctgcaaattaaaaggagatcatagatatataattagatttagaaaataataataagtaataattaacaataataaataaatatgtagttattattaccaagtacttgaagaaccaaaatattgcatagtgaaagaaaaggcttggtgggtatataatgatgatgatgtacaggagaattaggaggaagaggtactgctaattcatcagtatcatcatcatgagctggtttactattaacttctttgaccatcatggacactctttcaatggcagatctaatctctgatgaacaacagtaccccttttcttcatcatcatcaccacatccacatgatgactttgtaataataatttccttattattattattctccattttcagatgatcatgtatatatataaaccacttcttgatgattaattatatctaaatatgtatagatagatagaagagagcttagctaattagcttgatcgagtttgtgtatttaatttctaagtaatttagaatgagtaattcatagagatagatagctaattttgcctttatttatattggctctggatgatccatatgtactgtctggcccccataatatataatatttgtttttgtaatttttcttggtaatgagaattgacaatgacattaactttgacttaatcacaacaaaggaaatggttactttgagtttgggagcttaaattaatttcctcttttagggattttttgagttttaataatattataaaaatatttttaattggccaaataaataaatatacagcttaaataaaaaaatttacacaaatactatacttacacacactttcaactcaggattcatgcttcttgggccaccatgcatcaacccaacgcaaccgaaacaaaaatttaaccagataagagaaccgcaattaattttggcaactttacctgaaaagacgatcagaaccacaattttaatgtttcataacagttgcataaatattttgctaacagttatttctccacatattactattaaggtacaagtaattatcgatcagtgacaaaaaaatactgacaaatggtttcttacatgtacacacatttttacattttttagttgcaattaagttgcatgttagttggctctcgcaacagatataattgttgtattacaatttcaacagcaacacatgatccatgcttcctaagattgaaacattcgtctgatgcaaccttcggtcaaccacccagctaccttcatctgatgcaatctgcggtcaaccacctagaaatcccccagcaaccttcgtctgattgaaaccttcgactgatgcaaccttcgaccaactacctagcaaccttcgtctgatgcaactttcgatcaactacccagcaaccatcgtcaaactgtgtaagtgatagcgcaagtggtattttggtaattaaaagtccacaaaagatataaatatgggcttttttcattaatgtacaacaaaaataaaataattacaaaaaatgtgcaaaaaaaattatttgaaaaacttatacattttgaaaatt

SEQ ID NO: 43938 - DNA, 2456 bp, Cannabis sativa
atgtatatttttacacattaatcagtgagcctcgagctagggtgatgttgtacatgtcatggcggcgcgacatggaatgttcggtctcgggacatatgggattttcattttatagtcgctgtgcgtcctgattatatgtattttgaaatattctgtaaaaagtttaacaatgggatcccgacttttgtaaatatatatataaaagtttatacagtttcatagttaattctaaagtttaaatttgacacgattttcaagaaattttctttaattagcaaagatagcactgaattaaaaaatcactgtagcgtgctttagtattagggcgttacatcaaaagtgttccttaagattggggaggagagtatagaccttttgacagatttctcaaggatcaaggaattcaattctcacatctttgtcctcgtgatcttgctaaaaatggccgcattgaaagaaagcatagacatgttagagaaatcggtcttacattacttgcacaatcaggattatatttttcctactagtgattagcttttcaaaatgttgaattcaccatcagctggtattgtccttcagttcatttgtccttatgagtgtctcttccacaacgaacatgaataaacgatgttgaagtcttttagttgtgcatgcttttcttatttaaggtcatacaagtatgataagctagatttctggttagaacattgaacatttgttggatactcttctcatgacaaagggtatctatgtgagaattctcaaggtcaaatttacatagtcaggaatgttgtgtttaatgaaacacactttcctgctacaagtgctacaaatgactctgcaacacattacgtacattatcctccccctatatcccttcctactactgcatttctaattgtgcaggtcactaaaaatcactccttactctttagtgacctgcacaaaaatataattcattaaatagtgtcattaaaaggtaaaattgtagtagtgcaaaccctgagaaataaaaatatattctcacataatagaagaattctagaaggcagtgactgatacaaggtctagttgcgcactatgcatcacataatataatagaataaaagtagcaaatagagagaagtaagcacaatcgcgtcatatagaaaatatgcaatcaaagtgtttctcccggccctgtgccttatataagactacgtccttataaatgtaggtccaaacgactataatttacacggtatctcataagaacccacgacttctctattgttagtacaagaatgcccaatttgtgaccaaagaagtttcaagcattctatacctttaatgaaaatggtcaaactattcctagctcattaatttccaacaatagttatttatttgatgagtttaatgtgtaaagcgttcttgtctaatcggttatgtatatcaaaggatgtctactttatatataaatagaaaatccaccacacaataaaaattgatcacaactttctgaatagtaggttaggcatgccgaactcttgttgaaccactatacttactggtggtattgttatttaagttgctttcttgtttgattgtttcttattattattctcgttgttctaagtgagtattagatattatttctgtgggagtttcttgttaagttagaatttcgctaatattaaattgggcttagataattaatactttgattgtcaaaattaatataaacaatatatgcaatactgataataaatgaaagatagagaatttttaacgtaattttgtaattaattctatatactctacgagtctattatatttctaagaatattgagaaaacagagaattacaatacaagattggtagtattttctttagtagggaatttggccacccctttacattgatttctccatattaataggctaaaggcaatagttactaaatcctgtctttacaatggttaataaacgtgggtaatcctcacatttcatttatactgttttataggtaggaaaatacatgcataactttccaatattaaaaactataggataatggcagttatatttgatcttatctagaacgtgttatgagtgatcccttctttaagtggcggctttacaatcctcaggttgaactattttatatgtgacttccttcagaggatggattggctcggaaaatgaattatcctttatctttagaatgagattttggacaatttttgtacaatcttactcaagttgtatctcttgtgctttatgaatgctgaagccatttaacctcacgattagcttggccttcctctccttgtcaataatatacctaatcaataaatttataagggcattttacaattttgtatacgttattttaattaattattaaatatgtgcaaaaaaacttattatcattttctcatacacttttatgtataattaaaaactttttttcaattt

SEQ ID NO: 43939 - DNA, 2678 bp, Cannabis sativa
atagtaataattccagagaaaagagtagtctaactgtgaagaaaattgccacagtatgggctcggttgtgatcccatgtaccatgaagaagcggataacacatacgtgaatataatcttttaaacagcagagatatataataataataataagatcagtacttatatatgtactgatatagtttatatattataccacttggggaattatttgtagggaaaattgggcgagggctcctatggatatatcggttaatataggccatggtctcttgcttcttcttctgtctttgcctggctttgtgattttgaaaccagtaaaagacattcttaccctcaatgtgaccaaaagctcttaaccttgcggttatctgctgtatttggtcagcactgggagttcttattccttgcttatacaaactctcaagtaaattaatctgctccttcgtaggattccatcgagatgtgttgacctgaggcccactactactcccagtaccagattcgttaccatcacaaacagtaccgtcgttcagttccggtacataatcatgatcatcttccatatttgatactattgctagccaaggtttagtggtgtatacctaagagaaagactataggtactatatataatgagaaaaagagaagaggagagaaggaaggatacaaacaaacaaataacaaatggggctaactcgtttgcatggcttttgcaccgttttatagagaaaagacagagagtcaaacaaacgagggagagcagagataagagtaagagttaaagagttaaagagtaaaagggagatggacatgcgtattgttattggtgctacaaatctctgaaaacatggcgggtagcggctaataaagattaaccgaagaggtggagttttaattatttttgccgtttggagtaaaacagtggaagtaaaatatagagaaggaaatgacaatggtaccctctggcaaattatttatagaaatggagagagtagaaataaggcaagttgtagaaataatgttgagagtgaaaagggtattacgtacgtaagattcttgggaatgacatgttgatcagtgaggagagaattgggaaagggaaaacgacagccggttgggttataaggtgtaggtaataggtaggctttgggaattgaagttggaacagagagagagagagagaggagcacaggacaagaactgcgcaggtgatgaagatgaagaagctagtgtgaaggtgttgccgtgttgatacttggtaggggcttgggtggtgaacctcatggcccgcgcatggcctcaacttgacttagcaccgaatatacaaagagatctaattacacccactctctcaaatcaatgaatacctcatatattttactaatgatttgtaatgtataacaacagtataataatatccactttcagctgtttcatcaaaaaaaagtaaacaataatatccacttgtcatgtatttaaaaatgagggtgtcaatgaagatgcaataataattttcataccattctacaccatctaccaatatgtaaaaattatgtcatatatttgtaaccggccggactcggagcatctccaatgaaggcatgtaaataagtgatgaaaagttaaaatatagttcatttaacaaaaaaaaaaaatgtactttaatatagtgtgccaaaaagtgatgtaattaaatttggcacgtattaaattttgtgccaaatttggcacaacatttgctatgatgtaaaatttacaccacaataaatgcactactttttcatttacatttatgtcatttttattattttattagtatatttaagtattacattaaattataaaatatttatattctttttttattgtcttacatattaagatgataataaaaatgattataaagttatgatttttttttaataaaacattaattagattttaaattttacatcaaaattttgcaattatgcattggagcacaaagttaaaatttggtgtaaatttatcacagaagtacaatttgtgccaaatatagcacaatttttacatctcccattgaagatagtcttattaattttttagtggcagaactacaaaatgttcctagaaatataattttgccaaattatatcccaacatattttgtttgtgagttttcgtataagaaagagtgggcgtctaattcattccaacttttttcttcaaattaaatccaatccaattaataattgtactagaaaataattatctgatccaatctaattaggcttcaaaatccaatccaatgatcaattgttaaattagattgttatacccaagtttgacaaaaaattaattataccccatgagggcccacatgccaagaatacaccttgaaaaccaaaaggttaaaaaagaagacatcgaccaagtgacaaaagacaaaattaagtgccacatgacatagaaggagtcatgggcgattactgcccataatgggctgtcaataatcgcacccctagggtttatcttctaatcaatccaagaaaaggtaacttacctcgaaaccttaatatgagaagaaaccaacaagtagctaaaagtacttaacttgttgggagtacaagagtacataggaaaagatgacattatcaaatacaaaagaagaaatcatacacgactattgcgcattat

SEQ ID NO: 43940 - DNA, 2521 bp, Cannabis sativa
tagtctttgagctagtttcatattaatattttattgtattttttttagaaaaaaacaaatacctcaaaattcacactagtttaaatcttaaccattcattaccttgattatggtcaatgaaactcggtcaaaacttcaactatagttgatcaataatataacattccaaattccaagaaattcacattaaaaacaaaaaaaagagttgaaacatgtaccaaatcactaccaaaccacaagaaatgatcaaaaatataatacaaagtcctaataatatcaatatccaaagaagaaaaaacactaattaattaatttgggggagttgtgttattaggttcaatttttctaagttgaaaagtatgcttctgagaatcatcttgatcatcatatgcgtaagcaaagcctccatgtcgggtcagatccatacccgccatttcatcttcagctgagatccgaagcaatttaagcttatgcaatatgaagaaaagtgggcccatcgtggcactgacccacccaactataaccaatatctggattacgtgggcccccaatagtctccctcctccgcccatgaaaagcccataaggccggcccggtttacctggataaacttcgttcacgtacttctcagtcgcgaataacgccgtgaatattatcccccacgcgccacaaccgccgtgtaattgcgccgcctctaatggatcgtcgtatttaaccttctcagccagtttgttacacgagattagaaccaccgccgccacgaatccacagatgatcgccgcccatggctcgactacggaacaacccgcggttatggcggcgaatcctccgagaagtccattgcatacgtcggtgacgttccagtgaccggagaggattctttttccgaagagtgttgttagagcggccgtacatccggcgagtgtggttgttacggctgttcttcctacggcgctccattggccgtagtaattaccggagttgtatgagcttaggatttttgtgaatgagccagggttgaatccgtaccatccgaaccagagcatgaaggtaccgagaacgacgagactcgcactgtgaccacggagtgcgactgttcgaccgccatttccgaatcttccgattctcggaccttcgattaaggctccccagagtccggcgattcctccaaccatatgaacaacgccagatccagcgaaatcgatgactccagagccaaacaagaggtctccgtcggtttttgccgcggcggcccagccatcgcctgaccaaaaccagtgagaaacaacaggataaacgaatccagtcaaaaaagaggaatatatcaagtaagcgacgaattgagtcctttcagcgattgaaccactggtgattcctgctgcagcgattgcaaaagcccactggtatagaaaaagactgtaatcaaagttttgcgaagggatctggtcaagaccgaagaattgacgaccgatgaagccattagaaggagttccaaaggcgaaagcaaaaccaaacaggtaataaaatagtcctccggcagcggcgtcaagaacgttagtaagcatgatgttcatggtgttcttggctcgtactgagccggcacagagcatagcgaagccgagttgcatagagaaaactagataagcagagaagagaaggtaagtagtatcaatggcgaaagtagcgtcagagtatttagaagatacgacgctaaattgatcgcagatcaaagcagcggctccggcggcgtttgttgtgtttgagccgagaaactgagccagttggctgagctggtcggctgtacagttcaaagccgccgccatggttaatgattagagagaagaaggactacagtacgttagcgtggtccgctttggtatgtactcttttttctctctctgtgtatatataagatatatttatagtgaaggaaggagtgggagtaaacgtatgaaatttctgactctatttggttttggtttgttattatagttttcatgactttttttaaaataaataaataattaattattaaatatgatttgtttgtttttggagaaaattgtggtacgtattcaaaaaatgaagacttatcagaattagaatctgaatttggaatctggaatcttggaatctggaatctggaatccagctgttctttatgtatatataaattttgaaaagattgtatatggatattatataaatgatatgaagcctatatgatcgtgtataaaagtaaaattaaatccaacatatacataacataactaaagaaaccaaatacttccaattgattctttgaacttcaatttcaaaggagtattggatatgcaaaagaaaatgaaattaattagtgtgggtaattccaagctctctatttcttgtgtttcataaaataagtagtgagttcggagattgagaccttatatttatatatgtgaaactttacatcaaaatttctgacacaattaattgttaaaatattttcacaatcaataaaattaaattgcataattta

SEQ ID NO: 43941 - DNA, 1967 bp, Cannabis sativa
  modified_base (30)..(34): a, c, t, g, unknown or other
aaaagaggtatgtttcaaataaatataaannnnnaggtaaatttgattaattgatgaataaaagaggcatttttcaacttaccccaataaaaagggttgtataatctaagatgttggcagcccaaacctttggttatgatcattaaaaagaaaaaacaaataaatacttgtgccagttagatttaagggattatttgataaatacctaaaaaatgaaaaaaaaaaattacattgtcacggatctacagtttttgttgttttactggagtgttgtttttacgttgtcaatgtaataataacgtgaaaataactttttaatcttctaaaaaaataaataaagaacttatataatacagaatctgtaaaaatatatataaaaaaattgattctaatttattcgtctaaatttctcattttaattttagattatgttttcaattgatacatgtttgttgagtgcacatataaataaagagatttttatatcacatactgaaatattcttttttttttattgtaaggtggaatttttttcaaaaatactatatatttttatactgtgtattgtgttaagttttatttgttgttccattgttattttttagttattctactgttatttttaatttttctgttttgttattttacagttgttttataaaaaaaaaaacagtatttttgtataaaattccgtatattagtaaaattattaattttaccaaaaatatagtattttgtaaaaaccataaataaatgtgcaaggtccttcttaattggacttagtgtccatttatggaggcccaatcgattttgttggaggttgagtaataagggacccaccataggagatcgtatccattattgattattatagggcgttgatattatatattactcattatccgaacaactccatacccaaaaagtatatatttgttttttcagtgattggtcgtttggcctaattaaagataagcataatcaattatataggtttatgtttagatttattggattagactttacaggtctagtcttcaaaaagaaacattgcttaacttataattataatacaatcataataatacagacattaaaaaacacactaaggaatcaaataatgggatggtgcacatggattctctttgtttaatccaaaataagtgtgtattgatagaaatatttaatatgtgccttatctacttgcacataaaatctatagaaggaaaatattatatataattaattgataccaaataaagtaaacaaaattgcttgacaaaaaccttataatcttcagtggatttctttaaggccgaaagtatgggcttaattactcttgggtccaaaacatctttaaaataataaattactttttgacacaaaacagaactctttgtccctaaaaagtttatattgtttactatacaattcgaaataaactatacttttttagaagtaaagctaataaatatacttacctaacttccacaaaaaatgagaacgataagaggaaatattaatactaattatggagtatggagtatggagtttacgtattatgcaaggaaacatgctaaatcaatatatatactttagaatcacctgtacgtacccatagtttactttatgataaatattaatcacacatattcgatgtatatagtttctttttccatttaatatatgtttttatctccactgcatgggcatctttatatattaggccaattttaatggtttaaaagtaatattacggttcataattatagtagttctcacacacgtacattatagttataataaaatggttttatatgatcacacattatttttgtgtgctttaatttttatatataagaggagagagtggaaaagaagaataagagatcacacacatgatgctctataataaggaaataaaataaaagtgattatataccataatctgtataacatttgaacca

SEQ ID NO: 43942 - DNA, 4803 bp, Cannabis sativa
acgtaccctgacactcatttaatgtactctgagacccatctaatataccacgaaatacattccgtaaaagtacatcacgagacaaaatcatattcctactaatatatttatggatcattcactataatttcccattagagaaacctcaaatatttgatggattttggttaaggaaaatttgaaagggaagggatgtaattgtattatatggataaaaaaattgttgtatactgtagtttgtagtctgtactttagtaggtaggttagtctatgataaattaaagtggtgcacgtatatagcacatggtggctatctatatcacaacaaataaatacatattcacgtgataactattacttggagtgaattcaataatggaaaaaaaaaaatgatctctattaaattgtacacaaaattaacaaatgcacttgtgtggctaagtgattgtaaatctatttttatttgtattaacttattataaaagaaacaagaaattcttgatcttcatctatttaagtgctattgtgaatgaataactttacatccctaaataataaaataactctactatttatagggaagaattacatctagtttgtttcgaaaatataacaaataaaaaagaaaactaattattttctcataatacaacaattgcgtgtagaaatcccatgaaaatagggatttaattgataaataaaagagagaagtgcttttaagtcttttgttgccacatttaccctgggacatatgaagagttgtcctaaaattgaccctggtcgaataatatcgtttaccatgcatggtatctttgtcatattcttcaaataagtaacagctgatggataattcaattccagacgacatattgacgaggtttgcttttgcctaggtctaaagaatgatccacgtgtcacccaaaataaatatcattgatagaaaaatttagattttctatttcatatcatttattgataatgcccccaccccaaaaaatagttttttaaaattttggtacaaaaatatggtatttttaggtgtttatcgagattttcagaaaaccaattatgagaaattataactaaataaataaataattcaaagaaagagatggaacaaacataagatttttacgtggttagggcattaataagctttaattcacgagtcagtattattatgtatttaagctaaaaatgtctttgggagtagaatgagtataagttctctaattttgcctgagcaagtattacaagagaattcaacccttaatctaaatagattgtcgggtatttatagtgtttacatgaattatattttgtttctctttttctttctgatagagtgtttacatgaaaatacataaagtatggctcttttgtgaggcccagtccctaaaaggattgatgcgcgaactagaaagataggacacgatcaagttgtcaatactgtgtcccataattgtagccaattaattatgaattattttttttatctccattttaagtaatttctctttttagcttgatacgatcttctatccgagatttgaggagagttaattccttattctatgcgctcagataaaaagagaaacttgactagtcttccagaaacacgctatctggccttctggaatcacggtaccggaactccttctggatacgggctgtcattagcgaaagcttatctaagcatggagctacgataccttcctggaaggtcttgtctgacttgggcttgacccaagttatcttctttggacccactagtgagctttagatattgatctgaaatacaaagtctttattatatacataaattagtacaattttttttttttatgaatcaagtgaatttcattgcttaaaactatttgtacaaacaaatagcattctccgaaacaaggacaacctatacaaaaataatctttacaaggtatctaaccattcttaatggttgctttctttggccatgtacatgtaattcttttttaaaaaaaaaaattgttttactttgctcactatactatctatgcttagtattgagttttgccacaaaatgttattttagcacgccaaatgctataaataagagctgcaatgacaacagccaacatcatcttttttaccttgctaatcttggctttttggatcaacctgactatttgatgaagggtgttagtagtcatcctccaagtgagccaatctttgatatcccacagagaagggacaatcaaagaagagatgctgtattgtttcttcttcgacattgcagaaaaaacactttgtgttatagacagttttatacatctgcactctatcctttgtcttgagtctatttagcatggtgagccaaaaaatgaaactatgcttgggcaagttcattcggctccatactatagaactccactctactttgctagtgggaggccgaagaacatgaaaaccaacaaccactttgtagctgtcatttgaagcttgattcaagtcaaaaaagctttcttgctctatcctttatagctaccattttgtgctaataccatttggtagctggggttgtcttgtaagatcaccaattctcctcctttatgtacacattatgcatccacttcacccatagattatcttttttttatagcaatggcccaaacatacttgaacatggctaccaagtttcaatcataaatgtttctgaaccccaagccacctgaagatttggtgtagcagattgtgttccaagcaactgcagctgaatctgtgaatacctgatttctattccacaagaagcttcgaaaaatagattcaatttccagcactatttttttttttttttggcaaaatcattattaccaaaaattattttaaaatacaaatattcatcactttatcaaaaatttattattatatattaaaaaaaaattaacattgaattgaatttctttgatgtcttaaattttttgctgaagttgtaatacatcttgagcacatgccaaaatatattatagtatgtatagagtatgatttatagataaacacacaagttcatatacaaaaaattactttgaaatataagtatattacctttattaaaaatatattgagatgatattacctttgagacttgagtttttattcataatcacttttaggcttgtattgaaaaatcacaattctaaagagaaaatttaaatgtatgaagacaattataacatagtataaaaatcactaaactcatgtttaagaacaatcacatgcaagagtaaaaaatataatcctaaaataacaaaactaatatataaaaagatgaatatgttacatgaaaaatggaagaagatgaatatatatatgttaatggaaaagatgatgaatttgattcatgcatagataataatttatttttttaatacttttttttatgtatatataataattatagtgttattaaattatggtaatgagaatggatgatatatgtcttacatttttgctaccaggacagagggaaatattcctagcagcccactaatggctaatcttaatatctgtaacactcgaatgtccgaataggttaatcgacaggatgtttgatcaagatacagacatatatgtaccgagcaaggtgtatgagttggcaattttagagatcgatctcgtcgcttccaagacacgaagataatccctatattcgtgggattgagttaaagaataaatgcaatacaccttagtttcttattctttacattgtaattatagaattaatgtagtttcctattttatcattatgaattaacggaaactattcttcatgtattaaggtcctataaatagtggcataatctcactattgagagggacgaaagaattaatccggagaaacacactcaagagagaatatcagagatcaattgtaagagctctagagaggaagaacactttattctttctctcaagttagtacaaatacaaggggagtagactattaccattcttacggggtcgaaccttttttaaatttggtattctctttactttaccgttttttatttctattacttattttatctaatcgctttatcttgacttactgtcgttgttttgagagagtcattttaatccaagttactctttggtgtactattttgcaattttagtaattttggtgtgcatttggatgacataataactttattgtttatatttttaggagtagttttatctcatgtggcttgtgataaaactcagcaatatataatttgacaaaatgacttttcggttagataataaattatctggacaaaaaagaagcatgcgcttcatcgttaaatttttgggtgaatctaaccacctcttgtaaaaaaaaaatacgacttaataaataaaaattggtagtatttaaatttgtaatatattatctatcatataagaatattatttttttgacgttgatttcattgttcttgctccatctcgttggaattaatgattttttttgggtgttctcgtgttgctgtggtggttctatacgtgtgtgtggaagatggaggctataaaatacatttcttcttccttctctatggttattttgtggttttttttttattgtgtttttctataaatacatttgacgagcttactaaaacaaattttgaggtgtgtggttcttttatgtttttctaagtggttatatctgcttattattttatatttatttttatattattttagtaggttttttattctgattttctaagattggacttgcaaatatagctgttattgcatctggtattgaggttgtgc

SEQ ID NO: 43943 - DNA, 3487 bp, Cannabis sativa
gtaaagaaaaatcatgcacaaataaattgagttaaaaataatgtcaccgacttagttctcctctttggtatgacttcaaaatgagtttggagagggccattatttttcgagtggcttcagggacatccaccaatcaattgctcaattgggattggtaatggaagaggtcattaataaataatattttgttaaataataagatattttatatagaatagatatttgaaatttaaaatattttaaaaattaaaaaaaaaattacccatgaatttctcataaatcaagaattttgttatatagccacactttatatagaatagatattaattgaaaaaaaaaacatgtcaccaagtaattctctcagagaaagttgattgaacaaacgaattgatcaaacaataataataacagacaaataattgaatataattcaaactcttaataattaagtggcataaatgaataccataaaaagaacagcaacagtctatttttgttcatcaaaactacttataatagaaattgatggggaattagtgtttaaactattagatatattgcctacaataactgctatggaatgttctttgttttgttgtaaaaatccattaagtctgaacctaatcaactcatgtaaaatacttgtttacagtttttagtaattagtcatcattattaaaatttaggttataagagctcgttcgataccttgtattacattgtattagattatattaatattatttaatacaatactatgtttgatagtaatctgtattaataatatgtgtaaaattatattatctttactataaactcgaccctaactctgacccctgttaaggaccaagccaaggttcgaattcgagattgagttcaaggtccaaattcaggattcagagattggatttaggatccatgtctggggttagggttcgagtttggatccaagatcaggtccgaatctagatatgggttggggtatgggatcgggtccgaagttcgaaaccaagatttccaattcagatcctttttaaatattataatacaagcacatacatatcatttattatatgatttctcactcaaatctctctgaaattgaaattgtgaaagatattcaacgggtaaaactctatataaagagagaaaccttgtagcctctacgagaaaactcataaaacttataatgatttggatttgatgcttaaataattggattagatgattatttttaaaaataattattatttttttcttattccttttaagaaattatgcaattttcttagtaccaatcaattaaaatacaattatttaattattggattagactagtaaaaaaaagtaaaatttaatcggactagtgcaaagatttagcaactaaaaaaattacagaccgcgcaaagtgctagtttagaatataattatctctaaattaatacaactatacaaagatcccataattatagctacattattgttaaataaattaaaaaataatagcttactaatatttttaaattgaggttttttttaatggtgaatagaatcacacgtgattaacaaaacaccaaaatgtaataacaaaaaaaatggttcaatgatgtaattattcctagattttttacatatgtgcaaaaattggcccaaatatctcacttattgacattttatattagtgtcaaatataaaaaaacaacagtaaatttatttgaaattatgaacatagcaataaaaagttaaaacagtgaaaaaagtcatccaatttgaacacacctaaagaaacaccttagtttcctactgttgttttaaggggcagagaactttcaactccttcagcttcagcagtcctttcagcaacaattttcgacattccaaacatctgaaaatgagtgcaaataacaaattaggttagtaaaagcatttggcatcaaaatcaaataaaatccagcctcatattgtgccaatctactgaagaaattatgaacacagatcaagtaatcaataaacaaacatagaaacactatggtggggagagtaaaccttttgtatggtcttcttaaagcatgttttatgctcatccatagaagcattgatgaactcatcaatgtgatccttaacatcttccaagaacgacgcttcctcgcttttcttcttccgacaagaagtaacaggcggttttgcaacagatgattgcttttcgggatgagttttatttgactccattctttatagtgtccaatcagcaacttataattaaaactcaaaagcagcagagttaactgaaacaataaataaaaataaaaaatcaaattcactttactgcaacacaaggaaacaaaaatggtttaattagtaaatcacagttgaattggtttaaaacagtaacttgcgcagtaagtaacatcagttaatagaatcccagtaagaaaagaaagacatttcaaaaagaccaacatgaaaatttaataaagttgaatttttctttttgaaaaagaaagaggccatcgtctcaaaatattagaacctagtacatcagcgttttccactccctacacaggtctaggaatgataaattctcaaaatgtttggttctaaagacccatgtgactgtccagaatctgattctctcccatagatcctccgatgagctttcaatttcttcaaatattctgctattcctttcaatacatacttcctaaatcatggccagtaatgcagtcctccaaagtataacccttcgttttcctcccatcagtttattcctcatgctacttcttagtttatgaggcaatacaaatcacaagtttggattggagactcaccaaatactgtttccttttaaaataatagtttgtttcgtgaaggataactatctattttattttagtattaaattcttttttataacacctcctttttaaagtatacatacatatagagaggaaggagttcacgtttagtttagtaaaattattgtttatactttcacctatgtttttttattattattactaatgattctgcttgcaagtcaaaaattacccaaaattaactcagtcccaattcttcaaaattcaaataggaagatcaaactcatacttactcaacaaattaaacagaataattaaccctacttgaaagaacttatcaatacaaagggtattcagtaagaagcatttgcaagagttaatctttatttcaattagtagaaatgaatctctaacaacgattaaaattgaattaacaaaactttgaaactaactaaggcatcatagatagtcagtttagctgagattatgcttatcaaaacaaaagaaacccaaagtctaatttgaataaacaaatcatcatgtcgatagaaaaacaattatatatttttttttcccaaaaaaacaattatattttcatttgaacattattacaaacacctggtggccacttaatgatcaatacacagcaaatatgtataaaatcagtagta

SEQ ID NO: 43944 - DNA, 1842 bp, Cannabis sativa
gataaaactagttatatttcttgtttctgttcatattagaaattgtcttaaagttaattatattaaaaattaattttttttttttaaaattgagttcaagattttatttttaccattttagaaattatatagtctattttatcatttaacaaaacagaaggtccaattattaacttttacaaaatataaaatttaaaatagcatttactttttattatatttatttatttatacaaatggaatgaaaaagaaaggtttggtcttgtcactgacaaggttttgagagtttgtgtttttttgtattgagcgttttttggtgatcatggaggctagcagttcaagagttcatgagttagaagatgtgtgtgcaaatctgactttggaagaagaagaacagggaggtttcgaggtgggagaggatgtagaaacggattgtagctttgacggacggtggtgtcttgtgggaaaattcctatccagtagagtcatggatctggaattcgttcagaatcaattggcatctctgtggaagccaggtatgggaatgtatgttaaacaacttgagagcaatcttttcttatttcaattttaccatgaggtggatattcaaagggtgatcgaagggagtccgtggacatgtaatcggcaacaactaatctttgaaagattgaaggaaggggataatccaagagccaaaaagcttaataggctggacatttgggtacaggttcatgacattgttccaggccttatgtctgatgttgttctcaaagctattgggaattatgttggaagttttgtggagacagacccaaagaatttcattggggtgtggcgtgattacttacgagttcgtgtgtctattgatattgacattcctcttaagcggaaatggcgtattagaaagaaggatagcgactgggtctgggttcgttttaaatatgaacgggtaccacatttttgcttcatctgtggtataattggtcatacagatcggttctgttcaaagttgtttattactccattggctcaaattgaaaaaccttatggtgagtggatgaaagctgctccgaagaagatgaatttaccagacggattgaagtggttgaggaaaccggagtggtctgcgcctacaggtccgacgacttcagcgacgtcaagaagaccacaacgttcgacttcaatttttccaaatctggaaaattcgggtagaggaaatcatggaggaaatcagggattggctttaaaagagaataatcatcagagtaatagaggagacaaatcagtggtcattgatatgaatattaatgatgatgaggtggcgggaagaaggggggaattagaattaaataatgctgatagtggggtgggatatgggggtcatttaccaatatctcaaggagttaccatatttgattctaaacgaagaagggtgggcttagtggagaatgggccgaatattagtaaggatgaggttatgttggaccaagttagtggttttgttgatggaaatgtagatgggcttttgaataattataatgggtctgggaaggattttaattatgggattggtggtggtgataaagtaaggggcgcagatgatttttttcataaccatgttgggcctggcaaggagagtgaatatgggagcattggtgttgaaaatgcaggagtgaatttgattccaaatgaagatagtgaagatgtgtgtggtgtctcaaaaaacttgtctcaggcgggccttaccaagggggtccgccaatcattatgagttgtctaagttggaattgtcatgggcttgggaacccattgactcttcaattccttaaagagatgatttct

SEQ ID NO: 43945 - DNA, 1896 bp, Cannabis sativa
atagttgtaagtagctaacacctcataaaaatatgccacagagactctgtatctatccgagttgttgatgactcgatgcagagtcgactcgtacaagccattcgagtaaatctgcagtttttgtcaaacgatagaattcgaaaccctttaagtttaggttcaaagtagtatcggtttctcgagtaactcacgactaggtctaagattttctctacctttaacatgtccccgatattgcaaacaaatgttccgggaacaggcggtgctgatatccatttcccagataagtttctcaccttcaaaaactcgttaatttagttacacatatacaattgtttttgtatgtttgaacaaaataaaatatttgtacctcaagtgcacttataccatcttcttgattaagcagtgtcaataaacctgtcattttatgaaattaactgagatttttactaatattattctaatttcaaacatggtaaataaagccttgttattaccatagtcagtgtgtgctccactggattatatgaccatgaaaaaaaaaagtaacattattagatgaaattcacatagggaagattataaaaagagcacctaatgtatcttctttaattaccatccaatgtcgtttacaccattttcgaatggttttttcgggtaaccaaggattcgaactacccagaatggatctccagctctatcgccttcgaattcgtacggcgatccacccaaagccaaagcgaccacgcattatgtttcttgaaagatctgaaaataagaagaaagaaatctgtgattgattagaacaattttggttagaaataatgtaagttggttttatgagtagatctatgcctgtgcacatgttgatatatttttccatcatttccttgtaatttgggggatttaatggcctgcataataagatcattttaattagatacaaaaaatgatatgatatgatgataatttgttgaattgggattttgattgtgtaaataatatatgtaccattgattatgtccttccaaaatttttccaacctcaccataagctccaggtttaagttctctatagcactgttataaagcagaagcaactataataagattaagatgattatgtaatcactggataattaagatatattattattatcattattgtatagaccttctatgagtttttgaaaagtttagagtaatttacacactcaaaaataaagtttgaataattttatttgctcatgtaaaattaggtcctttaaattttattttaaatattgtaaattatttaaatattttaaaaaattaactacatataaatatataaaatagttgatggttattaaataaatttaattataaatattaattttaatcaaactaatgattatatataatatagagcaagtctataggggtgtttcagtaaatttttatctctttcgatatatgaaagagttttttagttattttttttatgattacatatgttacagttatttaagaccacttttaaaatttttaaaaatttccagtagtttacaatactaaaattaagatttataataccgaaaatttcgattccacgcattatgtttcttgaaagatctgaaaattataatttaagtattattactgtcaaaaattaaatttaagcatttatttataattaaagttaaattcgctatttacgttgcaaattactcttaatttaattttggacaccgtaaactattcaaaatattttgagaatctacaagtaatcttaaataactacaacatatatgattatacaaaaatataattaatttttttttttctaaatactagataaagaatcatcaaaacaaccaattaagtatctactacataaatttcttataatatatat

SEQ ID NO: 43946 - DNA, 1887 bp, Cannabis sativa
caagatgaaatactcaatggaaggtacactttctttaacaaaagatgtgtcatcatgaaagcttagaatccaaacactaattttaaaaaagaggatataagaacagtcccaatttgagttcaattgaatgatttggaactgaaatattggggtcaaaaatctttattcaagatcattggcccaataggagagcctctaatggttgatgatgtaaccaaagagagagacaaactcagtttctcgaggattcttattcaagtttccattcattaagaattttcaggtaccatttattttgaggatgaatttggttgcaatatacctgtggaagttcattatgagtggaaaccaacaacctgtagaaattgcaaaggaattgggcatgatactaatgactctcgtaggaaagacggcaaaaaacaagaatgggtggacaaaatgataaaataaaaaaccagaggagaaaccagagcctactcctggagaattccaatctgttaccaaagggtggagggtcaaagccaaagatccattaacttgtcctaccaccacttttcaagctttagctactattccaacatgagagaatcaaattgaagtagtaatttaagaggatcttatacaggacaaggaattggagaatacaggagggggagaacctccactctccaatagataagctcaaaagttggaatgttcgagggatcgatagccagtaaaaacaaaacacgatcaagcaatttattgctagttagaaagtttgtcttgttggtctcattaagacgaggttaaggctcgaaaactcaaagttttatatatgaacatgttctcgaggtggtattttaccttaaatttggcatggcataaaggtgggaggatcatagtagcctggaatccattacaattcaatgtaagtattctgagtcgctcaagccaatttatacatctatttgctgcaattgttgacaataaaaataggttctatgttacctttatttatgggcttaatgatgaagatggaaggaaaaatctatgaaaaagcttacaagatcttgcaggtattgattcttggatggtacttggagattttaatgatattttaaacaaaaataaaagaataggagaaagggttaagcatggttcatcaagtgcctttatggattgtgttagctgctgttatcttgaagatattaagtactctgggagcttcttcacctagagcaatggacaatatgcctcagatagaatttattctaagattgatagagttatggcaaatgaagcctggattgatttgtttccaactgttgaagcaaccttccttactgaaggcctatttgaccatacactagtagtgcttactgttcatcctgctgttccaagtggcagaaagcctttcaagtattataggatgtggtcttctcatccccgatttcatcagatggttggtagtgtgtggatgcaggaatatcaaggtacaaatatatattaaatagtaaccaagctgaaggtacttaaacctatacttaaggagctgaataaataacatttctcaaaaaaatcatacaactaattttcaagctagacaaaagctaaatgaatttcaaaatgacttgcagatagatcctttaaatgctgagttacaagagcaagaaatagaggccaaaagactatatgcatcgatacacaagaacttttattcatttatgtaccagaaatcaaaattggcatggactaaagatggtgatgagaactctaccgttttgcacttcagcatcagagagagaaggaatcagaacaaaattctatcaatagttaatgctgagggaattcaagtagaaaaccccagtgaaataattgcaacttttttggcctatcatcaatcac

SEQ ID NO: 43947 - DNA, 2537 bp, Cannabis sativa
tattgtgctgttatgatcttcagttaaatgatcatatcatacggctgcaattgagcatgcatgctagcttcttcgttcgatcattaatttcgacttctctagctctatacataattatgctacatatgacagaagtgtagatatctatatatataatataaggttgctggtatgatgcactataatgtgaaacatcacttatatttgcgagtgtgtgggttttacttttgttcaagtttgggattgcataatatatggttgacatgaaatgatcgagctacctatatatataaatatagtttagatgagggtctggataataatttccgaatatatattatatacacgaggagaaagtggagaggtggggttggggagtccaagtaattaaagcaaaaattttggtctgccattgttagataccagtcacatagaataagacagtactgatgcttctcaatcgggtaccccatctcatcacctcacttctctcaccgtacttcatgccactttggagaaaattaggcctgccacagtacttatatatccaggtttatttggtatatgtcatgtaattctattttattttaatttttttccactaaaacaaataacatgtttaagaatgaaaaactcgctagagggagtttttttccaattccaatactaaaatttacataaataaaattactttcgtttatatattacaacatattattttacgtgggactcgaactcaagacctccaacactcacacacccactaaggacctccaacatgttactttattattattttagtaaaatataatatttttttaaaatcaaataatatatatacaaaaaatttataaaatactcattgtaattaaaaataaaactaaatatatatatttatatatgtcattggctacatagcaaatatgtcgtctcctatagcatatgcactaaaatagtgttactttttgtgctatattggagttgtaacggacaccacatcatatactttgtgttacattggagaagctcttagaagtgatactttgtctgtaatacttcgatcctaataattattattataagcaataataacaatgcccccagttcttgtttaggaaagacatatatgaagtagagtaggagcattctgtcgataatctttttcacaaaaaattcttatgtcctccaagtcacacgatgttttaactgaaagaaattcttctgtactcatatatgtattggaataatataataattaaatttaatagtttaaaataaattatgaagctaatttattacttaatttctagtcttgtcgtccataacctttacagtaggttaagtctttggtggttgttttgtcttaagcaacattaatacctatatcactacaagatttattacttttgctggtgggaaaagcccttttttactgatgtttatcgagttttttaaaatttgatttaaaagaagattaagttgaaaaaaaataagattaaaatagaccataagagattttttacgtgcttgaggtgttaatgagccttagttcacaagttgatattattagctctgaaactatggagtatttttcatacaagtctttcttgccaaaatttctaatcctttacatgaagaaaaaatgccatatatataaactccttgactaatgggtaaggctaactcggacccattaaggtttgtaggttgaaaacaagcccactgatgggataaataacattaatatatttactttggacttgtttgaggaggcccacaattattgtgagaatattagagtagtggactttcactcaaaaaaggtgatcccctctttgatttctcaggattcttgccagaaacgtgccatgtaggatggttctcagacactcattcgctcctagacacctcttcgaacgaatgcccatcctggatgactcctgtgggcatccatcttcgtttctttggatgctcgttgatagagcaagtgtttaagttctgagactatacgtttgaccttactcatgaattgggaggtcactccatctcggctcagtgaatgagtctattaggcaaaatggttcaatctaaatttacacgtgtcacctatccaaaaatgcagataacatttatccaccaagccttcatggctcgagagtcacaaaggcatgcaggcatcatctggattcgttgcgatgcccagggccatagacaatttgagtcttttgatattccaaagtggaaggttgtagaaacttgtgagcctttcatattgtattagtggaccacacatgtcgaatgttctttggtctatgtatgtcacgtggctcgcagaagcgcgtgtttccatgggttatggattgatagctggttatatcaacaagttgtctgaagcaaatatcatagttaatgtgcatgtccatcattctgtaaatcacattaatggcaattgttgacaataagaactcgtcaacaaagtcaatggatgaaaactctaagtatgtatgtcagaaagtaacaaagtggatgaaatcaaa

SEQ ID NO: 43948 - DNA, 3679 bp, Cannabis sativa
tcaccttgcaataagttcttgaaaaactaaagcaagagtgcatgaaagttttagctagatggaccaccatataaatttttattttaaaaaattaataataattctcagcttcttagtcatggttttttttataaacttttaaacttcaaattctataaaacaggactatagatatcattgaggagttttatcaaacaggtggtagttattcttaaatagaactatagttttcaaggatggtgagagagagtgagagatttgaaacgtgaagtttatgatattaggagatcaaaatcaaagatagatgacagatgagagatgagagatttcaataagaaaaagaaggttaccgcaagatatataaagccggcaaagatgatcgaaaccagaggagatgggtggtggtggtggcagggtagagactagagaggttgtaatgtaagggaccaaagttatgatggtgataaagaaaagtgtaatcatatgtgcatttaaaatatacacaaaactattaataaagggaaggtatttttcaaggtgatgggatattgttcaaatacattatagctttattgtctatatttttgggagtaattttgtcctatgtggcttgcgttttgttttccgcagctcatggtttggcaaaacatgcccttcggttagacaatgagctatcttggttcgaagggctccaccgccgattgtggtatgctgcattgataatcatgtgtgattttgttcaccacgtcaaaaaaaaaaatacacaaaactaatttttctaaaacgcatgcaatatttggccaatatgactagacatgaattgttagtatatgtctaattttttttttttgtgtattttaaggacatatttaattactttaaaagaaaaaactataggaggtaggagtcatgagcatgtattatgagcttttccttatgcatcaattgttgtggtggatataatttggtgagcttataacaaggtacacaataatattatgagtagtattgaacattatatatataaaaaaaatgaataggactgtcgtttttgtgtttttaggttgctacgacaatttgtctttttcgcacctcaatgaatcctgtgttttcactgcaatgcaatgtttgtatcattgaaattatttcaatatcaaaaaatatttcttcaaactgaagggcacaagataaactacactcgtacatgtttaagcaagcttcgggtactgcagaagcttgcaaaaaaatatatctatatataacatttatgttcttaagaaagcaaaaagaaaagatatacatatataggcctttcaatgtgagcctctgatgatgattttactccaaattttcctgagaaaacttcgtgttgcgagaaccttgtaacttatagggcagagcaaacgtaaatttaaggtttaatatcatatctaccataaattgataagtaaacttgtgtaaatggccgtgtagagttcccaaaatgattgtaccctttcactcaggtggaataagtgctatttcgatttcttggagcgtttttcctttcgtttccaccacatttctcttcacaaaaatcacagccacaaaacaaaaggtggcaaagactgaatacagaaattttgccccaatttgttccagcaagcgtaagaacaatagaccaacaaagaaatttaccacctgttaaaagtacagtcttgtcagaataacaaataacaaacaataaaacattaaactcatcaaccatgatcaatatacttcaacctttcacttgagcttacccaagtatgtaatcattggaccaaacaggcacaaaataaagtaagggctaggattcaaaatatcatactaggaatgatcaattcagaaaattacccaatgcacagccatgcaaattgccatagccttagccctgatccgacctgggaatatttcagaaaggaggagacttgggactggaccagcaccgagggaaaacatgaagacaaatctgcattttccattttttgattagccatacagtagtaaccatagcgaaggcaatagagcttataaagatgccaccattcagatgacatgatctagcaagtctacgttacaattgattgatgatcacttacagaagcatgccaccaacagatagatataatgtcccagatcctgatgctaaagaatttgctgcaatcacttgaagaatcaatgacactacctataatgaagtacatgtcatttgcaggtcaacattcatatttcagacagttttattttgtttgagagtttaccatgccagaaaaactcccgagaagaagcacctttcttccaagtttatccatcaatatcattgcaataactgatcctgaagtagaaaaatatgctaaaactaaatactacacatacgtataattatataaaaggcataataaaagatgataaaaataaactaatatattactcaaataaaactagtgcaacttctaccaaatataaattcatgtgtgtgtacacaataagagagtaaagctatacccagaagatttgcgattcctacacatatgttagcagcctccgatggtaccccaaagctcttaaatacagttgaagagaaataaaatacagcgtttatgccagatagctgttgaaaagcaaaaagggtagaccccatgaaaaccactgcaaaatgtggaaatgataaggtaaccatgtagagggaaaaacaaatgtcataggtttaacaattataatcgaagagttaatacctttgaaatgacggccatatagtagctctgagaatttaactgaatctgattcctcccctctatcagacttggacaactctgccattgcagatttaacatatactgctcctaaaagcttttcgcattcagcttcagcttcagtactttttcctttctaaatcaagtcagaaacatctatcagtatctcaattgaaaaaacaaccttaacagggtgaaaaacaaatgaatctcatgaatcttatttatgcatctgatggtaagttaattatgcaaataactctgattattcaagggacatgtcaatttaaataaaaaataaaataaaattagcacatgatagtatatgaccttaaaaagccaatgagggctctctgcacaaaactccatgagaacagaaagtgttgcagcaggcacaatggatacccaaaaacaaacccgccacctagcacatcatcatatatgttggaaaagtttcaatagttgaacaattaaatatgttactataattggcatatatgtttaacaaacttagttacttaccaaccctctctttccttggctgggagtccgataaaaagagcccccataattccaagacatgttgcgatttgtgtgaagcaactgtacctaccccttataaaggctggtgaaatctgtttgataaaatataaaatgttaaaaaagggaaacttggcaatagttgaatcatctattaaagattatctctcatacttctgctacatagagagctacaaccgctggcccaatgcccattccagctccaactaataacctcccaagaagcataccccacagacttttagttgttgcactgcaagattgttaattctatggtaaacgtcatttgagttttaaaaaaataatataataataaatacaccaagataatgtaatctgcaagt

SEQ ID NO: 43949 - DNA, 1146 bp, Cannabis sativa
gtatatatataaagagtctcacatatttcttaaaaaaacaaatatgtatttttaaaacttatattcccttaataaaacttaaatatattcctaaaatatttaataaaaaataaaataataattaatttcttttaaattagatttttaatgactcaataactaattaattaaaaacaaatcactagatttctctatcttcatctatcattttttttcttgagcaaaccagcctctaaacaaagtaatgaagaaaggttcttcaaaacataagaacactaataattgaaattaaataaaaagtaaacacaaaacatggcaaatctaagaaaaaaaataaatgacagttcacaaaccaaaatttttaactatatctcgtatcaaatctaggtttacaaacaaaaataaagcaaaaaaaaaagttccaacgattcaacacatttgacattaataatagccgaaaatataaatattaccaaacaaaaagatggaaaataaaaaggtctcttcttcttctagatctgtccaccagcgagagaggagatggtgctcatctgggtaggcggctcaagcagtggttcagcttcatccttgtcgtcggtgtgcttctggtttgtcattgggtctggtctggttcgtcgatctcctctttcttatcgtctgtgagttcgacggtgggaggtgagatttggggggttagggatgcgatttgggggttttctgggttcggtttcagtcgcagctttgagttttttcagtgtttgtttttattttaatttaataaagatatattaggaatagatttaggtaatattaattaaaaataaaatatttgatgtattaattttttttatgaaataatgggatttaatcccagccttacacgtgtgctcctttttataagtaacagaatagtagtaacagattgagccaaaatagaacgtttggtatttaatctgtcgaaaaaaatacgttatttaagtgtataaaatttaaaacatatagtatttatgtcgcaaattttcctatatataaaggagagaaataagacggtgacatgacgctctataatcatcccaaatacttttatgtattctctccttaattctcttattattttaattttttattattgggttttgtgcccta

SEQ ID NO: 43950 - DNA, 2309 bp, Cannabis sativa
ttggaggttatgttcgttctaatatattcagtgatataatatataattataattaaaagaacaatgctagaaataatattaatgattgttacttctttatgatgctttttttttattctataattttaattatcttacaataatgtatacacattcttttggcagattcaatatatatgtttcacagcatcatcaattaagaacacttcagcaaaaagagaaaagaaaaattaagagacacacaaaaatataattagtcaaatttttatatacaggcatgcaacacatattattggatccgtttgctgctttatgctcaataattgatctcataataaaatcatataaatatctataacatataataataattacaaataataaatataacaatcccaatgaaatcccaatgaaatggaaaggggtcatcttattttgaccaaaccatttggctcccctaacacggtttgctaacctaaccaaaacaactgaaattttggtatgtatctaaagtaattaaagacatcaaacaaaatttaatattagaaatgctaaaaggcatcagtgtgcttagcattctttatgtgtcaatatcactattaattagtttaattaagtattgggttacatataatttaatataataatttttagagaatattgttagtcaatcgcaaaatgacatgtctaaaaatattagacaacagtacccaataataatactctaatattatcactacaatatattatattttagtgaggtattaattattgtgtagagatattaatattcttttcttcgaggtttatccatgcaatgcacatatataaacatagattgtggatgtttttttacgtgtactactctttctcctaatatttatactttttttttggtaagtgggttttgttcttttgcttccactcgatcctatgaaaccaataaattttgttcaagcaggactgtcttttctattttgaatgttgtttcttcccttctttcaaggccaattgatttctactttcggctctaaagagaggtcacaacaaattttttcatataattaattacaacttttattttttttttttcaaaaaaaaaaaaagcagcttcctcatattaaataaatttaattgtgtgttttttttctttttttgtgcaagtactgttgctttaagtaaatttccttcttcttctcaaaaaaaaattatggaaaataaagtaaatagcagttaattaaaatacctgttcaatttatattttggttgctaaatacctaataattctaaagtttgtgcattaattttgaaaatatctattgaaaaaaaaatacatgcaaaaatataattatttaaaataataatgtttattaattttaaccgtttacattagaaaacaatagtgcatggatcagcaacacaaaaatataaacaaatttaattagtaaatatatagtagtgtatttgtatatatataacattctctttagtctggttgttcaaggttcaaaatcaactagatatattttatatcctactctttgggaatatttgcctcaaatttaagggaaatgacaaccaaaatcatattgattataggtatatatagtaccatttgtacaataatgatggcttttgttaatttaattaattaaaaataataatttattgtataattccttttgacattctctgctttttctctagatattgatttagttgagattaagtggtgttggttcattatcctatcaaccaatttgaagatgagccttgatgatgaaaataggtttgagtgtaatacactacctcacatatatttatatatattatatatataaattaattgaattttgtagggatttcaaatttcacatcatcttatcagacaatatttttgcatattgaatttgaaaatataggatataaatatatatatcatgttcttcaccatgcatgcatgttgtgaatacgtgtttttggtcaaccttatatttatatatataatacataacaggaattaacagtggcatactatttaaaatatagttatataaggttgacatcaaagaaagaataggtaagatactatctgttttttcaaaaaaaaaagttgtcgttttagccttgagagagaagctctgctaggattttatctacagtctccgactgtgtgccatggcgggttgggatcggctgttacatgaaaagttatagggattaattagcaatttttagtattgcctagttagtataaatatgtaatactattacacaaatagagggaggaatgaaattggcatttgagt

SEQ ID NO: 43951 - DNA, 2395 bp, Cannabis sativa
ttataaaatttataatggagaaaataatgtctaaactgccattattcaatatttttacaaaataaaatatacatgcacacaataacaaattgtttaatcttatgtctggatttgggttgtagtccgagtttaaaattgaggccagagtttgggtcctaataaagtttaagttggaatagaaatttaaaatattaatgaataaaaaacaattgtttaaaaaaattatgaaaatttttgttttcaaaattattttttaatttttaatttgtaattaaaatattaaaaagtaaaaaacgattttataaaatatgtttataaaaaatatttttaattttttaattaaaaatatagaaaaccgattaaattttttttatcaaacatcttaaatatcaaaaaatataaatagatatatcggtaccttttttaggaatgcaccatgaaatttattgtcctttatgtttattaattattttatttttaaaaatgcaagcaaatttgtttatgtaattattttgtgattgaaaaaaaaaaaaagaagaaaaaagagttaattattatccaactaagttggcttttgagaaagggttgttaatggtcttctgcctcatgggaatggcccaaatggggctttgaaaaatctttatatgacaataagaacatttgaccgtaattgttgttacgtactttgaaaataaacttattacataatttatttggaaaaaaatgacgtaattttcacaatctctacgtgtttaaggggttttagtttctttcaagaaattgaaaacagtaagaacatttctgtattcaattattaatttaacaatgaataaagtgcgctctagctaatattaaatttgtcatatcgtaatcttttatttgaatatatcaaatatgcatagtaaacttgtattttaagtataaacgagtgataatattataaattatcacaaatgcaaataatatttaattaattattgtatatgttattcgttaaaaaaaaatattatgttattggaaaaaactttatatagtactattatcacggctaaaatttagcttatagacatgtctacataataaatgaagagtgtcctaattaatcatatgtaatactagtatatacagtaaaataataaagtttttatctactaaatttatgactaaaataagtaaaatgtaatattattaaccgtggtagtaaaaattaatagatatgtaaacaaattattttttttttccattttttgctaaagttttagatatatatacattttgttttttaaaatactcgaatcaattcatgtggactctgacagttttaaattataaaagtgttttgtaacctcaaaccaatcagttccgaaggtatttttattattagttattattcaattaaatcttacaatattgtaattcgaataatatgtgtcggtagttttaaaaataaacattacaatgttaatttatatatggagcttgagttagttgctgttgttttcaatcattttcttttattaagtggatcatgttttatgatatgaattcgattttaataacgtaggctactgacacgtatgtgaaggagaaagagcctagctagagtatataaactattaaaatctagctcttgcatgacctcatttgatttgttaacacaacatgatttccatatataagcttactgattggtgatctccaattacgtcactgaattattattattatttttgaaaaataaatttaaaatcagtcaacatctgaactacaatattattatttatttttctctgtttatttgctttattaaatacctctcgtcaagaagaatgcaaggctattggccacgccttcaaattattatatttcagtgacttccttctatatgctttacatgctttcacagtgttaagtggttctattcactattctcatgttcatacatatataattcccatcatatatattaacattgacctgcatgcatatgatttcagcaaaatatattttgatttttttttttatattttatatgtatatattaatttattcaattatcaactatatatatcttaataatattgtaaactgaaaaataatggtagcttcttccaagacttttacacatatcaacagtttcatgctttgttaataataatatacttcaaagtgaaaaggtctttgatttgtattcttgtacgtttggtactttcaaaagacatcaaatacttatttttattgaaaataaaaacaaagacatcaaataatgtgtcaacgctcaatatataattattgtatataaacatatataagggttattgcatgaatactatacacacatattccatgcatgcatatatctcatagattaattaacattaatgatagagcattg

SEQ ID NO: 43952 - DNA, 2453 bp, Cannabis sativa
  modified_base (2400)..(2403): a, c, t, g, unknown or other
tgatattgcattattataagtttctaaactgagatggtggtcatatctattgttaaattatagttcattttgtaaaatttgaatttataacaatcagggttcagtacccaaaattgtattttttttttaattttcttttacaaattttttacttgtatttttttaggaaaaaaaaaactgtatttttatgttgttttcatatagcggcaatgtgaaaacaaccctttgtatttttgtgaaaatatttaaaaaactacaaattcatatttttgttaaactttttgtcatttttgagtatttatgaaaatatcactatcaactaggcactaagacattgttattaggcacatgttcaacattatcatgaaatgccatctaacgatattttaaaataattattaaattaaagaatataagatttaatattgaattgcatcaatattattatgtttattaatttctaattataaaaaagttttacatttgtaacaaaaaaaatattaagaaaaattggagtttgatcctttattttcattgtgcaccaaaaatataaaatttgacaatttttttaactaatttattccctcatatttttggttcatatattattacttattcacctttttcatgttaaaattaactatatagtattacatattaactagaagtttagggtgtgagaatgtacccttttttttttttcatccctccctcacaactaaactagtaactttattaaagaaaaatgttaagagacactttatggtgtaagcaacataagagatgatacgtcattagtaggacaaatcaatattagatctaacacaatttgatttaataaataatataagaaactgctaattaattgccacatcggtataatgtttatttccttgatcatcattaggtattggaagatggaattcttgatcccaaaacgacaatagtggctatatttccatctcccatgcattatgcaggtcccacagaagttcaatggcatgcaaaagcaagaataaatggtggagctaatttttacattgtgggcagagatccagctggtatgcctcacccaacacaaaacagagacttgtatgatcctgatcatggtaagaaactcctaagcatggctcctggacttgacaaactacatatattgccattcagagtggcagcatatgatattgtgcataagaaaatggcttttttcgacccttcaagggctaaagaatttgagtttatctctggaacaaagatgaggagttatgccaagaatggtgagaacccaccagagggttttatgtcccctagtggatggggtgttcttgccaattattaccaaacattgcaaactgaagattgttaactaagccttgaaagtactagaaaatgtgagttgatcaagggaaatttgattaattcatacttacattattaggttctttctctctttttctctctccccactgtatccctcccatcctttttctttctttctctcttatgatattagttgaggaatgattaaagaaagtttgaagattaaaaccaagcattttggttcattttgaagaaaataaatgggtggtaatttttcttaaatcttgttgttattgatggttttgatgattaagaattttgtttagatgttcgatctgtcgtttgttattatttttggctgatttttgtggtggaaatcgtgtttatggtggaatctgagtttttggttacctagtttttttttgaatttgcctaatactacacgataagcgcccgataatagttcaacgatgatagtgtttgaatgttagagatgatagtccgattgcgagtttgatagttagggtccaaactatttcttgatttaagtatgatggttgcccgattgtgcccgacaattattttaaacttatttcaccttataccatcggaaccaacccaatcggacaagaaagaaaaatagatgaaaacatgcaaaaatcttacatattgtaccccatcgtacctaatatcgtgtacatatcgggcaacatgctcaacaattgaaaaaaatataatattatgcacactatcgggcaacatattgtcctcttcaacttaagattacagttccaatcaatcaacatattagacataaatatcttacaccatcgagcagcttaaaaaaaaaaaaaaaattaacacgctcattatcattttcacattaagtttttgcaatgcaagacagtgcaaatgtacaaaaaaaaaaaaaccctccgacgtttcttctattgcagctcctcagtgccagtcttgggtcgcaagggtcgttggtcgagcttcttgtcgtcagtcatgggtcgcaaaggatagtgccggtggtgggtcgagttgttgggataatatattagagaatatatnnnntacaattataagataaatgatatattaattatagggatattggcggctaa

SEQ ID NO: 43953 - DNA, 2228 bp, Cannabis sativa
actaatcagattgtaaagagttttatttagggcacaaaacccaacacatacttgttagaaaatttagatcctagtaaaatattccccacacatagacctaggactaaatctgtttgtatggtagaaataggatattctgggtaattcaatgaacatattctatatctagtgaaaactagatttcttgtgtaatttctttgggaaaatattcacattgcaacagaaatgttggaaaaaaatttcttcctctatctggaactaatttggttctggatgatgttttctctttccttcgattagtcttcactgttcctcatctcatcatccaaaatggatacttcttgcgagtcttgattgtggatgtagggttccgtgaggacctctccaagtagttatcgaggaggactctcccgtattcttgctatagttaatatggatatttaactgcttggcatttttcctcttattttttttagaatttaccatagcggaaggtgaccatcatgaagaggttgaagtagatgaggagaaagttgctgctaaggaggttgcagctccattaataatattgaatttgtcttacaaggagatggatcagtatcagaacaggttccagaattatgaaatctctggaaagatgagacaaatggggaccttcaaaatactcatggattttgaatttaccatagcggaaggtgaccatcatgaagaggttgaagtagatgaggagaaagttgctgctaaggaggttgcagctccaataataatattgaatttgtcttactgggagatggatcagtatcagaacaggttccagaattatgtaatctctggaaatatgagacaaatggggaccttcaaaatactcatggattattgtagagtagcctctccgtccagggagagttccccaatatttatgcggaaggaggcttcaacatatggagctgggcccatgtagaaatgggagcacaccttcaactaaggagctatttcgcggagttctacacagttgggggaatagcacattttcaattcatccctcaagtgtacatgctgctcacgggatggtatgtgttgtgctagataaagaaaatttaggttcccactttagagaaaattttgtacttctataagatcaaataacctcagaagatgcgcagaagcataagcacaaatttggcttttactgttttgagaggtactccaaatctttggtttgcctattagcttcgtgaagcatacccacaactttttaaataactggttttatactatagattttctactgaagagggttccaaccctcactttagatttcaatagtgaaagtaagtgtagctgttgatccttttttcttcttcttttttcttcctttccatataagaaatttgaccacgtctatctctttttgttcttttagacactatacctggtcctgctgagatccttttcttgaaagttcggggaattttgtacaggagtttttcactttatgaagccttattgtacaagtttgtaggcaactttcattaaaaataaataaataaataaataaaattatggtacaagactttcattatctttgaccaagtttttaggagcacacgtttataccaactattttcattcattaaatgattttagttttccttcaaaaaaaaatgatttcagttctgattgccttttttttttttttatttacagataaaaaaataagttgcaatcccctcaccaatataaatatattattattacttattattaaaagaatataaattaaaactttcataattaagaaataaatcaaaataatgaaactcctaactcctaagctagtcgaaaacatcgaaatgaaactctagccaaggcgctcacaaaattagacctcaacctgagcggaccggatccccttttctgctcatcaaatacaaccgacttatcttcgccgcttaggggggcgatcgtcgagacttttccgctgcgactctgccttttcctcatctcagtcagctccatcttgggcggaatcttagtcagtccaaagaaaacgttcctagaccaacttctaccactattattactaaccaacttatcagactgacaagaccgggaattctcggttcccggtaacctaagggagctacaacgacgtggactagtcttagtcgttgtagtagaacggactttattgttgaagcgacaggaatgaaacgacgtcgtttttt

SEQ ID NO: 43954 - DNA, 3917 bp, Cannabis sativa
  modified_base (3885)..(3890): a, c, t, g, unknown or other
taaaattttaaacatattaaatatcaaactacataaaaattaaaatattacacattaattattattcaataaattaattaaacttaaaattcataaaaaaaaaactaacatactaaaaaatgcaaatataaactacaaaatataattagaattatataaaaaaaaagtactaaacgggttccaatcacgacgaagagtatcatctccatccctgctctatttaatattcagagataaaaaataatttttgttcccgtcctattcccaatttaaacgcagaattctcgtctcattaaggacatgcccagcaaacctattcccatgcataaaaacaatgcatccctagttgtactacacaaatttcctatagcatatactagtggttatgctttgggttttcactttttacatgtgacacctatatagctcatcagtgttattatgtctaatatatatgatatccccacactagacaaaataaatatataaataatcaagcctaaattattttctcttattaggctcgatcattgacttgcacctaataataagatacacttacccacaaactatatatatatttatatatataatggagtaattatagtgatgtggacaaagacataccaaagatggatgaaggccataataaagccatttcttttgggtaattatttgagtgaggaccaattaatttatctcatctctctcgtcaacgtagtaacgtggtgagcccgtaaagttttcttttgtgtacctatataattttttgttggaaaattctttgttagggcatatgttgttttggctttactagtataaaagtgttttttttttattatttaaaggtatatattgtaatgctttaagatttttcacaaatttaaaaaaattataaataattaatagtgccgaaaatagattgtagtataatttatttaaatgtaaaagatagctcgttctcatagaaagttagatatcatccgaaaaggtgttcttgaaagtctaatttatctattcagaaaatatctcgttgaaagatagatgtctttcagaaaggagttttcgtaagtttatctcgtccactccaaaaggagtcttaaggaaagctatccgaaaatgagttttggatatctagttgttccttcttagatgggaattctgaatagtcgactccaactgttacttttcccatccgagaagtcccttcaaacgtacgatttggtctttcttccgagaagtgtacatctcatcaagaagtgctttaacttaaggtggcgtggagatattgttacgaggagcttgttaagtttgttaagccgtaactaacttaacaaattagcatttgcagctaccgactttgggatctatattccttatctataaataccaccaacacttatcatttatagagtgagatcaacatgagatgagtttcgagaggtgatttcgaagagagagattgagagttacagataaaagagagagactggatttgaatttgtaggaagaattttctatagatgaagaagattcttagataagaatgtaagagataaatactttgacagaagccaacagagaatcgatctcaactataatctaccttgttctttctcaatcaataaagaggattttggtagtgttctataactgaagtagagccatagatcacattgatctataggacttgaacgagtatatattttggtgttgattaataattgctttattgatttatcatttctagttttattgcttttttcatccttgtgtttatctcaaattattatttgtgaattgttaatcctgtcattgctaattgtttgctgattaagttttaactgatttgattctgcacattaattattattttcccacaaatcagagattggtaatcgatcaagaatgtagaatcaagattcaatccgctacaatttcttgaagaaacctttattaattgtctgacaatggcgagatttgaattgaagaaatttgatggaacaggagactccgcgctatggccgagagagtttgaaaaggatcctaatacaccagaaggtctccaaagttcttggagatgagaaattattggctgggaagaaaccagacaagagagctgaaatggaggagatgacttattacacgatcatgtacctgtccagcaatgtgaggaaaaagcttgttgaagaaaagacggctaaagggattttgaacaagcttgaagagttctatacatgacgccatcaattgctagcaagattaatttgtaagaaaggctatatagtttttgaatgacttttttgctttctttagatgataatattgacaagttttataaaattattgtagcgttggctaatataaatcataaggttgatgaagaaagccagaccatcattttgttaagattgcccccaattgcgtatcaagaagtcaagcatgccatcaagtatggtaaagatgtgattacattggaggatgttcttgccacacttaagtccaaggattttgaattgcaattagaaaatgaatccaagaaggaagaagtgtatttggtaagagggagatcatccatgaaagtaagttcaaagagtaaacatcatcacactcaatcaagatcgaagtctagagagaagaaactcgaaagtgttacttttatggaaggtatagacacttgcaaagattttgcaagaagtacaagaagcagcaaggcttcaacaaatctcacaatataaataggaaggacagcaggcatcgtcaccacaagaaggattaagcaacagtcgctgaagatagggatgactgcttaaaaaatggataattacttttaaacttgcaatcctcaatgagcagggagtaaattcttgactccggatgcactaatcacatgtattcgagtcaagaatcattttttgattataaatcagttgatggaggtaaatttttaatgggaaatgatcattcatgaaaggtcattagaaattgaaaggttgccatcaaatagtatgatggtggaatcaaagtgctgacgtaaagacattctagagctgagacgcaatctcatatccctaagtgcgcttcaagatgaaggttacagatacaagtccatgcatggaagcttgaggatcaccaaaggtgcactgataataatgaaaggtgaaaagattaatggtttatttgttctctaaggaaaaattgttccagccagagaagcaagtttgataaaaaggatagaattagatatgcatttatggcatcacagactaggtcatatcattgaacaaggtctcaaagaactacacaaacaaggtataattaaaaatttaaattcttgtgtcttaccattttatgaagcttgcgttttagaaaaacaacataagctgaaattcacacctgtaagggatacaacaaagaagatattcgaatatgtgcatgctgatctttggggaccatacaaagttcctactcactctagtaagcaatatttcctttctatagttgatgattagagtaggtgtatttgaacctatttactagtaactaagaatgaatgcctagaacagtttagaacttggaaaacgtaggtggaaaaccaaaatgatcaaaaagttaagaaccttaggactgacaatggattaaagtttattaactctgaatttgataagttgtgtcaagaatatgggattactaggcatagaaccatagtgaagacctcgaagtaaaatagtgttgctaaaaggatgaactgaaccctattgaacaaagttaggggtttgttgtttagttttggatttgagaaactattttggagggaagcattagctactgcaacctaccttataaataaaatcttaaatagagttataggcttgaaaacccctnnnnnnatgtggtacaacagaaccccaaaccta

SEQ ID NO: 43955 - DNA, 1537 bp, Cannabis sativa
tcagataccaaaacagataggatacatatcccttttcagggggtgcattgttgaattttcctatcttatatatctctaaagaaaatatagggggtgcttctacaatgaaccctaaaagggttcagtaatgcaccccctatctatttcggcattcaggagaatttttttcataatcgtctaagtagtagttatttaaaatattttgcaaaattttaaaaaattcagaaaaatttaacatgccgaaaacagggtctaaaatttcacgcgtgattcttttattttatacacgtgtaaaatagactatttgaatcctattttcaacgtattaaactttttcgaatttttcaaatttttatagaatgtcgtaaataactataacatagacaatcatgaaaaacagttagactacaacatgccgaaacagaaaaaggtgcatcggtgcattccttttaggggtgcattgtagaatttttcaaaaatatatatattatatatatatacacataaaagaaaattctacaatgcacactcgtaaaagggtacattaatgcacttctatctgttttattcggaaaatttttagtcaatgttttttattgttatatacgttacacttatttaagctatcatgcaaaattttcagaaattcaaaataattttgtgtacgttagacaattttttagttgatatttttttcatggttgtaaattattcaaaatttcccaaaattttgcttgatgtcttaaataattataacatacacgaatatgaaaagaaataaactaaaaaattcttcaagaatattgaaacacatatagattttagtgaatttaatagttcgtattctatatttaacataaagtccaatatgatttatgagtttctcaacaggccttctgaataagtagatgagaagaaaaatattaagagctaaagaagcacctgctcctcttccttagccatgtgctggctaactgatgtttgtagggctcctgtacaagatgctaactccctcgggaaattttcatcatttttccttgttgaacttagaagctcaaataggttatcaaaaagatttgtttcacccttatgttcaagggagtatgtctgtgctacattcttcacacgattatcgagagccggaaaaattacctgcagtaggaaactttattctgttagtgtcattatctctgaaatgccataaaaatatggacaaccaaaagcatcacatcgaatagctactatgaggtaaacattgatagataaagagggaaagtaatgcgtgtttttctgttctttcttctgctaaaccctaaaatcgtaaggaactcttttttgtccaaaagagttgctgctgcaacaaaacttcttagcatggcacttagattcacatctaaattccacagaacatttcatagtcatccactgaccaagatccttggaaaacctcatcttggggatttccttcatgctttcaccttataaaagaatttcctatttcgattgtagcatgtaagtgttcgtgatatttcgaaat

SEQ ID NO: 43956 - DNA, 3734 bp, Cannabis sativa
aaatggaatagccattccaccaaaatggtggaaaaagcatttcatgctattccaatattttaaaatgcaaccaaacaaaggaatggaataaaaattatttcctttccattccatttcatttcattacctccaaccaaacgccaccttatatctttaatacgtaatgaattcaaccatctggaccgatatctatatttatagttttatatatatatatatatatattagtacgtaggaaaccaactatgcagaccattatcagaaaaacccaattagggttaaacaaattacacattaaataatatttcttttaagacattccggtggaggagaattagaaaagactaaagttagctttgaatattttcatgttctagtgtactttataatgagagaagtccgtggtcgtaccactagcaaagtgtagacggtgactctctctctctctctctctctctctctccatagttctactagtagtggagggtaggagagaataggatggtgggtatgttcttaaaaagctcccatttgactcactttcaaattctatcctacaaattaaaccattcctttaatgtttttaataatgacatattaattaatgtttgtataatataaaaaaaaaaaaaaaaatctctttcctttaacattgatcccaaatctcacatagctccactctacctcatgcaatttggattctcccggcaatttcttcgagccatcacaccaatcaaacggcccacaaatttccaatatcttattaaaaaattattagatatttatacataattataatttaattaaataaatagtcttatctatcttcttcctccacccagatcatgacttcaacccctggccatttgataggtcatgctcccagctccgatggatcttgttgctacacgtgtacagtaaaagattaaagaataagttctctcctattattaattcgaaacagaatattgtatgtttgtgtaacagtgaatattttcattttttaattgtaactttcactataaatattaaaagcttaaaaaaataagagttacatatcttagcaagtattagaaagcattggcaatgtgatgagaaagcctgctatgccataattaggaaagccaaggcatctacacctttgcatttaatataaaggtttcgttggtcaaacaaggcaaagcataccgtatatagtttttctatatttatatatatattaatttactctgattgtttgccaacatatataaagatcacaaattattcatcagaaataaataaatataaaatttaataattagatatctctaaatattatatttggtgcgattttctaacaaaaaaattgatgatatagccagccttctatgtcttttccctctgatctgatcttacacatataggttttctttttgacagtttatatccttccctttattaaacaaacaaattaaattctaaaaatctatttgaaagttttatccaaaataataaaggcatccttgtggaaattttatcccaaaataaaaatcttatgtgaaactcatgacccaaaaaaaatctatgtgaaactaaagaaccttacttttacatcctttttttctccctaatctctttgttataattgggattcttcacaattcatataaaagggatcaatacatattctgagtagtaaactttgtacagattttatgaaaagggatcaaagtcgttttcgaaagtgtctagaccattttctcccttcacatatggagtactatatataatactactctactcctgtagtcctctgccactttcatttttatattatttatttatttaattatttatttcaattttctctctcatcccaactctttaaatctcctaccaccagtcacaactcttgttcctctaatcaaaagtcgcccctctcttctacctgctgtgcagggatcaaaaccaattaaccaaaagttgaagttgaaccaaagaagagagagagagagatagagagagaagagatagcaaaatggtgggttcttcttcatcctgttcttttctttataccgagctgtatagctttttctttctttcttctactttttgttcctttctctctcaatcatgacttactttttttttcccttcttcttatgtataattatacatatatattcctaaaattctttctggggttttgatattgtaggagttagaagaaaaccagcaggaaacaagatgggaagactatgtagattggaggaacaggcctgctgtgaagggccgccatgggggcatgttggcagcctccttcgttttgggtcagtgaaattttaatcgcttcttaattatatatatagatatatggttataattaagaaatttatatcatataattatattgtattgatctcaactgttttgaatatataatctcaacagtgaccatttggtatatatatatatataataatttcatgcagtggtggagatcatggaaaacttggcatatctagcaaatgcaagcaatttggtgctttacttaagggactatatgcacttatctccatccaaatcggcaaacaatgtcacaaatttcatgggaacagctttccttctcgccctccttggaggtttcttatcggatgcccttttcaccgcttatcacatctacctgataagtgcagttgttgaatttctcgtaagtacctcttcttgtatatagatatataaatcaattctccctccctctacttctcttcttctttattcttagttttctgatttgatctactctttctacacagccatagatattgcatatatagactgctaatttccatagacagatcatcatagtactcaacaaatgtttagctatgtataacggtttaaaacctaaattttttgtttcaatttttgtaaattttagctataattaattggataaaaatgaatagaaatgttataaaataatgtttttttttttaattttatttcattattgatatcttcaaagacacgtggcttggaacatgtacatgaccatgatttgcagtctacttactttcagatagtctgctgaaatctggggttgcaacttgcaacttgcaacaaattatataaatgataagtaaagtaccattcaattcaccgaaatataagtaattgtcacagttttttcctttttggttttattttagagtgttttgtacccctttaagtactgcattattgcaattgttattagtataataatactattttctctcacccttatcaagacaataaataatggccctgaggaagcatacaaaatttaagacgttaggaagcaatcctaattaacttttgtatgtagtaaagctaacggactatatcactttatctagattaaagttaaatctaacctggctctcctgtcgagacaaaaacccccaataaatttttattgcggtctgtttgtagcccattgaatattaatattaatatatgagttatgaaaattcatacaccagtctttactagagtcacaccatttttattttgttttaatggagtcattttggacacacagtttttggctttgtctttaagtcaagtactcccatggcatgctcattaacatgtgtacgtttaatcgagaaaacgacaacattttgtagttaatacaaaaaataatagagaaagtgtgtgtgtcacacgggtgagaaaagtcataaaaaatagggcgataaacaaag

SEQ ID NO: 43957 - DNA, 1975 bp, Cannabis sativa
aattaaatgcaacaactcttggtttgattacatatgtggtacattgtctgcagcttgatcaagtgatcattgaagataacaaatcatttaataaggtggcagaatcttcattgcagcacagaagaaggttatttaacatgctattattagactagagaatatatcttgaagtactaagtacacttaattatgcttgtgggccatttcatttactctattaatgttagcttaaacatatcgcaatattaattatagctttcaaatatgaccatcaattacttgcctattaaatacctctattgttctaccattcaaaatttgacaaatcaacaatagttacataaatttcccctctcaatctcatgtacttatttaaaagcacatctccatacataaatggaaatgatgattcgtcaaatgttaagtggtgagagaaatttggacattgaagatttctttttatttatttatttattttgaatgggagactgaagatttccatccattctattctatatgtgcattcttttatggtatacttcctttcaacatacatacttaaagaattaataatagtaaggcactaaccgatgaaaactcaagcatggctctcaggtgtttaggcgtgagttgtgtgcaaggagtgtgggctaatttaacaaattgatgactgctaagtctaggagggttcatggtttggtttggtctggatttttattttttttcgaaccgaactagaccaattaaatgctcaaaccaatccacttaagaacggataggtttgtttcgaaaccgtagtttgtaattcataaatgttttaatattttttactgcattatttttacttaaagtttataatacgtaaataacaatgaaaataaatattcttaacacaatgttaaagtaattatcaatattatacctaagattattcataaatatcaatattcaataagaaaatcatatcaagtatgtatcaagaattaggtggtttagtttggttttaaccacgagcaaaaattttaaagctgtgactgaaccagagaattataaacagtctggattgaccaaaccattgacactggattcatttggtccgttctcaaatagtttggtccggattaattggggtttggaaccacgaattgcaaattatacaaagaaccctagagtgctaactctttcttttaaaaaatatttatagaaagctatgaaaacatgtaatcaaacctcaaaaattggagtacaaaatccaattgactgatttacagattgttcccttattttccctctgattctactaggaagaaaaagtagtgcagtttcctatttctgaaattttccatttttattttattctcccctaattttgcctctaaatcaattgattagtttccttttcttttgagccggagttttcccctcaacactctacataatcattgtagcccaattttcacaagttcatagaattaattatcttttgatattccttctatcatcgcaataatcaacacgcaatgcccattatcaaaatcaatcattagtgaaaaagttatacatgaagagaacatgatgccataatgtgcatccaaactgctggacacacaaaaagaagagtgaaaataaagattaccactaactagttacctattttaacattaaatcaaacaaatggtagagaagaaatgcgtataattaacttaagactgaaaaaagttgaaataaaataataataataattatctttattcaaagacaaacctctcagtaatgacatccaactgagtctgggtactgtaaagcaatcacttcctctacaaatagcagccaggagcacaaactctctaatttctttgcaaccccctaatatctaacagactgcaaaaagagaaaataatgtcataagataacactgctacaagagtccaaacaattcaattattcaaggcccaagtgcagccatgaaatgcac

SEQ ID NO: 43958 - DNA, 8913 bp, Cannabis sativa
ttaaacataatcatgaaataaatattctgaaccatgcaacataaaatgcagtttctaatctttattaattagtaaatctgaatatattgaaatgtgttttatttagggcacaaaacccaatgggaagacccaccattggcccttcccaatgaaggaatgattcatgggcgatagcccccaagaacaacaatcacatctcgtctctaatattatgctggatagacatgaccaggagttggcaagcctgcaatcggcgaaccccatgtggacttgggagaagatttcgagttagccagactcagagaagctataggcaaagccagcctaagtgaagaacgatgtattgctgattggaatgtattcgttcagtacggacaaaaattcttgagatggatggatgaccaggagtacatccttcaatctcatcaagcagagttggatcgccacaatagagaggccacactgatggaagaggccagaatctcatcagagatttacttcaaggaagactcgtggatagatcaaggagggtctatcgagaagatgaccaacctagttcctcagggactaggacagatcttcccttgctagagggaggacagaccttgcctcaaaggtctaatagtgacaacagctacatttcggtaatcagcaacatgggggctcggctaaggatctctggctcaacagcatccccaaccatgtagcctttagctgaccagccatctgtaggagactccttggccgacttgaggacagcactccctcgtcgagggaagcaaggcacctaaaggtcattcttcaaccgacaaggaccaggagttggtggaaacacccaaaatggtgatatgagaagtgaaatttatcactttagacacctagatccaccaaactccagcaactggtgtgatctacctcctgtcaacacataaccaactatagtcaactgaggagttatgggcggccagaccctaccctttgcaggtctagccagccatggaggcattacgggttgccagaccctgccctttgtaagtctagtcggccatgaagaagctatgggcaaccataccctacccaattcaggtctggccaactaaggacaacaaccaagtgtaagcttggcctaccaaagccaacacctgtacttgagaatggtcagccagagtctacaattcaacacaagtctagccgacttcaccatacactctcttagagtagggccgaccagcccctatctcactagaatctacaacccctccaacgagggccagtcagtcaagtccccacaacaatagatccttctatccaagcatagttggacaaattcagggacatgattcaaggcatagctagtccgaagccctcagatcatgaattagacaggtcaaggggattaccattctcgacatacataaatgtctagctgttgcccaagttcaagatgccggtatggaagatgtataccagacgagaagacccattagctcacatcaaatacttcgagatcaaactcgatctccaaaaggttactagtaatgtgcaatgtcgcatattcccagccactttgtcaaaaacaactcaacaatggtacttcaaaatcaccctaggaaaattcaactcttgggcgaagacctctcgagaattttacacataattctcatctttgagacctataccatcacatctagaagaccttacactactaaaaaattgactttttccaaaagtttataagggggtcaattatgaaaactattggaaaaggtaaggagagattttttccaacaatttagaaccgaaataaagaaatcgttggaaaaggccaatatcaacggtggagaaccgttggcaatactaaatggaattttgtaaacaaaaacagtaagtgccaacagtttataattgttgggaatactaagtctacccaacagtttggaataccaagtatacccaatattttataactgtggagaatactagtattcccaatagttataaaaggttagaaaatgatatttttagtataccaaaaaaaattgcttaataaaaaaaatttctatttaataaaagataatactaaatataaattttcaaagtttttcttttttttttaaaaaaaaaaaatttgtagttttattttcttaataaaataaatttgtatttaataaagtaaaatgctaaaaaaattataattaaaaataaagaaaaaaatcttaataattaaagttataatttaagaatttataaaattgagaaatttaaaatttatatatttataattagagaattattttatatcaaaatttattttattttagataaattaataataaaataattaattgagaggtgaaaaaaatataatattatattagaattgatatattttttaaaaaaatttagaatgaaaactctataaaatattaatttattattttatttttatacaacacatttttaaccatatatattttcttatttttattaaacaatatttttttcattcaaaaattaaaaaactcctaccatatttttatctcaacggcatacatacctaaccctattatcacattctctcattacaaactattctcaaagcttctctctatctcttggttgcagtgggcggtggaggagatctctcttgcttggagtgggcgatggaggagacgaagacttcaaagggcggtggaggagacgacgacttctcttcgtgcagtgagggttggatccgttagcgtcgtggtcgacttctctctctcatgttctcagacgacttgtctcttcgctccctctccttctcgtcgatctggtatggcgacgacagtttatgtggtctcgttgagctcccactcctccgcccctaaactcgtgtctcctctcctccgcgccctgaagtcgtgtttcctctcctccactccctgaaattggctctgagcataaaaataaacggaggcgcattgctccgcaactcatcttcgctaaacggaggatggctgtgtgaagatgcaattcgtatatatgtattttattgtttaaaaagaagtcactttatttatttatttatttattcagaattgtatatatgtatttttctgaaatatgaaaaaatttcatattataagtgtaataaactcttattttgtatttgttatatctttaatgaattatcatatttaaatctaaaaatatattaattatatttattttaattaatattatttttgatgaaattaatactattatatatattaaaatgtaatttaatttaatttacataatagttttgccaatatttaaaacagtactttaaagtatttttttccaacagttttaaaccgtcattgaaagtgactttttccaacaattataaaccgtcttttaaagttttgtatttttatgacacccacatagctaacgattttaggaaccaattggaaatagtataaatgacagttataaaccgttgagaaaaactaattttgtagtagtgttatcgaagtcaaacaatggcaaggagaacctcacaaggatacatccaatggttcatggtcgaggctacaaatgtcaaaggccttacagaagaggactgatatacaaccatattaggtggcatacactcattgagtgacttctggaaagcatttgaaagatctcaaccaacaacatgaaagagctccttaatagagctgattaatttattaaacttgaagaagccatacgacagacccagagggggcttctcaacaataggcagtcacgagacatcctatagtttcatgacctaccaggaacacaggcagacaccaacaacttagcccatacctctagtggcaagaacactagaaagaagtgtagcaccaacagctttgggaggaacaatggtaaaaaggggaagtttaacacttctcccatgccacagaagaacaaggaggagaattatacctacttcaccctcttgatagaaaaacttgagggcatcttcatggcgactcagggaacagtccccctacccaaagccctttcccatcaaaagggacatgagcaagagggacatgtcaaagttttattagtatcacaacagcttcggccatgaccccaatgagtgtcaccatttgaagagggagattgaatacctcataaggcaaaataatcctcacctgcatagttatgtggagaatgactaaactcaagcacaaggtgcccatgatggagatccaatgccaccaccagtggtaggacacttaggtgtcatcattgacggacccaacattataggtgagaccagcaaagctagggtgcactacgcttagacactctgtcacgagccaaaaagcgacatcctagctgttgaagaaaggggctataagtaatcgaagcttatagagcccttaatttccttcacagaagacgacggtgcttaggtcagtttcctacacaatgaccccttagccattactgcacaaatcggtaacatgacagtagcaagatatgtggtggatgatggagcctcctttaacattattgcaagttaacatatgaaaatatggggctccagctcaccaacctggcgccatgcaatcaattgatgtatggcttctttggccaagtcataagacctgtcaggtacatcagattacccatcacagttggagaaaatccaaccaccagaaccttgatggcacaatttgtcataatcgacattccatcggccttcgacaccatgataggctgactagccctcaatgacctaaagacggtcacatcaatgtaccacctatgcctcaaatttccaataaggcatggggtagtatgcatagggagaccaacagtcttcccatcactgttacaacttggctctatccaaagccaagaagaagaagatgaccactaggagctttgaagaagagcccagcaaagggcaatgaattccagcccaaagcgagtacatagacatagatcgtcgctatggggatcctgcaagaagctttaaacctgtagaaaagtttgaagaggcataagttgatcccacttttccatgaagaagactaaagattggtaaaggtttagtgctagatattaaatcaatactgataagatttctaagggaaaatctggacctttttgcatggtcacatggaaatatggtcagaattgacccctccataatgacccatgcacctaacattgatccaagaatgtgacttgtccaacaaaagaggaggttgctggataaggagtccgcctaaccgctcaaagacgaggatgagaggctacgaacccgtgacttcataatagaggcattttatcaactatgggtatccaacccagtagtggtgcccgaaaccaacaataagtggagagtatgcaacgacttcaccaacctgaacaaagcaagtccaaaggactgcttttcgcttcccaaagttgaccaacttgtggagagtatggacgcgtattcaggttacatcaaatgaagatgcatccaccagatcaggagtacactagcttcatgatagatctcagcctgtactgctataaagtcacgccctttgggctgaaaaatgtaaaggccacgtatcaaaggctggtgaacattatgtttaaagatctcatcagctcgaacatgggatgtatattgacgacatgctagttaagtccaaaaaaggctaggagcatgtggaggacttagacgaatgcttcaaaatccttcataactacaacatgaagctcaaccccctcaaattctcttttagtgtaggctcttgaaaattctttggcttcatagttaacgctaggggaatagaagcaaacccagaaaagatccaagcccttttggacatgaagtcacccataactatcaaggaagtacaaagcctaacaggacgcattgttgcattaagtagatttgtgcccaactctatagacaagtgtgtacccttcttcaacagttttaaaaggcaactgaaaatttgagtggatagaggaatgtgaaaatgcattccaagagctgaagaaacaattgtctcaagcacctatgttgtccaaacccctagactatgaagagctaggtgtgtacctagcaatcagaaaacatgttgtgagtgctatcctcacaagagaagaagacagtatacaacaccatgtatactacatcaacaaaaggctaatcgacaccaaaactttgtacccactcatggagaagctgaattacaattttctcttggcttccaaaaagctaaggccttacttccagacacaccccataaaggtgtacactgatcaaccattgcagtaggttttgtagaaacctaaagcattaggccgactactctaatgggccatcgagcttgggtagtgagatcacataccaattgagaacaaccataaagggtccagcccttgcagagttcgtggctgagttcacaaactcatctcttgaaatctctcaagattcaagagaaaaccaagagccagagaagaagcgagagtaagagaaccagtcaaatcctgaagagctgacatggaaactccatgttgacggaagttgtcatgaccaatttcccagtttaagcattgccattataatacctagggggcagcaatcgtacacagaaataaaatttggcttcaaagcctcaaataatgaggctgaatacgaagccttaatagccggcctcaaactggcatatgaagtacgggcttaccacctagacaaattcagcgattctcaactagttgtgaatgaagtcctaggtgaatacatagcatgaggtgaaaaaatggtggcctacttgagcaaaataaaaaacttactaagttagctcaaaggctacacaattaggcagatccacagagagcagaatcctacagcagatgcacttacccgtctggcgattagcaccattaatgacaagggaaatttggtggccatagagttcctaaaggaacccaaaattaccttccccgaataagtcgacatattggttgacacttcaacatggatgacacctattgcagcttacctttaaactagagccttgctagaaggtaagaatgaagcaaataagttaagaagaaaatttgctaggtatctaatcctagatggagtaatgttcagacggagcttctccatgcctctcttaaggtgtgtcaccttgagctgtgtaatcaaagtcgatgtccagcggctaatgatagaagtgcatgatggcttttacgggaaccatgctaggggcgaagcctatccaagaagatactctgacacgggtacttatggccaaaaatgattgaggactcgatggactatgtcaaaaaatatgacaagtgccagagattctcgaatattccaagagctctatccaacaagctcacaatgttgcagtctcgttggcccttccaaatatgggggataaacctgattggtcaactcccaaagggaaaaggaggggtacagtttgctgtcgtcgtagtaaactacttcaccttgtgggcagaagctaaacccctatagcaacaatcacctcaaaaaaaaaagtccttgactttgttgtcaagaacatcatatgtcgattcagacttccttagaagattgtgtcagacaatgggaagccatttgatagagacatgttcactaatttctgcaacaagcatggcattgtaaaaagcttctctaccgtggcccatcctcaagcaaatgggcaagtaaaagttgtcaacaaaacccttaaggaaaccctaaaaactcatgttgaggaagtaaaagggaactggcctgaattgctcctagacgtattatggtcgcataggactacctagaacacgaccactgggcaaactccattctctctagcttatggctatgagatgatgttgcttgtagagtcccttgacaatgtagaagaaagaagagatcaagacaaccgaagctgtaagcttgccagcaaaaggtgccaaggcacttcaacaagcatgtcaagaacaggaaattcttcataggagacttggtgctccaaagagtgttcttgaacactaaagattcagcagcaagagtgttgagactcaattgggaaggcccctatgaagttacagagaaaactagtaagggaacctacaagctaggaaggtacaacgagaacatggagcttgttctccaacgaagatattggaatggacagaaccttcgcaaatactatcagtaaccagcttacaaaacactactccaaagtagcagttctatctactcaacattagagtacattagcgctagcacccatgacctctttggcatggtctcccaccgttctttaacagtggcgtcgattatgcaaggcaagcaagggtagccatttgacatctagaagctaaatttgtgtaatgtatgcttgaactcaatttatgtaagttgcacaacaacaaagaccaattaatgaataaaaataatgtttatgttctatttattgtgtctaaagcacttgctcacaacattaacttcttaaagttattattttagttccacatgcatacaatgggcagcacaccaagaaagaacccaagcaaggtctgtgaatcttggtgtatagcaagtgagcaagagactagtctgcatggtcacttgggcggcacccatactgtacaatgcatcaaactagcacaaagaacttatgcaaagaaattttaatgcttaaaataagctactaaacttgcctttattcatgcaagaataatttggcttgacaaagtaaatctggatccttacatgtcaaggccataagaagatagtcaggattaaagattgcctggtcagtcacgcaatccatgataaaaaagaaacagggccaaacaatagtagtgtttaaaaatagggccaaaccctagaaactctttcttaacaattaagcccttgcttag

SEQ ID NO: 43959 - DNA, 2036 bp, Cannabis sativa
  modified_base (1936)..(1944): a, c, t, g, unknown or other
atttccattacaggaaatatatgcaaattttggtattaatatttttattatttttcctatgtctatggtgggtctataaatattttcttgcatattgtgtaataatttctgattttttaatatacagctagctaccttcaattcatttacaattattcctaactagcaattaaaaaaaaacataaaagacatttattaatgaattaaattaaggtactaaatccatttagggtcatcgaatcagctggtccataaaaaagggtctttaataacatttattttttagatttggttcaatattattataaatattatatatagagcattgctattaagcattgtccagtaccttttataggtgacaccttaaaattagttagcgatattttttaaaaattatttttttaagttatatgagatccgctacataattacactaataaaatataataccaattataaatactaaaaaaatttataaaacaaaaaaagtactgaaaaaacaaattatcaacaaattaagtttcccgatatataataaacttaattaccattattaataacattatttcattttttattattttttatttctttatataaatcaaatttatataacaataccaaaaatagaatttttattataataaaataaataaatatatatagtatatgatgctaaacaagtttccataaatattattaatttatgatgatgatttttaaaaactcgattttgttttggattggaatggattaaatgaatattttgatctaattgtagatataggcataaacgtgcaacttattattataagtactactctctagacattataataatcgatattcataataacaatacataattaataataatttagattcatttacatgcatggggaactgtgtgggtgtgttgaaagagttccatcagtcatcgtcgtcgacgacgtcagatccgatgatgatagatcatgatgatgatgatggagtcaaagtcaaagttatgatgtcaagcggcggtgtaatggagttctatgctcccataactgtcagctcaattatcgaggagttccctggccacgccttattccgtcgaaaccctaatagtgacgtgatcattcctaatccactcctccacgacgagcgactcaattctggtgagctctactatcttttgcatcgtgatatcaccgacgtaattaataataataataacaacccttgtaagacccctcaaaatatatcataccgagtctcatcttgtgaagatgatgactcgggacaagaaggaaagaagaagaaaaagaagaatctgataacgagaatgatgacaaagttgatgaagaagaagaaaaagggaaatttggacatttggaaagtgaagttggctataagtcctgaacaactatctgaggttatgtcccaaaattcatcccttgaggcactaattggcagtgtacggatggtggccaagtgtagccctactacatccacttttgccaactctagtcaatgtagtgcaaaatcagaattagtattagatagtaagggagccaatagtgaaaaacacatgtaataaggtgactagattttggtgattaacctattcatgagtgatcatcaatctctattcatgattatttctcatctttagtgatattttgcatgatagtaatgaataaagaggaaaaatgaaataagattattattattggaagttcattatattaaatgaagaacattttaagacatgcattgttgttttatttttcatttatgatgtaaaaagatggataatttgagattcccaaaggacttttaattagggctggttttgagttaatttagaccttagaaaaataatttttttaagccctttttataacaataaatgatatttttaaacattattaaaaaaaatatatatttnnnnnnnnntttttttttttttaattttggcccctaataagagtgaaccctaatcgcaagcctagcctactttaacttagggctgccgtacttttaaccta

SEQ ID NO: 43960 - DNA, 1893 bp, Cannabis sativa
ccggtagttaggggtaagaatgaaacaaggggcaatagaagaaaaaaccattccaacacataaagagaaaaaaattaataatttttttattatttttttatacattttaaattttattccattctattcttattcttattctcatcctcattgttattttaatatttttattcctccaaactaaacgtgacaatatatttttacatatgtaataacttaatgatgtgtttgtttggtaaaaaaaattcataaatatgagtgatgtatttccaccataatatatgattgaatgtgtacggagaatatttatatataacacaaaaaatatgttggtactttgaatttgtattttatttttatgagaataagaagtacttttagataatgagattgattgtacaaagccattaaaacaaacaattgataatgaagcccataatacaagcctttgttggagtatggaattctcctcccacacaaccaaacatgggatttatttatttatttatttttcctaaaataaattaattattaaataaaaaactttgttattgggtacaaaattttatgtcattcttattattattggttattaaggtatatagcaccatactttcaatttttaagaaagtgcatggatcaaaataatggccattgactttatctcttttttccatgtctatatgttgttgttgttgttttttttttaattattatttatatatatatttaataatattatttttattcgtccacaatacattaaaaatatatataaatataaaataatactcaaatttttttattggtgtagaaccaatactataagaatagaattttagcacactacataaatatctatatatattttaccattataaccattacactaaacttataacctaataaataataaatataacattaatatatataaaaaatgttgtaattaaagctggaacactgtaacaccacaccatgtatatattttttatgttttcccagaaaataatttttgaaaaaaaaaaatcatatttttgcacaaattgtataaaatgtgtaattttcactaaaaattgtaaataaaatttcttaaagagtttttaatttttttatattatacatatttttttgtgaatcactctttactcaaatctttatacatgacatgtctaattgtctattgttccatatgatctaaaaatctaaatgaaagtgacaaaaacaacaaattaaattaagattttttttttttattattttattttaagagaagtcattactagaggatgtgacatgggccacacgtcaaagaggcctcaaaagagagaaagcccattatttgttggtctgattgatgacgtggatgcccaaaatgatgaaacacaaacaaagtctcttaatccaatatccaaatgggccacgtcagcaaaccaaagtgggcccaaagctatcactatcgtaggtgcagacatacagtattgtatgagctggatctggtaggaggagagggggaccatgggcttgggccccaacaaaggcccaattgcaacacttgcactgctcgaggtctccaggtggaagaaagaaaggagtacacgtgtacggtggagattgatttatggtgggagctagagaataacaaagaagatcttctttgtttgttttgttccattggggctgaatcttggaaaaatcttggaattttgtgtgtttttttttttctttctctgaggatttcgttagacctgtctagtgtcctatgggacattttggtttgtggggctaagtttttttttttttttttcaataaaatataatataaaaattataaacattaatgtatataaatataaatcaatgtttaaaattattaaaaataaacatgataca

SEQ ID NO: 43961 - DNA, 2291 bp, Cannabis sativa
atgcaatttttaatgacccccctaatggagatgcattcatttttttaatgagggttaggttcaattcatgattaaaaagggccccattagatttcaagaccttccacataaatatttttaaataattaatattatatctcaaaattaaagctagaaaaggcctatatatatatatatatatactcattgcagtcacaactataaaatttaaatattgtgaagaatataaaaatactccatttgctgaccacccaatcattaaacaacataaataaatagatgaatattattattaaacaaatattaaatagatcatgaatattaattaataattacagctcatcttaatgcatatccattgtgtttaaattttaattacggcaaggcccatggccatgtatgtaagattctaataaaagaattttattacggccaaagccaggccatgtagttttgattcctataaatatataaatatttatatatgtataaatatatatatacacctatatattctcaattatatagctttattaattataaaaaaaatgggaattttagagagagaagagaaataatcacatggcaccatgagaactttatttgaaattatattattattaattacaaatagctagctagaacatttaaaacaaaaaaatatatattaaaaataaataatattttttgtcaatctattaataggaacacaagaaccttagaaagattttagaagatcttcgtttcaaaaacttgttcttaattttatttcatgtggagaactatgaatctttcactaatatcaacaatggtatacattaatatatttttgtggatggaatatttttttaacaatatataataattttgtatctttatatgtttggatatgtaatgatatataagaacccaaaaatcttatgaagtatatatgattgttaaaatgctcacattatttgtgtatatatacatatataattatattaatgattacttgggattttagtgggcattaatttataattataatttatttatttatataaatatttattatggtcaagatcttaagagtaagatcatgaattgtcgtatttgataaaagggtttcatggagtgtcgtatacagcttaattataatttggagttttctcaaattaatattaatattatttatttatttatttcctaaagctacttaattattagatttgtttttttctttttgttaattttctttctcaatattattttgtaaaagttgatcaaataattaatttacaaagatctaatatgtttaatcaatgaataataattttaattaaaaccaagctaatcaagtgacttgatagattgattgattaaaaattactattaataatgtaaattaataatttattatattcgcttctcttctgaaaatagtactttttttgtggggtaaataatttttgcttttgttttaatttatctatttattattattttatggcaggtggcatgatcagtcaaattaaatgtggggaattagcaaaatcaaatgagatttttgtaatatttgtttaattaattatatatgttagctataattagttgtgtaatccaacctacctaactactacaatctgttaactccatcatataataattatattaattaaaaacctccaaaaaaaaaattagagatgatacgtagcatacatatgtaacacacaaacaaattataaactattaattaattaatgtgtttatacatttatgtttgatataaatatatatatataagtgaatagaatatgtgttgttaatttattaagctttaattagggcattattccactaacttgtcacaaactacaagagaagatatgatgacaatgctagttatatctactttgatgttgatgattaagattttcgagtaatacatttttattttcttctttctattttattagggttgagaaggaatattggaaaatggggttagtggattgttaaattatataaactacatattatttttggctttgtattttagaaaaattattgattcaaatttttagtttgttaaataataaattaaattatatatatttttttcaaaatattatcgtcaatttttttaacataaacaaactgaagtcaatttctagttcaaaatgaaataaaaaaatgtgaccaatattgttaattataacattacattattattaagttttattttgataaaaattaaggtgccgtttggtaacatttttttaatcagttttctgtttttaaaattaaaa

SEQ ID NO: 43962 - DNA, 3537 bp, Cannabis sativa
  modified_base (3468)..(3478): a, c, t, g, unknown or other
accaactaactaactaacataaccgaaagttagttaagttagttggtttaaggagttggataataagttggtttagaggatcaatttccacaagttaagtaactctacaataactttaaataacaagcatagataaaagcttggattacaagtagtatgcaaattcttaaaaagatgcataaaaagttaggttcttaggaaaaaaaaagttggcaggagggtacgggttgaacccaaactcgagcatttgtagaaaaccaactcaaacctgcccgatgaaaatgagcgggttggacccgacccgcccataaggaacgggttttaccacacggcctggtttggttcgagcgggttgatcaggtctggtcaaacctgatcaaaatatcccgtcttagtttgatgtaactattgaaacatcctccatatatatatatatatattgtaaggtttctttattgacaattaattgtaaataagtttttatgcacgtataatgtaaataattttttatgcacatataatgtaaataatagtgaaatatataaatttataaatttatcataatttatttattaaaaaagtctgaaatactttaattattattacttatattcaaaatttgtgtatacaattaaatgtagttatattgtttatttagattggatttaaaattgaggtggcaatcggaccttcattgagacatgtatgtgttgaagcaacaaaaaaaataaaagccagtactgtcattcttaccaggttagcaatttgttttcttttaatgaaatttttatgtgtacctattaaattttaatttgaaaaacataattttgaaaaaaaaaaaattaaaatttggttaaaatattcacataacattttatgatagtaattattaagaaatatatattatatattgatgactaaatataagggaaaacaataattcaatactttaataaaatatggttaagaagtttgtttgataaaaaaatgagagtctaacaaaatagttgttatggtatgataaatgcatggaagaaatatagggaaatgaagaaggataagaaatacttgttggaaaatgttcaatgtggagttttaaggataaaaagcaatggaaaaattgaagtgttgcaattcccaaaagaaaagacagaaagagtaagaggaatgagagcaaagcattattcaacaatgatgatcaatgaacacaaggaatcatccccatcatcagcatcatcaaccattgatgaacatgatcttttcagcatagaaatttagcatacattatttatgatgtttcaatttgatttgttgctaattatgtaaatgaaaatactattatcaaggtcgacccttgaactttaatgggtcataaaactcgtatttgaaaagaattatggtatgtttaaaataaaaaaagatatgtgtatttttaaaaaagatttatttttagtttctagactagatggactctaggcacatgtctaatctgtttatatccaaagtcagatctgactattatgtatatatctgtatatgattaaaataagagaaaattacatgaaatagttaaaaatattttacttaaatatgacagttttaagtttggctacatttttttttaatttttgaactttaatatgagtttgattatttatttaagtaaatggttctctaaaatcccatatctaaagttctaacagccagaaccacaaaaacaatggttgtggcttgtcctattcttccttcgtctctgttaagacagttagttagttgtttgctgtaacagacttgttagttagtcctttacgattatttcacttagttatgagcttcatgttgtatatatactgtgtactcgttttcattcaatgagattctctttccttctccaattctttctctttgctctttctctgttctttcttttttctttccctatcgtatgttattcatggctcacaactttaacatggtatcaaagcactttcctctgctcaatgctaacatggccactgttggtgctgctgggatttccaacaatggatcgtccttcaatggagctcaagctactcaaaccagagctcaaccttctcatgaaccagtgtacttcaatcacagcatctcaattcaccttaatgaccacaattttctcctgtggaaacaacaagttcttgctgccattcgagggaatcaactcttgaggttcatcaaagaaccaccaccagctgagttcttgactgaagaagatcgtgttcagaatcgagtcaaccagatcttcattgattgagaggtgcaagatcaacttttagtctcgtggttgttgtggtgcatgtcaacacttttactttgaaatctacattcagcactggtggtagacacgtgatttcacatcgatcaagacttcatccttctacattagaagtattagtatgtacacaatagtggttgatgattgaaaaaaaaggtagatatcatttaacaattgtatatatatttatttctttattagaatttatttgttttgtttttttttttataaaagaacagtgatagtgaaaataatgatgttgatccaaccatagtaattaattaatttttttgtaatttatcaaacaaattagcagtttttattattaatacttttctcagtttttaattttttgtaggaaccttacgtagttgatcttgatgattagaatatacattattttttttagtatatgaatgatgagggcatggatgagaacaaaatagaagtggaggaaaaaatttagtgtttagtgtttgagtttatggttagtagttattatcgatgcaccaatattgttaggaacaaaaatttaatctcaaactttcttattttatgcataattgaatcattaattttcatacaaaaaaaaaaaataataagatttttatgatagtgtgttcttcatggctcgcaactttaacatggtatcagaacactttcctccactcaatgctaacatggccactgttggtgctgctgggatctccaacaatggattgaccttcaatggagctcaagctactcaaaccagagctcaaccttctcatgaactagtgtacttcaatcacaacatctcaatttaccttaatgacaacaattttctcctgtggaaatagcatcaaagaaccacaaccagctgagttcttgactgaagaagatcgtgttcataataaagtcaaccagatcttcatcgattgggaggtgcaagatcaacttttagtctcgtggttgttgtgcctatcagtactattactttggaatctacattcagtactggtggtagacacgtgagttcacatcgatcgaggcttcatccttctacattaaaagtattagtatgtacacaatattggttgatgatttacaaaaaattcttaacttttttacttttttattatggggtagaatatttttcaaaaatactgtataagttnnnnnnnnnnnactgtgttaagtttttacggttgtgtcatggttatgtttttgttgttttacggttgttt

SEQ ID NO: 43963 - DNA, 2571 bp, Cannabis sativa
atccatatacatgcaagcttttaatttgagaatgaacattttcttggactagcttctcttgatcagaaaaaagggctttactagccatgtctatgatctcctctacatctgcctcctcagcattctttcccaaacgattgtagctgaaaaatacatataaaataaacaaaaaataagaaaagattcaagaaacctaagaaagaggcattaatttaagagcaaatgtgatcttggctttgaattcatgagaacataattcagttccccatcaaagtccactcaaaagtctatttggttaccttaccatataaccaattcaagataggaataatggaaatgtgagtttgataaacaaaaacataaagtgtgagagataaacctggtgtaaaggaacagtctatttgtgtctgaatcatattgcagcttccttgggtccctagcaaatgttggatttttcgcaagagttttcacaaactgaaaattaacaatttgaactcgaactatcataaatgaaaagaattccacaaacccaaaatcagtatcacagtttgatattgtactttcaatattttcagaaatttaaacatttcagtaaagaaaaagtaattggcatgtttttgttacttatctatgagatgtcaaacattaacaacaaacccaaataagcaattcttttattcaattttcgggaatattttgcaaacccatgaatgcattttgcttgtaactctgtgaaaaatgttgataaggccaagccaagcatccaaaaccataaaaatcacttctttcatataaatttatagttaaccaaccatgaaaaacaaaggtaaaagcaatttcagaaataacaataacaaaaagcttaagaaaaatgaaagatacctcttgaaattttcgaaagagaaaagccatattgagactgtgagttaggctaggctttttggaaaaatgagtcactttcacctgctgttagttacattcccacaaacttgcaaatgagactcactatcatggaacagaataagagtgaatacagtttgtatgagtgataagatagtcaataatgaaattataattgttgcccagtgtcaaagaatactttcaaagtcccttacaaaacagaaaaagtactttcagagttattccacactcacttcatatgatcactttaaactggaaaacagcatcgcattcctctaaaaaaattatcattttccaaaacaaaaacaaatcttttagatccttattgaaacccaccttctttagtgtcctaaactgtaaaacgatacccaattgataaatcaacttaataatcaaaagaacagaggtgacactaaacatattccaatgtttcaagtctaaaacatcttaacctaattagtagatggtgacaaaagtagctctaaaattaagagagagtagattacatattgtgatttgtgagtataaaaaatgtagcttcttatttaacaattttgaataaaatctccatcaaatgcttgtagcttaaaatactccataaaaataaaatttcacaatccagaaaatgataattaaaaaattcatacagagaatatacatatacatataaacacaagatcaatcctttaactcagtgaacattctcataagacaaaatcaaaagccccaaatagaataggcctgaagtgaagccatacatacatacactaaaagaagaataggtccaagaaaaaaacaagtagaaaaccaatcatacataatttaactatatagcattagcagagagtctctccaagtaatgccccagataatttccaatgcattaataaatttttgtataattactaactccataaattaaaattaataatagtaagtttacacatttatagatatatatactcgtatataatacctgggaagatcgaggattgaggattgtgaaggaagaggatgacaaggaggactatgcagagtgattccggcgaagaaaagacacagagaagacaagaaagggattagcaacaccgacactcgagaggagaagagaacgactgggattctaggcgtttgggttgctatccacggtggttcatcttgggcatctgggttgcggtcaacggtggagtatctgtgacggttgagatgtggtttcggagatttgggattctgggtactttggtgactgagatagggagagggagaggttatagggtctcgtcgttcggggtttcaggaatctagggtctcgtcggtcggggttttgggattctaatgtctcgtcggctgcggttggagcttgccgccggaaagctggtgttggtggctgccatcgaagaaaaagaacaaagacgaaatgagaaagaagaaaagaagaaaggaaaaataattttttttttctaattttcatttatttttaatttttaaattagcccttttactatttttaaattttttttttcaaatttacagtttctccaatagtttctacagcgattgttatgcgtattttaattgcgatttacattgctctgttaattcctataagagtttctatgtgaaatttaataaaaaaaaaaaaaaactatt

SEQ ID NO: 43964 - DNA, 838 bp, Cannabis sativa
tcaagatttgagatcgagtgctgctatatgactcattcaatctaactagaaattcaagaacacgatcttcttcctggtattcttggattgtcttcatggcaccacaggtacatgtaggttgtgggcgatactcttgaatcatatcccataaggacttgagttgagtaaagtaattagtaacagttttagaaccttgagctagagattgcttcgtacgtataacttcaaacacacaaggagcatttttctagttgaatctttcctcaagattagtcctgatgtgtgtaacattgtccatataaatcacactttcagcaatttcacttgaaattgcgtgaaaaatccacaaaatcacaatgttattacaacgatttcatagttcaatatcatcatcatcttattcaggagtaggaagttttccattgacgaacttgagagccactgtcatggcttgacgccatgaactgtagttctcacaacctgtgagaatctttagaaccaaactagcttcaagatggtcattacttgactggaagtaaggatttcgagcttcatcaaagtaggatcgaacgttcgaatccaaaatagagaatcaattaaaactcttcgatgagcttcgagtctgaataccaccaccttgagccatggagaaaagaagaagaagaaggaaggagaagtgctctaataccatattagttgcaaaaagaaaattgagaaaaagaaagtattgaaagctctgtatttgattgtattgattgtcatgtaaagatacacatattgataacaaataatcgtatagaaacccctattgtaactagtgctgcaaccactttagaaa

SEQ ID NO: 43965 - DNA, 2042 bp, Cannabis sativa
aggtacccatatgaagcaattcatgtcatcacaaatgatggttatgtccttctcctggaaagaattcctaggtataatttctgtctcattctatttatcatttgatatatagaattctgtttacaatgttacttgtgcaatgtcatgcagacgtgattcgaagaaagctgtttatctacaacatggaattttggattcttcaatggggtaagtccatactagttcccacaggtgcaaattatgttctagggtgaattggccatgtggtccaggtttttcatttaagttgttttggttgaagagaaatcttcttgcacactggcacataattttccattctacaatctacatatcttgattctaatactaaaactcctatttatgctgaggaacttattaaacccagtactgatgatgccgttcaatgcactagttcacagtgctccccgtgtctgtctgtgagtactgattcttggttttctgatgtgcttgatgaaagaagagattgaaattctacccacaaattcaagatacaataacaataataaaaaagtgtcaaatcctatttggagtacatatcaaaactgttattgaacatcacgtgtacaggaaatgtgtggtttgacctttctcccaaaatagtcgagcaacctctattcttttatgcagttggtttattctcatcgaccctgatgttgagaatagcggaattttctttcacacagtaactataaagggattgttatggtcatagagttgatgaactgtttgtttcccagcaccttaatgagtcctaaattctcctagaatagtatggaagcccgagtcttaagaatagtctgatgactattgtttgttatagctcctttctaatgtgttacatatgttgatttcagctgggtgtctaatggggttgttggttcaccagctttcgcagcctttgatcaaggtctgttatcttgtaaacttcttatttttatttgtattattcagcagctatagttaaccatggtgttcctccaccataagtgaggttccctaataaatttgggaggaaatcagtctaagacaagtgatctcggtctcttctttgtttatgtaataaaatactataataattgtactaagtatttactttttttttcaggatacgatgtattccttgggaactttcgtggtttggtttctagggagcacattgacaaaagtatttcattaagacagtaagtacatagggttattttctttcatgtgcaattatgttttgcatagatttttgcatcttcaaaatggtattgtcgaaaatgacaaaatgatttttatgcagatactggcggtactccattaatgagcatgccactgaggatattcctgcaatgattgggaagattcacgaagtaaaaacggctgagttaaaccttagccaaccaggttctggggaagaaacaagtgatgaacagccttacaagctttgtgcagtttctcatagtttaggaggtgcagccatgctaatgtatctcataactcagaggattcgagagaagcctcatagactctcgagactcattttgctgtcccctgctggtttccacagcgattctactctagtattcacagtagtggagtatctatttcttcttctggctcctctcctggaaccttttgttcctggattctacataccaaccaggtttttccgtatgcttttgaacaaattagctcgtgacttccataactatccagccgttggaggactggtgcaaacactgatgagttatgttgttggcggagacagctcaaattgggttggagtattaggattaccacattacaacatgaatgacatgccgggggtatcatttcacgtggcacttcatcttgcacagatgaagcgttctggaagattcagaatgttcgactatggcactgtagctaccaacatggatatatacggatctcctgagccattggacattggcgagtactacagttttattgacatcccggttgatttagttgcaggacgaaaagataaggtgatt

SEQ ID NO: 43966 - DNA, 1317 bp, Cannabis sativa
atctataaaaaagatacctgagtataagtcaaccaagcctcatcactatcaacctgcacacatttttttacatcgttccaagaaaagccactagtgttgaccatgtccaagacgatactatattgtttcttgaacattcgatatttgttctgaatgtgtgggctagctcttataccactgttgggaattaagacattcaatgcctttcctatctccttccatgtcaccgggtctaacagttccattatcacatctattatcgcctttcaccagaacatcttcaagaacatttagcaatgcatcctcttcaaacttactccccgtatacctagaacttttatcgctataaacttggtcactactacctccaatatccatattcacctgtattcctcattttaaaatgtcaagatattaataaattctgcatgtacatctcaaattaatgtgtctaattcaaacaatggtaagaataaaaatcatccaaacatttatccgacaaaacaaagttgaataactcggatcaatgcatccaatacaaagaaagctaaacgacaataaaaaagcaagtaagaatacattcaaattaatgtgtctaatacaaacaataagtaagcaaagtttgtccatacatgaaagactaagaacctctaccactaaagtcctctatgcaatctccattcattatacatctgcatagctaaattatttctccattccgtccattgagttgaagcttcaacagtatcagttatttcataaccttcattaattgtctgattagtatcttctgcaacatctacttgtctatcaagctcaatttttgctggatctagagacatttctcgctgaatcaaattatgcaaaatacaacacgttgtaattattcgacactgtgtcgttattgggaaaaatgacgtgcttctcaagattgaccatctaatcttaagcaattcaaaacatctctcaatgacatttcttgcacatgcatgtttcatattacagtactcctcgtgatttctaagtacgtttctaccccactcagataaatggtacgcaactcctctataaggtgctaagaatccttcaccactagtatatccaccatccaccagataataataacctatagataaaaaaattaagaaaaactaatttagtgatctagaaaattaaaaattagtgatggttcaaaatataaaatattttttttcagtaaaattacctttagggatctttaagccattttgcctattaatggcatcacgaggtactctagaatctcatgttgaaccctcccaacccggtaaaacaaat

SEQ ID NO: 43967 - DNA, 1093 bp, Cannabis sativa
ggtaaaatatttccaacatcctccaccagtgaaagtgcagacaattcagaggttggttcaggttgttgatgcatgatagtgttagtaactttagacaaagaggtatccttggtgcgacatcgtttcaaaacttgtcaaatattccctccggagttcaccatttgtcttttagtaaaagttgtggtaggtctagcagttgttgatgcatttgtctaagtaggaaaaggaattgcaggagtttgtttgtctgcaatggtgttgccaggcatgatgagtttgctgctggtgtagcctgctttattctctgtagcatttctgagatggagatatgtaggaggagttgcaacggagagtgatttttttttgttagggagatatccagggggatacacattcacactcgacagtccagtggattgaaatgaggttgagttggcatgacattctaatttatggtgaatatttgtggagtccgaaacattgcaaaccagtggaggagtgatgtcaggatttgcacttattttttgttttctagaggaagatgaggatggtttggttgttatttcattatggaatgttgtgtttgttttgtttgtagtatatgggttggaagtcatgccataggatgtgattccagcaatatgaggcatctttgcttgaacaaagataattgtcgaatcttgattggtatgtccttcttcaatgtgagaagaatcgacaacttgttttcccttctctcaaaatgttgcagaatgtggagaggctggaggcagagtacggtgtggaagaataggaaagataatggttcgagccaaacgagtgataaaaggccatggcccagatttagaaaaatcttgtctgtatcaatcgtaagttgattttggcaggggtgctccttccatccatggtccatattctagatctgggtctaaacctccatccactttcagtagatattgtgtgcagttatcaaaaacatggcaaatggtaccacgtgagtaacaaaaatttggcattctctcatatcgatactcaatccacaactcatcttgcagccatggcaaagcaaccatttgacctctaagcagaggct

SEQ ID NO: 43968 - DNA, 1088 bp, Cannabis sativa
aaacaaacaatttattttcccttctacttcaccataaaaaggtttcctggattaaatcctgttctatttttcatttcacataaattatatacaactctaccatgaaacttcattgaagcttatgtatgagtgtctaggcttatgatgattgatatctagtgccagagtagagtagatagagctttttgactcctatcgtggagaatttcacagacaaggtcactgaatcaggcataaaaactaaaggagctgagcttacccaatactttaaggcggaatcgtttatatatggagcaagaacgatccaccttgaaacccatttcctcaaacattttaagctgcaaccaaataagataaagtaaaattcagccttcgctcaataaagttgcagcaagaaatgccatcttataaagtaggtcagcattaaacgcccttgcgtcacctgatctagaaaaccatcatttgggcaaacaaactcacagctttgccgcagagatagtagagcatctgcggatgcgtagggagaaaagagagaatagaataaacaaaatggaattgttatataagcatgaaaatttcataaagacatctccaatacttaaactacataaaaaaaaagggagttaatcgattaaaaataaaaacctaaatccaatccaatcaaagacagttcggactggctaaatccaatcaaaagttattcatttgtttaaaacacttttcaacaattttttaatatgtacttattgatgatgtcattctttttgggcaaatttgcattataattaaaagtaatacaattcatatatgaaacaaacaatatgtatagatgtaactaaaataaatttattttaaatttataaattagatattggattggttttggttatttctagggcaaaaagtaatacaattcaatttaagttatctttcgtcatcaaaattactaccactctaatccaaatgagactgattatacacgaagaaaaataaatattagattaattggtttgatatattgaaattaattgttgaccaccatgaacaaaactgctacccctggcttaaagttaaaacaaataaaaact

SEQ ID NO: 43969 - DNA, 2615 bp, Cannabis sativa
cagatattatatgactttttaaaaatttaatttgagaagattaattatataagtttaatttgagaaagttaataatatacttgtagacttattggataagtcatctatatgtacttgtacatttatatattattcccaatttaattcaccaaaaaaagggcaaaaaaaatatatatattgatcaattaattattctttgtatctagaaagaaaaatcagattatgtaaatatgcaacaaaattaacaaatgatgttcttattgttatctctcaattattcaactttatttatttatagtaaatattttaaatatatatattacaacatgaaaatatattatatatccattgttgagtaacacaaattctcacaaaatgtaagcgaaacataaaaacaataagattaaaaaaaattcattcatttatgaatattatcaatacaatttagtaatcaaacaaatatagaaatgattacaatatgtaatagtcacaaattaggagtttattatattattaatttcttttaagctacttcagatctacacaaaggacaaaatttacttgtttgtagccatttaacaatacactcttcatgatatctatgtccacaagttaactttgtagcttccaaaccgactacaatattctcaaagcaaaccgagcacgaaattacttgaccatcctttataagatctttctccaatctttcaatcgactgctcacttgctgccacgaaacgaatatgaatatcggtcatatcatacacatgatacgcatcattgccatcaacatcgccatcgccatcgccatcgtcatcttcatcataatacccttcattatcattcatcggttgactaggtaattcatcaacgaaaacatcaacatccactctcacacttaaattacgatctttgtcattccacatctgtcgaccataattaataatttcatcaattacaggaaacacagaagaaggaaggtgaactcctgcaagagatttttctagaatagctttagcgtcagtgctattattcatcaacgtgtcacgaaaaagtactacgacattcgtaaaagtagtagaagcttccatagatagtgaatgacgagtaaaatttgcaaataagtaaattagaaataccgagtttgtactttctattctagtaggattgtatgggaatattttataaaaagaattgccaacaatttgaggagaagccatttgagaatgagatagtaaaagaaaagagattaaagaagagaatgaaaaatatgaacgaagaatggtttaggttttgagttatctatgaatatatcttatatatataattacggtaaaagaatccttataatagtatataattttttcaaaaaataaaaaataactaatttaaagatatttagcaaaaatataataatttaaaacttaaagatagatgtatatatatatttttagtaacaaattatttcaagaaactaaaacgtgtgggaattcaggaaaaaaaaaaactaaacgtgtggacccacaaatataaataagtaaataaatatctttgtaaaaaaagaatattatattaattagtgtgacaataatataaataataaaaataaaaaattattaaataataaatatatatttattgtttcaaaaaaaattaatttaatttattgaaaaataaaataaaatttttttagtctattcactataaatgatcttcattatattttctttattatcatttttattatataaaagtgtgctataatttaagtaaagtaaattggtaataaaaaataaattaaaaattaataaataaataggtgtaaaaaattgaaatgtattatctttatatttcgaatattaatttaaagttgttaaatattgtattttatccgttgttatcagtgtatttcacttataattgctactattgtccttctcaagaaaataaaaaaatagatcaattttgagaatttgaatttgcttaaaaaagataaagaaaagtgttttgtataccaaacaacaatagattaacattaaaagaaataaattatttattattcataccgaatttaagagataaagccaccaaattcgagtaaaattgagagataaagccaaacgcacaaaagaatgagttatagtattttgagttttttacaatgagtgagagaaataaaaaagaaagaagtccaaacatataaaatatcatgaactataatatcaaactcaatctagcatttatccttcttattaatagcttaaacaaaataaaaacaatctaaaaaaacactaacgaagttgaaccccaaacgacaacacaacaacaacccatttaagagagttgttaccttcgccacatgatgattaaaggagttcgccactgaatcacccgaaaaacataaaaccaccctgtcacggtctattaccactgccccaaccaagacccatacactatactcatccaccaaatatcatttttttttttaaaaaaaaaaaaacacgtttagattgggaaatttataaaaatactggaatttgggttaacttttacaaaaatattgccacacggaaattttttcaaaaatactgtgtttttataaaacaccagtaaaac

SEQ ID NO: 43970 - DNA, 2534 bp, Cannabis sativa
  modified_base (2382)..(2387): a, c, t, g, unknown or other
attaaaaatatactaaacttaatctaaaattaatactaaaaataacctaacacaacttctatttttttgttttcttggttcatgtgatcttgtctctaatgttagtagcagaacaatggtgtgttgagggtgattgtttcaccacacaattattcagtatcacatcaacatagtgttgaacaccttaaaattccaaataataatactctataaactttgtatcatatgttaggatagatttatatttttttttttttttttgagagaaaggatagatttatatttcatatatatagatatttgtaataatatttataagagtattgtgtaccatatgttgtaaaattatataaatatatatataaatcaatttcttcctagttttttctaagaagaaaaaggttgtacgttatgtatagtcaaaaaaacatgagatgtaaattatattctcattttcaaatgaaccgtacacctaggcatgaccttccctttccattcccacacgagcgagccattgaaatttcaacacattttcatactgacaaagatgtttaacaaaccaatccacaaaatattagatcaaaaaaaagaaaaagtactaatacaattacatttggtcaaacattcataataacattcccaattcccatctttatatatatcttcatccacaagaaaacatctttgaatttacaatagaaacttcacttgagagatcaatacttacatatttatatcccaaaaaacacttgaacaaccaaaaaactttaccaaaacaaaattgattaggccaaaattatggctcaacctgcacccccattaatagcctacacaacagtcacaccagcagtccctgaatggttaaacaaaggcgataacgcgtggcagttgacggcggcaacgctcgtggggctgcagagtatgccggggctagtggtcatctacgcaagcatagtcaagaaaaaatgggctgtgaactcagctttcatggctctctatgcctttgcagcagtcctaatatgttgggtacttttcgcatacagaatggcctttggtgacgagcttcttcccttttggggaaaaggggctccagctctaggccaaaagtacctaatctctcgagccaaaatccccgaaagcaatgttcaacccttttacccaatggcttcattagtctattttcaattcactttcgcagccattactttaattttattagctggttctgttcttggtagaatgaacatcaaagcttggatggcttttgttcctctttggttggttttctcttataccgttggtgctttcagtttatggggtggtgggtttctttaccattggggtgtaattgattactcaggtggctatgtcatccacctcgcctcaggcatctccggtttcaccgcagcttattgggtaatattttgtcccacatcggttgtgtatatgtaaattttaggatttatattaacttctctgtcttcactctaaagaacaattggtattttgattcattaggttgggccgaggctgaagagtgatagggaaaggtttccgcccaacaacgtgctgctgatgttggttggtgcggggctgttgtggatggggtggtcggggttcaacggcggagcgccttacgcggccaacataagcgctacggtggcggtgttgaacactaatatttgtgcagccaccagtcttcttgtgtggactactcttgatgttatttttttcgggaaaccgtcggtgatcggcgccgtgcagggaatgatgaccggacttgcttgtattactcccggagcaggtaacaatttgttatttttttttttcaaacatttcattaattaaagatttgattaattgaagggtccctttcttttttattttttattttagcacttgttcaacaccggggccaagtaatataatattaaatatgatgcataataatgcataatgtgatgttataaactaatcaatatctagtttactatagagtattaacaataaaattgagattatttttatgtttattgttgacttaatttcagatgaaaatactatttagtaaaattaatagtaataaataaaaggttaattaagatttttacctttaaattttaacttatactaaatcatgtcccttaaactttttttgccgttaaaaattctccttgaattattgagattgttagatttaagaatttttgtttaatttcgttcaatttaactattttagtaattgtttatgtactaaaccatcctcctagtctttaatatttaccaaattatgtcacttcaatcttgacatatactagataatgtctcctgaactttcatccatgttagatttttttaactaaaattagacaaaagtccttnnnnnnaacaatctcaatagtttaagaaacatttttaagaaccttaaaagttcacatctcaaatttcaagagtaaaaattctaatttttctaaataaaattagtttagtgattaataattgtattgtacgtaggtttggttcagtcgtgggcg

SEQ ID NO: 43971 - DNA, 1808 bp, Cannabis sativa
aaaataatttccaacaattactacatgtgttgacacgactatgacacgacacgattaaggtaaattacacgaacacgacacgattattaaatgcattagacactcaatcacaaacacgacatgattattaaacgtgtcacccaaacccatttatttcgtgtcatttttgagttgtgtcgtcgtgttgtgacccacattggcaaccctaatgattaggcgtgcctttctaaaatttcaagtggaacttgtgacatatcaccgattaacgtcagggttctatttggatattaaatgagggagaaaagaatgtatacaattttgttactacaaactcccaaagttatgttagaactgtggttaccttggtcatgataaaaatttgtgctagagctacttcttatgcttatccacctaaaggaaaagcaattcctgcttatggtccatggatgaaagcagagacggcggtctatatctgttttaatacttgaaaccaacttgatttatttaaggaagatgataggccaaatattccaatgataagtactcctccgacaagtctgaagtcaaagttggataaagtgaaaagaccagtgggtgaggaccgagtgaaagttgtcccttgccctattcctattagtaaattgattagaaaagtaatccgagtttaagaccagaagccaagatcagttattggcaaaaaattaaaaaaggtggagaaatcgccttagcatccagtggtaaaccgagatgaatgctccatggtaccttctttgtctcctagatttgctaatcgagttaggagaaccaaattagtctcccctgagttattgcgtagacatgatttaggtaagccttcccttgattttgaaattgatataataaaaaatttcacttcctgccctatcctaccccgacatatgccaaagtaattaccactattatgccccagactggacctacttatgaaaaattggttgaaagaccacataaccaagtttttaagtctagacaacctcataatcaccctgaacccacccatttccattggcccacttatgcaagtgagattggtcttgttgaggaacttatggggccaacccctattgataaatttgagcccactccagttttgtttcatgatccaattgatgtctcagagttggtccaccattgtcctcaacccagaaagagaaaatctggactcactctcatacttatgtccaaagaaccccagagatagtaagagagcttttccaaaccattccaaatatccttgggttttcccatggccttatcccctcttctaagatgggtagtggtgcttcatcatcttcttcaaagaaaggagataaaagaagaagaaaggtctctcatttaggtaattcaaatatgaaaggaactaaagctcctttattgattaagtcaaacacagaattagccaagaatttggcttctaatctagatgagctagttgaatttcaagtggatgtgatcataaattttcaatcggccgaggaggcgacccttatcaagccgtccccaccacccagtgagagtgctttctttgaactgtcaaggcctttcgaaggactcgacagtctaggccttaatggtttgggcgaggaagttcaagccgtgtcttcctcatggaaactaaagtcaagaaggaaaaaatggtggagataacaaggctactgggtgttgggggatggagtgtattcttgcttgcagtttagttggtggcttttgctttttatggaattcagaggtgcaccttcagatccttaagattgaaaattctatttttg

SEQ ID NO: 43972 - DNA, 1116 bp, Cannabis sativa
cagtttattttatagttaaatatatggcaaaaaattctttcaaaaatatatatggtaaagaaaacagtactaatgtaacaattaaaaagatttaattattattattgcaaatataattcaatataaaaaaaaaattggaaattataatatgaactacaaaaatacatgaaatgccttagactggattaaaccctgggagatcaatcaagcgagcgaccgatgattgaactcaatatatgcaaaggctgcttttttattgtctactttaattttccttttttgtggtaacgtatagcatcagaattacccattcacccctgtaaaagtatttttatttcatgataggacaacaataagcaaacaaataatggtagactaagcaaaatataaaacagaagaaaaaaaagagaaaaacttgggaaaagggaaggttgtgttgtgtgcattggaatgggatgggagggcatcctaggaatttgacagtttctgtttaggactctttcgagcaaaagtacgtgtgtgacttattaagcgtgtggaatgtgatatgcatcatatgtgtggattctacttctactcctttatatgaatgttaatgcctagcttttcacctttagcgaataaaaacacaagtatttttccaggaccaacattatattaaagtaatcttttatctcagacaattacaggagtaaaatatacgtatgagagagtgagagagattggaatctggtcactatgcccacatcgaaacaggatgtgaaataataatatagttataaagaataaggtgcatttggttgtgttgattggatatatattttaaaatgttgtacctgcataatctataatgagtggatgcataaaagttttagcgttttttttaatagcatctatatatattaaatcaactcaaaacctaataaactttacacgcatattctcgctttacactctccaggttcgataataattttgatataattaattatcagaacaaaacaaaagaaaaataatgtttcttgttttgtttagattatatacattatatgtattctttttcatagcataaaagacaaattagcacaaccaaggaggttccaccacagaagataa

SEQ ID NO: 43973 - DNA, 2224 bp, Cannabis sativa
taaaataatttccaacacctcctaccaactccaacttcacagatcccattcctatcaccttgtaggacttgttgtcctgaagtttcactatcccaccctcaatctttgagtagctacaaaattgagacttatcatgacaaatgtgataagaacattaagaatcaattacctaatcgagtccagagtatccatttgatacaactaacaccctagcattgtcatatccctcactatcatatccatcaaaaaccaaataagcatttcctaactttcttttgttgtttctagatcgtgccaactcaggataattcatttttaaatgtgtagtataatgacagatataacacatcctcttttgctttgattttttattctttccactttcttgatcctttttccttttctgttcatactttcctcgaacatacaatccctcacgtgagttttttttttccttaatttctgactttcttttgtgttctttagacatcaatgcactgtggatctcgtacaatgttaaagaactcataccatacaatatggtgtctatgaaatattcatagtgttctataggtagagaattaagaagaattatcgcttgatcttcacattttatctttttctcaatattttccagatcaaggatgatcttgttaaagtcatcaagatgatcttcaatcaatttctcaggtcctaatataaaagcatacagcttctgcttcaagaaaaacttgtttgccagagacgttttcatgtaaaaatgctcaagtttcttccataaactcgcatcattcttctccttgatacctttctctaagtcttcatccccaagacatagaatgattgcattgtgagccttttccaatagttcagacgtctccttctctgccttccccttgatcttgccttcaccttttatggcaccttgtagtccattttgtaccaaaagagcttgcatctttaccctccacaaaccgaagtcgttcttccctgtaaatttttccagattaaactttgcattccttattgtttctaggaccaattatcgagcagctagagatgataaccttcaacttcaatctcaaaaatcatgcatgtagctctgataccaatttgttaagaatagcttgagcttgatccaactcacagctcttattcggataaacaagaaaataaaaagagaagaaagaaaaatgttctttattaaatgtatatcaaaaatttgtacaccagtattaattttagcatttacatgattagctatatatataactttaggcatagaactgaaaacaaaagagttgataacaatttgttaacaactctaactaactttgttttgactaacactaactactaactgttttggtacaaattaaaaatggcagagggacacacttattaaatattttttatatatatataaagtgtgactatctaataaaaattattattttaacagatttattatttttttttattaacgttaatagtttaaattgacacaattacatcaattaattaattattagtcttgaaaaaatttattaattattttgtttaaaatatttaaattaaatataactcatatacttatttaaaagtgttattttttcaaaaaagatatggtacatattttttatataagtttaaaacaaattaattgaaattaaatgttatatatttaaaaaatataatagaattaaattaattaaacttattattgttatttaaattaatattttttatttcttctaaaagaaaaaagataagagacaagtaatatttgcgtgataacttgaagaatacatagtttttgtataagttaactaaaattatcagcaaactatattcatttaaattatactcacttttataaggagattgcccaatatactcccacattagcattaaagactgaaaattaagtcctattgtttttagttgaagaaagggtattgttggaacactaactattaaagtgggtagaaaaaatgaaatatgaaaaatgggtaaaaatttaaatgactaacttaaagtgagtaccccacgtaatttcctcaatattttttttgcctagctattagcaataatttgtttttgcaacttttacaaatttgtaatggttattcatatatatgtttataaatatatatatatatatatatatattcgtgattatatatagtgtatttggtaacacttttttaattaatttttcatt

SEQ ID NO: 43974 - DNA, 1215 bp, Cannabis sativa
cagatgaggtgggcctgttttggggacaaaagtactacaatgatttattgttgagtgctgatgaaaaaaaccaggtgggttcagtgagtacagatattctattgagaaaagactttgaatcatttaccttaagaaatggatgggctttccctagaagaatatacttcaatggtgagaactgtcaaatgcccccaccagatgacttcccaatattgccaaatggtagctccaaacataaaccattgctctctttggtccttcctttcattatttttgctttcaggacacatctttaacgaataattaaccataagcaacacaagcttctatttcttttctctttttggatagtcttcatctcttgattcctcctgtacaatttgtaactcatatgaactggtccaactgttattgatatatgtgaacgggtgaacatgcacttattatacatactaagttaaacatgtcaaaaagaaaccaaaatatacaagacaaataccaaagcatatattcttggcatattcatgtcataatatcatttataagttgatataataatctaatagtagaagtattttattagctatttttcaaaataaatacagcaataaagttctcaatttatacatattttgaaaacaataaaaaaattacaatattgaactttggaaaggttcgtctatccaaattttcaatctttacaaaggattgatttctctataagagtttactcttttctaattcctaagtttatctaactacaatagtgaacaaaaattattattaaaaaggaattactataaagttctgaatttgttatttctattaataatacttaatttgttatagtttcttttgatcaacaatactcatttatctatatcacgtgtgatttttttttaaaactttttaaagttttacagaaatattttaagaaattaaaacacatatgttacgaaaaaaaaaataaattaaaagagatatcgatgcatttttatttatatctagaagaatattttaatcttttttatatatattaaaacacatatattacgaaaaaaagataaattaaaagagatatggatgcatcttttatctattatttaaaagaatattttaatttttttttatatatatttgtataatttagttatttaatatatcttatcaaattttgaaaaatttataatttaaaaaataatgttgaaataattg

SEQ ID NO: 43975 - DNA, 1670 bp, Cannabis sativa
atgaggttattgagaatatcaatggtgtattcaggatgaccttgaattccaagaatgtgagattccaacatgaacatctcaactcctgttttttctgagtaaccaatcacattagcacctattggtacctctaaaacctcatcttggtgacattctatgatggaaaatgaggatattattggcataatcatttgattattattaccatcttcatcttcatccaataataacttggtcattaatggaggcaaatttttcactatattcacttttcttatccccaaatcccaaccactatgagattttcctacctttcctcccaatgctctgcttataacctgaaattatatacattattgaaaagaatcaaatatattctatttatatgcataaaggcctttctcaccaaaatataacaaaattatttttactattattctttttcttgtggaatatgttattactttttgtggtcaaatagtattgttgcataatacaacaaaaataaagggaaaggtggggatgacatgcatgtcacgtatatttttgttggaataaatggtcacaaaatttagaactattctctttattttttggaattggaatttcaatttggtaaatgtgtatatgttgttgacttgtttcacattcaaaattataaataaagaaaaatttaaaaagatatccatatttagtaccttcctatgtgttaatatcattattaatttaattaagaattagatcttatatatattaatataatagctttaaggagtattactagttaattatatgtttaaaggtgctagacactactaatacctaatagaaatatagctgaaaaaactgaaagtattactatcatttacttataatacatttataaagactcaatttttttttaggaaattacacattttctaatttttgtataatatgtataaaaatatcattatttattttttatttttaaaagaatatggaaatagttaagggtaatttgttaacctaagtaactaattaacttatattgttttttctaatatattttcaatttattttaaaacaatttcccattatttcaatattttttttttgaaaaaaaaagccacattattataaacttgtatcttgcaaaccataaaaatgtttcacgtcaaagaaaaaccataaaaatatttaaattaattattatattttatgtacaacaaatttagaaaaatataaattttttgtattggaattgataggaccaacacaacttaaagcactcaactttgtttgttaaataaatatatttaaatggtgaattaagatttttacttttcaattttgatataatatatcatgctctcaattttttcatctaactttattcaattctactaatggtaacgtagaaatttttcatatactaaattgtgtccttctaaactttaagatatatcaaatcgtacatctttcaaactttcatccatattagatactcgttagtaaaattaagtgaaaggccttgaatctaattttgagaagaatatttaacgatcataaaagttcaagatatacatcatagacaaatatcctaattagcttatttaaaatcagaaccatccatatttcttttcattttacttttttggcaaaataatgaattatataaatacatatct

SEQ ID NO: 43976 - DNA, 1869 bp, Cannabis sativa
agcccctcctcctcctgcctcatcaccaccgccaactgtccaatctcctcctccggtcgccgccactcctccacccgtaagtgctccacctccggctactcctcctccagccaccccaccaccagccactcctcctccggccactcctcctccggcaactccacccccagctactccaccaccagctcctctcgcatctccaccagccgccgttcctgctccagctcctagcaagaagaaggcttctccggcaccagcaccggtagcactcagccctgctgatagtccaccttctccacccagcgaggctcctgggccaagctctgacaccattgcaccaactcaggatcaggtacattaatattttccaccatttttgggattcagatcgttattgatctgactgagctcatttactctagaaaatagttacattgttattcagatccttccataatttcttttttaatttttaaaattaaaaataatatttttactattattaaaattaaaataatttagaaatttatataattcttaatttactcttaaaatattgttttttaaaaatattattattagacacggtggtattcaacaatttttattgtgcttttacgatgtttaaaatattattttataattacactaaaaatttaaccaagcagaatctaagttagaagaagacgcggcgcaatgtagttgatatatagtgggatttgctatccaacgcctggggtatgaggtctcgtgtttctcccaatattagatggactcagattcacgtgggccttaggatgtgtccggatctgattggatctagatttgtatagtacaaataaaaagtctgtcaatattgacaatggtctgatttggtactagcatagcataaaatatcgtactcttttcacagttttcactagattagcataatacgtactagtactactaggggtcagaacacactacacaatgtgagtctaatttaataatgtcatggagaatgggcccaaaatgggcccaatatgtataaaagtaaaatataaatttttgaaataataattgttttttggtgacagagtggagcagagaagatgttttcagttggaagcttgttgtttggatatggtattctgagtttggtgctgtagaggaagagaaagagagattattaacatctttctctgtctttgatttttatcacattgggagctcagtgttgtgatttccaacttccacttttgtacttgccttattgcagtgttatttcattttttgtataaatatatgtattaagtatattattattattatgatcgatcactattggttggcagtcttagcctttgtgtctgttactacttttgtactttgaactaatacaccattgggttgggttgggttgggttgggttgcattctttggaggtttatgaggggagcttttgtatttctgattattggatgaggacttgtttttctattgaatttatttagacttacctcttaatgtctttcctttttatttatttatttatttattatattaagctacttttcatatccaaactatttacaaaataatgatttgtatttgctttcaaaaacttgtgttgaaaatgaataagtgaaacttaaacgaaagctcattaaatttaacaaagttaaaaaaaaaaataatacgttttagatgtataattttgttataatgtccaatataaaatttaagatgtatactaaaataaaggaaattacgtcatttcattaataataaaaggaatatttttggtgaaatatttttaaggctaattaaaataaaaactttaagagtaatatgcggcaaaactctcccaactatcaatttacttgc

SEQ ID NO: 43977 - DNA, 1299 bp, Cannabis sativa
actgtagcgtgccttagcattagggcattacaattggttttggaatgattgtcagagactcaaatggcttactaattgaaggttgtatgaatttttttatgaaagggtagaacttaaattggctgagacaattggtgctcgtaaggtgctcaactggatcaaaagtaaataatgctagcaggtgatattggaaacgaattgtttgggggttttgcaagcttttaaaagttcttcaagtatactttcagtctttggttatgctgttgaaggctgtaaacttttgctcgatgttttaagaaatatttttgtttagtttgttaaatgatcaactaatatagtaactcataaatttgctaaaacttctatattatatcttggttgtgcgttaagtttcaagaatattctaacttatttgttacatctagtttggtgacggaagttgatgattaataaatttagttttttattatatatattatttatttgaacatacatattactataaaatctatagtacgtgtgaaacattattacataagaagttgaaattatataaaaaagaatatcactaacatagatgttctaaaaatagtgctataaatacgggtcaaattttttgacacggcacgaaatcagtacaaacttaaggcatgagcacggctaggcatgaaaaaatatggacttggacacgacacaatgctacaaattagcacaacacaacacgaacaatgagcttgagcttgacacggcatgagaaatatgggctttaacgcgacacaacacgacaagtccaaaaagaatgacatgtaagcacaaataaccttttcagaaagtgagacatgttcaaaaccttatatttgataagagtaatttgaagcataaatatataaatttaactccagttgtaaataaatacttaagtttaaattttgacggtaataatacctaacctatattgctaaaattttgtaagtacctgacattaaatgttaagtcattatccacgtgttatgttattttttattggtacatttaaactatttttttctaaaaaaaaaaaattaataacttggaccaatcagagattgccatatggcaatttacttaaatttaacagtcaagtatctttaaaattttcaaaattataacttaagtattattactgctaacaattaaacttagatatttttttataactcgaagttaaacttaaatatttatgcctaatgtaaatattgtacttaatttagcacaaaacaaaaaacaaaaccaatactatagttgctataatatttacta

SEQ ID NO: 43978 - DNA, 1302 bp, Cannabis sativa
ggactcagctggtgaacaaaagctcaactgggttcagaagaattacttgatctacaattactgcactgattctaagagatttccccaaggtttccctatagaatgcaccatggcctaaacaaaagatgccaaaataaacacatctcataaatgtgttttaagaaaatttgattgtatttgtgtagattatttaatttgttatatcaataatacaattcttttattcattttgtcactattaaaattagtgacataattgtgaatcgtgattttttttaatacttttcatcttcttttccatttaacttttgatggaaggagacttttgagatttcaaagcacaaaataagagatttcaaactacatactaaaattttcaacttttttacatttatactgtgggtagaatttttttaaaaaatattgtataagtttcatactgtgtactgtgttaaattttcactgttgttttacggttgtttttttagttgttctactgatgtttttaattgttcagttttgttattttacgggtgttttaagttgttttataaaaagacaatatttttgtaaaaatctgtgtaacagtaaaattgtaaactttaacctaaaatctagtattttttgtaaaaatcccaaaaataatcaagaagaagccttaaccttgaagttcctataggagacttactttaatctttcttaaacaaatattgtgagtataatgaataatttttctgtttcatctttttttttttaaaacataattttacaatttatatacttttacaaaatgggtccattcatgaaaaaaaaaataatctaatttattttatggtcgtctatgttgcaataacttaacatactctgaaaatttttgagaaatttaacatgtttaaaatatggttcaaaaagttacttaacatgcctataaaataaaagagtcttccctccaacaaactatcttaatattatgtttgattttgttaaaaaatattgagtttcattaaaactgaatttattgtaattaaactatgctcaagtgaagagacaattagcaaacttaatattatgtttgtttttttgttttttgaaaaatcttaatattaagtttgatcaaacacaaaatgatgtcccaactgttttttttcctattaataactaacataacggtaatataaaactacgtaaacacacaactctcttttttttgtctcactttctcagaaaaacacagtcaagtttttctccaagaacaatggagaacaaaacattattgtttggtaacgtagtgaagaacaaaaa

SEQ ID NO: 43979 - DNA, 3801 bp, Cannabis sativa
atcttggcggctagagttattacagaagcttcttgtactattgttgattgacttgttgaaactttgatccacttggtgtttggagttcaaaaatagttttgattgtgttcctgaaaagagtaatgagaaagaaacaagaagaataaagtaattatcggctaatggttatggtcaggggtggacccacatataactgaggcggggcagtcgccctgaaaaaaaaaatcgaaaaaaaaatatatatgcaatttaattagttacaacatatatttgtaataaaagatgatatttataaacataatattaactttggtgtaatggttaagctacttagcatataaattagaggacaaggttctaatcccattaaattcattttttttctttttaagtttaattttttggcccccctcacttaccaaaaaaaaattatgccccctctcactttgtatcctaggtccgccaccggttatggtatcaatttttctaacttaaatttgcaattattggaatacgtttctccactttttaaaattctattagtcttgaaaaaccaaaacttaaggtgaatacaaaaagcaaaagaacaaaagttaaaagaaaggaaaaaaagaaagaaaaggataaggaggaaggtaactatgcatgaatgatgtattttctctggttttggctaataattgtttccattataaggattatgtgaatttgatgaataatgtgactatatttgttagaacaactgaatatgactagggtctttactctgtttctcttttactgttttattgttttactgtgtactctggtagttataagtccgttaggttctgttacaattggttccttgtttttcggttatgaactgatgtaatctgttgaaactcttcatatataaataagagtaatcttgccaactgtattcagttgagctttccattcatcttccttcttcttccattttctctccatcaatttcttcattgctcaatcttgagtactgagttttcagtactcctacaatattattattacttctcacgttataagtagttttattattttttttaaagtacaattaacagctttcaaaatgaataaacactgaagcaatcaatagctgagctgctttaaatgattgtttggcagattgttagagaattattccctttgtaatatttactgagagaaggaatagagaggtctgaaatttaagttgtaaaccagagagattgctgttgagtcttggtacgtagtcgttttcaatgagcatactcaaactgtcaaactacctaatagagctcactattttgacaatttttctctgttactaaattaacatatcttcgcttctttatttctatgttaataactccttttttttaaaaaaaaaaaaattacatgtaaaagataatttagaaataaaaataaataatttttcaatttttattacatgtatgcaaccccataaattttttgtcttgcttgtctaccaaaataccaatttaagtgtgtagtgcatattttctcaatatattaggctatttagtacttttgctgctttttttaattttttagtctgttaaaagtaattcttaaactatttaattttcttaatcattaattaatttttaatttaattatttttttaaaaaataaataattattattctttaatgttaaattatacatgtagtgttaatgtggcaattgactaaacaaccatgttatcattttgtttgtcatgtatgacaaaatgacctttacaattctataaaaagtctagggactattgttaatgagttgaaaagttgaggggcacaagagtatttattggattacattcaatatttttagacctatccaaatttgattcaattatatattggttacattttactaagcaatctgatctaattcatttcaatcattcactagatccattaaatcggttgtatccattggatgtattttatgtatatctattgaattaattcattgttatctaatattttagacctattatttttttaaatcatatctatttaatattttaaatctaatatttattggatccaattaaatccatccaatttaatatatatatatatatttgtttttacataaaatcaaattactcatctaaattaagatgtatcgaatttttatacattccatctaacatttaatccgatttaattaaatatttaaatataacatctaattcaattcaataataattacacattcaatatttagcaatgaattataattagatggatcaattattattaaattagatgatttatgcacgctaggagcacaataatcaggacaaaaatgtatatttcatatcacaagtcacgttagtaaaagactaatgctcttcaccatgacatctgtaaaaaaaaaattagagtaggtggtgttcaatttcgagagtccactgaagtactctcctatatgtaaaaaaaatatatattttttatgacaaaatattgagagtttctctcgacaaaatataatttgacagttttgcctttgcctgtcactctccacatcagcctcttcttccccgacgcatgcaacaacattaattctcaccattttgatgttccaatcaaactctcaaatggggtattgcaatcttcaatcaaattccaaaaaaaacaggattcatttaaaatttcataacaaatgaggaaagtattaatttgaatgttaatataaatatgaataaaatgtgtatataaatgatgatattaattcttaccagaaagctctttccttttcctttttttctcgattcttaatcccaacgaaaaatttacaacaaagttgtcatttttccttgctttttcaattcataatccaaaacccagttcttgaaatttgattccacggcttcgaaaaccgaaggcaaggcaattggtatcgactaggggaccacatacagctgcgttggcgtgtggcaaaacgaccacgttgagatcatagccaacgatcaaggtaaccgaaccactccttcatagttcatatgttgctttcactgatacagagcggttaatcggtgatgcggccaagaaccaagttgctatgaaccctcaaaacagtctttgatgccaagaggttgattgggagaagattctcagaccctttggttcagttcgacatggggcattgaccttttaatgtcgttccaggccctggagagaagccattgattgtggttaactataaaggagaagagaaacagttggcggctgaagagatttcgtcaatggtgcttgtaaagatgaaggagactactgaagcttttcttggtcagactattaagaatgctgtggttactgttccggctcatttcaatgattctcaaaggcaagccactaatgacgctggtgccatttctgggcttaatgtaatgagaattatcaacgagccaactgcggctgccattgcttatggactcgacaaaagggcttcccggtcagcttgtgaacagaacgttctgattttcgatcttggtggtggcacatttgatgtttctcttctcacaattgaagatggaatctttcaagttaaggctactgttggagatactcaactcgggggtgaagattttgataacaggcttgtgaatcactttgtggcagagtttaatagaaagcacaagaaagatgttagtggcaatgccagagctttgagaaggttgagaatggcatgtgagagagcaaagaggattctttctttcttcgaccactcaaaccaaaatcgaagttgactcactttaccaaggtg

SEQ ID NO: 43980 - DNA, 1774 bp, Cannabis sativa
tttttttttttttttagcaataacaggatataatataacaagaaaatgatttttttttctttttcttttttgcaacaatgaataatatctctgtctcttatgacaaatgtatcagcatcttcacttttttttgggtcattacaatatttgaaaatttttatataataccattgttttttaatataccccatatttattttgctatttaagaaaaaagaaattataatcttgtatgtcatagactcatagtggtatttaaaattattacttataaatttttaaaatattttaaataatttatagtatcaaaaataacatttaaatattttaatataatgtaactgtgctaaaatagatgtaccaaaactacccttttaaataatattatgctctatctttttatgatatctaataccttgaattatagaatatatgttatcatttcacatatattaggcatatgcagtataggtagaatattatatgttgttttgtaatcgtagagtttaaccatagtttcccatctttgtgtcatttaactgtgttatggccaaaattgtaacgctatactattcatttggctaaacagtacttgtaactttgttttgtgtcatgaaattaatgaatggctccaagttttttgaggaaaatgttaagagagagttaggaagaaaacacaaatatttatgaagagagaaggaaggaggtgtttggtgtgggagttgaagccccattgaaaagggtgccaaatgatatgactaggtttttgcagtcaaaattggacagctaatataatgcaattgatgactcctctattctgacacacttcacatgtttgtattcttatgcccttgaaatgtcacaccaaaattccttctacaagtaacaatgttatgtggctcttctccctgtcttccaagacttgtataattataatatatgcttattcatcaagattttgccatttgggtacttcatatataccctatatatacatacaatatatattgtatatgtatatagcttagctgcacaatttcatgtgcatgtgccttgccaagacccaccaccaccacatttttcattgacacttcttctatggttataataagaaccagcaatgatcaatggcatttcatacaatttccacctcaagtggatgatttttagtgactcattatggtaatagttgtaacaactgtttatacagtcagaacatataccttattttttaagacttttcttaagttacaagtctatgatgaaattgtaaggaatttgcaattgtggaaaggtgataattttaacgagatgagaaaatcttaactaaatctaaattgaagtaaccattactttgagttcaaaaaaaaaaaaaaagtaaccattactttaaaggaatttgctcatgcacttgaataacaaaaaaaatatgatcttcttgaatttaagtttgtgtatgtttcctgttaagaaaaaaaaaaggtttgcgtatgtttccctcgttatttgtgattcttatgatttttttgttacataaaaatgaatttttacactatatattaaaattttaaacagtatttttttaaaaaaattaatttttgttcaaaatacagtattttttctctaaaattacatgaaatataaaattttataaaaaaaaattaccaaaatataacatttatagatttgccactcttctatggcattttcacatttaaaattttttatagtatttaatatgctatatttttgtaaacctattatccaaactcat

SEQ ID NO: 43981 - DNA, 1822 bp, Cannabis sativa
aggggtagtatcaaagggtaaaaatggaaaaacaaaaaattggagagaagaatagaggcaaataaaaagaagccaaagggaaaagtaaatcttctatagagattgaccttccttttctttttaattttttttttcttttttcttcataaaaaaaaacttcccaccattgattggtctaccatataaaaagtttccttctttacttttggttaagagaaggaaaaggggtcacaatcagcaacgagagcccttacggcaaataagtgaacccgcattagtggtaatagtaccaacaagtgaagagggcctagctcccaagctagatgccttagcataactcgaagaagctccagctcctgaggctgtgaaaaacgcaccgtttaccattaaatctccttctgatctccaattccaattcttccactcactttctggtgcatcctcatgtttagtcacctatacacaaaatagtactataaattaaattgcaccaataaaatatatacaatatcatgtcacgtcaaaagtaatagattaattaattaactacctctttactgaatctgttatttggagcaagaaatctatttccttgactattaatagtagggtttgcacttcctccaatggcatacatctcccaatgggtgtagtcattgttcaccacgtggaaataaccatgcctacatctgcaacaccaaatacattattaattaatttttaattacataggcgtgcacccattagaactttttttctttttttcaaaataaaaataaaaataaatataatgattaattatttattttttattattattaccttggcattctttgaacaaggccttcaccaaaatggttaaaagcaatagtgacttgcatgttcttgtcttgagtataagaatcgctatgacccaacaacataaccttatcatggtgcgtcatgtaattattcgagagtgttatagcagtggacccatgaattgcatcgattaaaccatcttggcagttagacaaggagcaatgatcaacccacacgtggcttccaccaaaaatcgacacaccatcaccgtcagatatagttctccacccaaaatggtgtggggagtctctcaccatagcattaccacctggcttacagtcatgaatattcaaaccgtggataataatgttcgtcacgaactgaaccgttatgcaaggtccaccggcaatgtggacgctagctcctcgaccgtctaatgtcttgaaggagttcatgattaattcctctttaagcttaatcaccatatctctagcgaagattatccataacggctcgtcttggatcacgccgtaacggagtgttcctggctttgggttcacaacatcgttatcgctagaatcagtaacgacgtaaatccttccgtctcttcctccgatcgcatttttaccgaaaccgattgcgcaatctgctaatctctgtcggttcttctcccaattcgggtcgcatctccagcaatcgtcgatcgggttacccgttccgcaagataggtaacccaagttccttcgtgctcgagtggcattaataatactcctataccaaaaaagaaaagaagaaaatcaaagttagtaatatgtgattaaagaaatgtgacatttttagattttttactttattttttggtacttacttgtgaacttcttcaactacaagttctgggtctggtactggtgaagaggagctgagaagagttgaggttaggaaagtgaagaagaagaagacaatgtgagtgagtaatgccatttttttagagagagagagggaaagtgtgtaaagtgataaa

SEQ ID NO: 43982 - DNA, 1782 bp, Cannabis sativa
gtgatacagttcaatcatgacaattgacagactatatatcaatggaatattttttataataggatatgttggattagtaagcataatttcatattatttctagttgttgagtcgtatacaaaatctgatgtacataggtaatctctctctcagcagtagctgtattattgtcatttaattatcttgatgtctataacatttcctgtataggatcccaagttttggacatacagaccattatctgagctgatggtccgtgctgcagcagatgatgtccgtttccttctctatatctatcacaagatgatggcgaaactgaatgaacgaactttgtggtatcttcaattccgtggtgctctttactgtcgatgctattgcgtcaacgataataactatgctgattggccatctcttcctcctgttccaggttattataatttaaactgctgttacactaatacttctattattttcttttaaaaatagtcattgaagattttcatttttattgctaccacacaatgctcttgaattctgaagaaattttttattatttctaccacacaaaatttgtgattagtaagaaatactctgaagaaaagaaaaattacttggactcaaccatttaaatggttatttcggttttgaatttaaaattttgtttacttcactgctactgtgattactgattgtgatgtgatttactcgtgtagataacttgattgtggaaggtaaggcccccgaggaagaaattctatcagttctcgatgttcctcctggaaagatgggatgtattattgggcgtcgaggagccaccattttgttaatcaaggaatcctgcaagtatgtctctctctctctctctgtctagaaggcaccactcctgcagtatattcagctcgttatgtttaattgtgtattttttgcagtgctgaaattcttatcggaggttcaaggggtccacctgacaaggtctgttcgcttttataaagaacaagttcatagttttttttcatttttgaatggaatgttttctatttcaatggtcaaaaccataatttctctggttcatttaggtattcatcataggagccgtaaaggaagtgaggaaagcagaagccatgttaagaggaaggatgctggacctgtagtgtaacacataaaacaaactattgtgttttctttatacacattaaccctttatatggtggaattatcaactctgacaatttgatttgcttttcggaactttttggaaaataatgaaggatattatttgctttcttaaattatgggttgtcatggcgtgtcatagctaataattgaagcatatagataataatagtatgtcttggagctttgaattggaggtttagattataaaacacaaggggaaattttttatacttattcctagggtgtttgcagtgcagacgtggacaatatagtttgaaactatttaactaaattgcactgcaacgtaagggtattcatccaaccgctcaaactgcccgcaccgcaaaaaaaatacagtttgaaattcttttcggtgcagttcggtttgaatttttcctaaactgtgcggtgcggtttgtggttttgaattgttaatatgcggtttaaaccgtactacactgcattgcatattataaaaatactaagttttatatttatttaggtttaatatgtgaatgtttagctcaatgcctactaattattgtattattgaatttttttttttcatatttatttttaagacttatgatatttttgacaagtgtt

SEQ ID NO: 43983 - DNA, 1799 bp, Cannabis sativa
ttaacagtgatttttagacggaggagtatagagcaaaacagaatgggagtttaggtagttttgtcctaaaaaattaatttttgtggttaagtgttaaaaaatttaacgttcaagtagtttagccgctaatatgccaaagataaatgaatcaacccaatgaatatatgtataacctttaacctgagcaaaagctataaaggcattttaaaacatatataatgactaagtagaaaatgctaaatgttagtgcatggcaatgatctcctaactccttttatcaataaaacgagcaaatgctctcagataacgggccaacgcagcccataaaacaaaatctgtttacagagcatatggagaaattgaagttcatgtgagaaaaaataagagtaatattaatcacagaagggcaaaagaataaagagaccaatgatctctagtcctggccactcccaaagctgtctcggttctcgtgctgccatccatagctttgcccatctcggcccatatcaccggaataatatttgcgtttctggtgtgacatgtgaggaggtgggggaggcggaggaagtgacatgggctgcggggctaatatacccttgccatccctgggatccccggcctgcattggttccagccctttgtttgccataggtgttggatagcgtccgaattctccttggtaatatggaccttttccttgagaatccggcatgttagtgaaactatcttgacctgcttgaggaggttcagaaggcatattggcctgtcctgcattccacggctggtgatagtttgcttggaaatgcatgttacctgcagaaccgggtgggaaacccaacagtgacccttgttctgatcctttttctggtgtcgaatcttggcgtgtcatatcataaggagcactgtaaaatggttgagatccatcgccagggaacggaggatagccaaacggtaaggagggattcatcatctggttcgagttcattggcatcatgtagttgggtggctgcatggcatgcatgggtggatactcagagaagggagtctcagacaaacctccttgttgtttgtctgaatacagaccagattcctgctttacagcacccggtgagtcaaagttttgttgttggaaggggttgtggggaccaggcctatcaaaaccttgatgtcggtagtctggttgcagatctgattgattattctgtacttgattgaaaccttgaggttgctttggttgtattattggccttgtaactgattgttctcttgtttgctgacgtcgagctttgtcatctcgatcatgaagctgtgagtttgaactaggagagaagcctggcctgagtggcgctcgaaggttggaatcagatactgatgattgtttgacactctgagcttcagattcaataatatcttctttctctggatttaactgaagaagttctgcatggttctcatgaatatgagattcaaagtctatcctcttcaagaaagactttaggcaatgaggggctgcacagatgaaaattccctccataattttgattgtttgaatcttctgaattcgttcatcacaactgtgagacagaaaattgagagcaagaatcttagaagattaatgttttataaaaattacagattatttctttatgtcattctcaaacaagtaggaaactagtaagaagtaaatgtagtgaagtatgaacttttctaaatcctccagctaacagacaagaaataacattaacacattgtcaggtaggttgcggtgaggaatccaacaacgaagaccatagtatatt

SEQ ID NO: 43984 - DNA, 1610 bp, Cannabis sativa
gatgcagaaactacaaaggcatagatttgtctcaaacaacaaagagtgtgtaaactttcttaagataaagaaagactagtatagtgttcaaagataaagactggaaggccgaggcggccttggaacaagtagaacaatctattgagatcggagtgtgcttttgatacaccaatcaatattactaaagccagagaaaagaatcaaattgtgacacacaacaagaaacaaaaaaagttatgtacaagaccaatgcagaaacaggtaagggttggaaggcagcattcactattacttttccaccttcagataattcctaagtatttcttttccaaatactcaacttatgatatttggatccaattgagagaactggatatgaccctctacacattgcagcaaaacaacgagcaaatcttttagacattttatagtgaacttcaccttttacaactgaagaatgactgatggaaacatctaaatatgagcaggattttttatgagaatgcagatcccaatcacctagccattgagtagggcttctgtagtttcaaggagaacattgattgtttgtctcacaaagtactaaagagctattaattggaagtctgatcaaataccatttcctgtaacattgtaaaacataaattctaagcaaaataattgcacagctctcaattcaagtctgaacattccacttattaagtacagtaacatcagggcatgagttaattgttttagtagacatacctggtcacatattgggcaggcatcacttctttccatccactcaagaatgcatgacaggtgaaaatagtgttcgcatttcatgacaaattttggattctctgaatcgtactctgcatgtagatatgtatgaatcattagaaaaataccaacaagagcattaatttcaaaaggcagaaagggtattgcaccttcaagacagatgggacaagcatcctcttcttctttaggtaaaatattaaggtcttgtggttttgagagttccaacatttttgacgagacatccaaggaatttgcattagctttgcagtctgcgtcctcaagatctacacaggtagctgaagttttgaaactgctacagctaattgtttcttctttagaagactcagaatcagttgatactggacaaccaaaaactaaatcatatggcaaaggcgcaggaggaggatggtaagtatcaggtgttgatgtgtccagatccaaatgaaccaagagtcctgcagtgatttcggactgcagaccgttgtgagatgccaaggagtcttgctcttccaaaggtggggggtactgcagaaaaaatatatcaatcatttcaagaatgacaccttccaaagctcagtctgctgcttgtgttagcaacataaatgctcaagcacaagcatataaggtatacaaaagttaagtgataagagaatgataatgtactgacatagtaatatacaggtgctccatgcaaatgagcttttctggaagaacagcagcaccctcccattgcctacaatttattttgttatccagccaaaataatccaaaattgaggcattgctccctgttatttgacattatatgaggcttatttccaacat

SEQ ID NO: 43985 - DNA, 1493 bp, Cannabis sativa
  modified_base (1247)..(1251): a, c, t, g, unknown or other
acacgcattgaagtgtcactaaaacactttagacactctcaaaacgtgtcactaaaaggtatttttgtagtagtgaaaaaagagtctctttagctctcttggacgtacagatgtggagaagctagcccaatattacacctatacatgatataatattatgatatccttaaccaatttattctttattcttcttcttctttttttttttaaaaaagaatctttaaccaatttattgaagttataagtttgtttaattggtccttgaaaacattaaagctaacactagtagtacatgtgatatcataatgaattgagagtacaatagacatgacttctgtttcttatttgttattttctcatttttttcttaagtttgcttaatcattaattgtcaaaataaaaattagaaataattatatagaaacacaaatataggctagcaaagctcgatcaatacatatgtacatctctcatatccatatgtatgtaattaataatatatataatataatgatatcacactataattgcgagtcaacatggattcaaacatggcccaaacaacgtatatatgtacgtacagtactatactacactagaattggtgataatatttctttaatttaatatatacgttatacatttacttaatctttcctttctttcttttcccttatatttatgatgatgcaggattctggaaagtcattattatctcatcgtcctaattaccaattttaatacttagtttctatttctatatgggcctgatacttggctagttatggtaatgtcaaagcaactaattatggcttattttgaaataaagaggtgggacagcattatttaggagtgactgtgacacataatcataccaagtcagaggtatatgcaaaccggaaaaatagactcacttgttgttgaatagttatatatttgatgaataatcttatttagcgtgatgaccaattttttctttttgtcattttgtctttttttttctcccttaaatattttatcatttgaatgtttttagctttatcaatttcatatatctatcaatctatttatagaaaaccaattatgcgtgttaatgtatttacacttatatctcatatttatatcttataaaattaacttaaccaggtacatataatccagggattattttacacaaacataacaacaataaaaaaattacaaaaatacagatttacgaaatattttttgattttatttacataaannnnngtctttttatgttgaaatcttgttaatttgttgttgattttttgttatttgtattttattttttgttgttattttcatgttacttttatgtagtttttatattaattttatgttgttttcgtgttaattttttaaaaatcgtaaaaatgtaaaaaaaatattctttaaatataaaaatataaatattttacaaaaaatagtacttatgtaattattcttataatatacacgtatggagtgta

SEQ ID NO: 43986 - DNA, 2784 bp, Cannabis sativa
tataccgtgtaaatttccctttagaacgagagaattggggaataggattttttataaaaatactagattttaggtaaaagttaacacaatattggaacaaccgtgaaaacttaacacaatacacagtataaactcttgtagaatattacttgctaaacttcattcatgagcactatgcaaaatcattttttaggtgtaaaaatcaaaatatttaaattttaaattgctaacaaaagatattttaagatttgattttgatttacaaagtttagtacatggaattagagtcattaatctatatatacatttcattttaaaagcaaaggtaaaaactaaaaagtgaacaagaagctcttgacactatatccattttacaaaatttcatttatttttaattttaattgtgtacgattaagtataaaattaatttgagtatgtcatgacaattactctttatatataattttgtgtgtataattttgttttttttttataatgttgttgttgactttaaatatattttttttgacaaggactctaaatattatttttacttcactttaaaagtatataaattcattttttttttattttctataaaaaaatcatctttttattttatttggtccacttaaggaatttttaattagagataattttaatttaaaaattttattaaaaataacatttaattattattaaacgtgtttaattacttaattattgtggttatcatattatgactaaaatgtttttaatactaatatcaaattgtgtatcattatataaatttgtgccactcttgtcaacttttaaatcttccacttttattttttatttttgaacaaaagatttcggcaacaattgagaaagagaggttaaagtattatagcatgatcatatccctatatttcattttcatgtcccaaaaagtaataataaagtaaaaaacactatgttaaaaaaaattgacttcacataattatgaagggagtcaataataacttcaaagagagacaatatttattttttattttttttaatttatatatttttctcacaataaaataaagggagtcaatcatttgtctaaaaaagtgttcaattcaagtacccccaagcctctactttctttcctttatttaaaatcacaacacaacacaaaaaccataagatccattttcatcaatcactttcaaaatttgtccccacccattatttattacttcacaatgaaggtttattatgcaagttgcaacttaatatctctagaagattttaatacattgtaccaaaccaactatactcaattctatgcatgacttgagtagtgtaagttgtaactttattgtatagttaccattgtccttttggaagaaaattattaccttattacaataataaagaatacatattttattttaaagttttaattttttttaatattttattttaaagttaggaagaagattgtgatgatctggtctcactgtaattagctaatggtataataagtgatagaatcgtgcactatatgtatgagtgttaaatatggatttggatggcgcccatcattaaaagagagagtccacttataaatttaaggaggttctacctcaacactatataactatgctttaacaataaatattttttttatttggataaagagtttgaatctcattatcctctttattgcgagcaatatgtttaactctaatattatttgttgtggagatatgtatttacaaaaaagctcagaatcttgattgaaatggggcttttgatacagtggcgcttgttaggcctacgagcagcaacgttgtaagcctgataaccaattgtcggacgacatgtggattcagagctctatttcagttggaacacgtagcattgttcatatgtctttagggatgagaacttttaagtcgtgtttgtcaatgacttaattaatggggataacatataagtatttgaaattgttaaaagtggaagaaatgagagctaaaatctatattcatgtaattttttttattgagaaaaataaaacaaaattataatgttaattatgatgttatgctaataagctatctatatgtaataagttgcaataattataaagtaaaacacataatttgttagcaatctaaaatccactttttttcatgaataaaaaagtccattttctttgcaaatataggttcctttttcttttttattttccaccaaccatttttgttaagaatcttttcatttcattttattttttaatttcttcttatatttcacctttatttacgtggaaacacatttcatcatttttttttaaggtgggtccattttgtatagttcaaatctatcctaattttattatttaattattagtaaaagtattaattatagtgaagaatcaaaccaaaaaaaattctcaaatatttatatatttatttaataagaagtgacaagctttgatttctctcactcaattcgaatatggacaaatttgttatctaataaacataatccatcaaaattcaattttaatacaaatttcaatcaatttgtcccctcaaaataaaaagaatcctaaaaagtggtctatatataacttatttatttcacctctaaaattataatagtcgaatttaaaggcaccccttttctaacccaaagcttaagtttttttttttttaattaagtagataattcaagtcattttaattaatatttatatgtatgagtacctaatatatcattaggtacatgtatatatatatatataca

SEQ ID NO: 43987 - DNA, 3705 bp, Cannabis sativa
attgtttcattaaaacaacaagaaatgactcaaaaatgtttggagttatttattacaattgtgttgtgatcaaaccaaatatgatcttgtcattaagctaaaagactattcaaaacaaaacaaatcaatataataatatagttaataatattaatactaaattaattaggcccaaataaacaatgattagctaattaatcaaatggccggcacagctactactatccatcatagccggctctctctctttagataaaaaaaaaaaaagccatttttgaactctctgcctttgaaaccaaaaccaatatgttaagccttttttctcttcaataaagtaagtacttctcttaaattctatgttatgttgtgttgtgttatgttatgttatgttgatactataacatgttaaactttgtttgaatatagtttgttaaagatggttggaaactacaagaaaaattactcaatggacaaaaaggagatagttagattaattagtacaacagttgatagtttcattagagatagattaatcaacaaacaagagagaattcaacacaaggaagattgtttagagagattagcagctgaagatgttagctctttcggggacgaaaacaaagaggaggttgttattaggtactctgatcaagctgttttggcgaatttggattggggtattgaggccttagaagaagccatagctacatccaacatggaaacaaagcttgcacgtttggactatgctgagaagatgttacacgtgtgtgctatgttgaattcggatcaaaaaactgctggtgttcctaacttttacctctctgcttggtctcatctaaatttagcttacttgtggaaattaaggagtaacaacaatgttactaattgtgttcttcatgttcttgagatgtttatagttgatccattcttttcgcgaattgattttgctcccgagctttggaaggagttgtttcttcctcatatggggtcaattttcggttggtattgtgaggagaggcagagattacttgtcatggaagttatccctaatgattattctaatgtgtctttcactattgatttggaagagttgtttaatgagtctttgattggttctttgaggcctgatcaagttgagaaattgaagaaattggaagaggttttcggtgagtcattggatgaaagtactaaactttatgctaagtattttaaggattgtatgaagtttaaagatgatgatgatgattatgatgatgatgataacaagaaaatgattccaatgtttcctattgctgaaccaccaatgactcctttgcatgaactcagtcattccattcctgattttgttaaatttggtccaatcttgcctagaagtgctggttttgctccattccttaaatcaaaaaatgctataagaaactcaacaaggttagtcttttattgctatgatcaatctcctatttcaacttctttctgaatcttcgcttccaaaaacatatgttggagtattttcatatacaacatctcccaaatagttttcagtaccgataacagagttccttatattttgatatggtactcttacatatatttttctgttgacgaaatttaagaaagttgtaattaatactcctcgtaatgttgtagtgaaaatgactttcttttctgataatttttggtaaaatgatctctgtgtgattataacatgtaatataatgtttctaacatttgtggaattggaaaggggtccaatgataatgaatgaaacatcaaaagtctcacagaatttggaggagtctcttagatgggttccaaaggtatatctcaaaaaactgttctattatctttattgctgtcataatttgcagtaacattatagatttttgattgttgttgttggtgattatatcaggaagaattgcctgaagaaaatgaagatgattatgattatgagcaagatgaaattgttaatgttaatgttgattctaatgacaaaacccgaaaatttgcttctactagcaacaacaaagaaaatgaacaaaaaacaaaaccatctaagatgaaaactccattatattctccaacagtgttttctcctcctaaaacttctccaaaaccagatgtgaagagtgaattcccttctctgttgcgcctcaaatccagtcgtttcatcgattcgaacatagccatatctccacctataagtaatgattatagcattagctcagaatctgatggtgaagtaatggtatgaacaaaatgtcttactctagttttaatgattctaacttacttttattattgagaattgaaatgttatattgggttgtaaatgaatctcttttgcaaaattcaggaggttctttcacaaggttcaaaccaaaagtgtagtcaaaatcgaagtttcgaaaatcttaacaatcaattgttcaagaataggtaattttctttgcatttgattttgttttttcaagctaattcatagttcttagctttggttttgaaataatgtctctgtacattctgccttctgaggtatctctttttcatgttgcgatccatgtattgacttagaataccaaaagaaatctctcttgatttaatagacttttccaaccaaaaagaaagaaagaaaaaagttagtttacatttggttggaggaaatgaaatagaattcaaaggaattaattttcatgttatttctttgtttagttggattttggtggaatagtcattccattttgaaataaaagaaaataccattccaataataagaaaagattccataattttttatcgatttttttttatacatattaaattttatataattccattcgatccctatttccattctcatttattcgtcccaatcaaacataccccttactttcttgccttttcttttgagttatgttaggttgtaattttagtattttgatccaatgtgtgtgaaatttgccaaataagcaacatgaaagtataaaatttgtaaaataaataaccctattgaatttacacagttgtaaatttatggttgcaaaacgaccataatttatggtttcataatgactaattttacaaaacactctccatgtattagcttagaatgcctaaagaaatctcatttgatttaataatcttttcttaccaaatgggaaaaaaggttatttctttgctttttctttagagttatatgaattttgtttgcacttaaccttgaaatagtgaccacatataagttgatattctttgttatattcttcattatttgaattccacagctcactaagtgatgaaaatgaggcaagccaaagctgcaattcacttccattatcagagaaatcaactccaactacaccaagaccaccaaaggattttgtgtgtcccatcacaggtcaaatattttgtgacccggttacactcgaaacaggtcaaacatatgagagaaaagcaattcaagaatggcttaaaagaggaaacacaacatgtcccattacaagacaacctttgtctgcaactacattgcctaaaaccaactatgtcttaaaaagacttataaattcttggaaagaaggactccctcgcgaatttctttccccgagagatacctcattagcctctactccacgcggtggaggagcatttgatgagcttgttaaccaaagaaacagaagatttacacgagctgcagcagcgacggct

SEQ ID NO: 43988 - DNA, 1585 bp, Cannabis sativa
aaacaaaaatacatcagagatcttctttccagaactcaactcctttattcgaaaccttaaccaactccaatgtgctccacaatcaaacccactacaaactcaggaacccctatgcaaaatccaacaaggtacaaaagtgttataggtgctctataatacctaaaggcctgatatagcctttgttgtcaataagttgaaccaattcatgcaatctcctacttctgagcattggtctgcttgcaagagagtgctgaggtatcttgctggcacttcggatgctggtctcttcttcaaaccaaccaaaatatttgatctctaaggttttactggtgcagactgggctggatgtcatgatgataggagatcaatttttggatattgaatctttctaggaggaaaattaattagttggtgctctaaaagcaaacaattattgctcgatcaagtacaaaatcaaagtatcaagcatttgctctgggaacctctaaactcatcaggatcaattctattctcagtgaattaagcataacaatctcctaatgtccaatcttgtggtgtgataatcttggcgcagggtctttagcctccaatcaagtttttcatgcctgcacaaagtacattcaagttgatattcattttgtgtgagatatagccattgctcaacaacctgatgttcgatatgttgcttctgaaaacttgtagaccttttcacaaagccacttccaagcataacttttcatctcttatatgacaagttaacacttggtctagaccagtgtcacttgagggggatgttagactaactgaactagaagagttagttaaagttaattaattgttagttggggtttgtcaaggtctattacactttactgttgagctataattgtacttgattggaatataaatatagaggctaagctaccagtgataggccgagcctcattttctatcctttatattcttcaccattttcattaccttgttgtcctctctctctctctctctctctctctctctctctatttttgaacaacactctaaaatttagagttcacacaatccagaacaatagatgctgataaatgacattttgtatccccttcccatataaccttgtgaagggtacttgcatagactaggggtcccttaagggacacaattaactcctgagtgatttgggacatgtcacgtagaatattttttattcgggtctcataccttattcaaatatatggggtctgaattgggtcaatatttaataaatcttgttatttattattgattacaagttgttactaattttatttcaattttaactaagtacacatttaatcatgattttttatgtttttttatttgggattagtacctgtaaccacaatttttttcaataataacatataaagttgttttatttattcttattttacttgaaaattttgatattatatgcttaaaattaatttatccactaaaaatatgcttgcatattttgcataatgcaaaatatacttacaccatttttctcatctaattttacccctaaaataaaaaccaaatatccatctctctctctctctct

SEQ ID NO: 43989 - DNA, 1967 bp, Cannabis sativa
  modified_base (52)..(54): a, c, t, g, unknown or other
ctctttctctcttcatcttcttcttctttcttctcatttactttatattatnnnatattattttataacaaatttaataaaaaagcaataataactcttattgatcatataacaattgcaaatatgcctactaataactgggtaggcaagttctgttcctctctctgaaaaaagttatccatcatcactattccacacccgcaatgttttacccactctcgtaacctttcaccctaaattcacgcgcttttctgccaacaatttcacggcgttgacattcatacaaaactaaagcgcgtggatcactaaatcatgttccccacgaaaaagaaaatataaaatttcattctatctggatggttcagattctttctccaccgtccgattgattaaatatcttactctttcaaaattaagtctgcagattctaacaatcgtcaccgacaccttcttctacgtctctctattttctaggttccgagaaaatacgaaagaaaacaaaatccatgattatattttgaaaccattttaaattaattttaaaatgtggatgaaggtggtagatgagttagtacgatgaatgactcatttcagctaacttaattctttatttccttttaaaccaatttaatagtcgaattagaagaattcaaatgactttttctctattgtttttttctcacttaccaaacagaatgattcggtgaaaaaaaaaaaaacagttatcgtcaaaaccgtacttaccgcgtcccaaactcaagtttcttttaaatataatttaatttacaataataaaaaaaaactatgtaataatggaaaaacataattacaatttcccgttttgaaatcatcaatcgtctcttagccggacgacaacgacgtcgttttcgaaaacgatgacttggttgaatttgcgcaaaacttagaactctgagactgcattttacccaaaacgaaatggcccaaagaatcgattttctcaaccaaattctcatcgcagagaaactcttcactgaaaaccttttctacctgtctctcaaaatcatgaacaaacacatgggttttcgctgcaccgtctgttttactcctggccagaattccggcagtgaatattgccgacatccggccaggtgccgccgggaaatagcctcttggtccatcaacgagaataacatcccatgggacttggtatatgtggttgggcaaatcgttaatacccagtttacaatctgagaagagaaggttctgaacagggcggcactcatcacgagcctgagatttggccgccgcgagtagggtcgacgagtccttgaccttagtggtgtattgaacgtcgtaggcttcgattcccgggtgagactgttcgaatttcgagactagaaactcgctctcgtcgaggaggacagtacggccgttgtggttcagggcttgccagagaagtgattcgtgggttagaccgaagacgagaaagttgcagccggagggtgttccgccacagtggcgtagtgcggtagctacggcgttaatctcggcggaagtcatggctggtccgaagccagatgtgttggacatggcagcgtagtgaagtaaggcgtcggcgacggaacgtgggagaggggcagtggaatcgaggccggggaaggaggaagatgaggcgtggttgcggagtgcagcaccggtggggatggtggaattgaaaagggttatagtgaatgctaaagtgaagaaggttacgaagaagatgagccagagtcggtgggaaccggcggtaggggtttgcttggcatggatggaagggtggagtagtatgagcttggtgttgttggcattggtcttcatttttggttagactgagagaaagagagaaagagaaaggaagagatagcgcctatagaaggaaggaggtgcttaaagttttatgaagaattgaattgaattgtttaaagtttgaagagagagagtccccc

SEQ ID NO: 43990 - DNA, 1142 bp, Cannabis sativa
ttatgagattcttggtaatagatgggacatgaagaatatttttaagatgaagaggcttactagctgctaatgaacaagatccaacatttttaattaagagagattggccattacctacaacaagtttttccttgcctttgtaaggtgcttgttgttgcagattgttgttatctgaggtaacatgattcgaagcgccactgtccaaataccagttggagtcttcagtggttgagggagaagcaacatatgcttgtggtgggttagaagcagggttgaggttatcatctgggccattataactcaaatcaaatcttttgtagcatctctgaacagtatgtccaaccctgttgcataattgacagatggggcgatttgtctgatttggtggtctgccattcgagttgcctcgtcctcgattgtttggataagtgccacggcctctgttgcctggattgggatttctggattgttgactggaattgggaggagtggatttcttgaattgggcgatgttggcagatgcaccttggagatcaagagtcaggtgagcagcatgagattctagtctgatctcatggttttgtagcagaaattggacttcttgaagagttaaattgtcacgggaggtgagattaacgacaacagcttcatattcaggtccgagaccagcaagaacatataagatgagttgatcatcagtgatctgatttccagcagctcgtaatccatcagcaagatttttcatctttaggagatattcatcaactggcagggatcccttcttggtgttctgcagttgactcatgagatgaatcaatctggctttggaggtggtgccaaagagctgttcgagagtcctccatagctcgtgagccgagttgcaattgaccacatgtcccagcatgttttcagagatagaagacattagccacgataataaaaactgatctaaacgcatccatcgaatgtaatcagggttcaatacctgagtggtgctttcaggaggttgtcgaatgcgttgttgaggaggattcaagttctgtaggattgattcaagatcatgagcacggatggctggtagaacctgtgatctccaaaagaagtagttgttgcgatcaagacgcaggggagggaggaacatc

SEQ ID NO: 43991 - DNA, 1121 bp, Cannabis sativa
aaaaatagttttatagaacatgttcttaaaaaatatttttacttttccaattttaaaaacagaaaaactgattaaaaaagtgttactaaacgccaccttatttttcaaaattaaggtcaatttgtatctcaacccttttgttaaataggaaaattgattgttaccaaacgccaccttagttttcaaaagtgtcaccaaattgattgttctggtttgatccacgaaagcctccacgaccaccgttcttgggaccttgtggtggtatgtaaggattgttcttgatccagagaaagccacattagcttaaagattcatgctctaatctttcatggtattgtggtgtttaagtcaactctcgtgagagagtgagagagtaagagagcttgaacctcttcaaacgtaagaaggtcactgcatgcaatgattcctgagacaactgagtcgaactcaggcccaagaccgttgagcaactggagaatgacatcttgattaggtataagagagcctgatacagtcaatgagtcactaatcaactgaaattttttgacatattcagagacagaatggccttcttttcgaattgttgagaactgacttttgagctaaagtagtaattgagccttggattgaatggaaaatttctattctaaggcacaccaaacagagtgagaggtggtgaaactagccacagatgcaagaaccccttcagtcatagacaatcgcaaccaagagaggagcaattgatcatctttttgtttccattgactgtgagcaggatttagatcgccggtgatcaattgagttggtggaggaataccagttaacaaggtttcatcaagatcgtgtccaatcattggggatgatctgagattttcaagataagaagttagtacgatctaatttgattgttagagtagaggttaaagaactagcaaacggattccaagtggagttcatcgaattcgagggagtagcggtagccttaagaaggaccgattgagttgttggagctttgggattagggatcggaccgatggaagtagactccattgaagacactagtcaaaggtgactaataccatgtcaatgtttcagagtatgaaaatagagtaaggaagaga

SEQ ID NO: 43992 - DNA, 1393 bp, Cannabis sativa
tgcttcgaccccgcgttgaacgctgtaccatttgttgaagataaaagtacatcgaacccatatgaattttacatatccattgggtaaatataggttcgatcaagatttgtttttctaaagtaccaaaagcaagcatgacatcattatgaacataaagtcccaaagtatggaaccctagaaagaggcttgcccaacctaaatgggaaatgatagcttctttatggtctaacattcttgccaatacattatcctggcactaccacacatggaaaccgtgcaagcactaagcaagcatcaggcatggagacctccaagagggaaatcaccttcgagcaagagcccaaaaaggactaaagctcgtgggcgccaaccgatgggcctaccacctgatgtggaacaactttagtaatcgagagaaccaacatgactcctccactaagtcctccttaatgctctcatgataccaggccccgagaacctacaaggggaaagggacctacccttcaagacaactgaggtggatgaagaacttactttgagactgaaggctatgagatccgttgggtaaggaccattgaaccacttcatacttgaatatacttttgagatgaaagggatgagttgtgtcgttacttttctcgtggcccccatggcaagcagtatgagtactttccttgagtacatcgagagaagttaaacttgaacaactagctcaattatcttcacacttgtgatccagatgaagattactttgagggaagtagccactacaacgctttgagtgaccactcccacagcggattatctcaagatgatctggaagtcatctcgaaggcatcaccagaggttcctccacgaccccatggtcaggagacaacgaaaagacccaagtcgaccggagtccatggctcacttggaagaccaagagacctatgtgacctcttgaccagaagatggttggtggaatcagagacttctaaaagagaccctactcgagtaacagaagctccaattgggattcagagcaccgtccatggggtcaactaggtagaatttgacactttagcgaccttagtgaaagggatcccgacccctaaattgtcagaatttgaacttgacagagagcagcactcaccactctctaaacgaatcaaagcttaccctatccctctaaagtttaagaacccttcctgacatcaatacaccaagaaggaagatccactgtctcacatcccctactttgaagtccagactgagttttaaggtgtgagagatgatgttaggtgcagaatcttccctgccactctaacaggccttgatagcagtggttccttaagctctccacactgacatgcctagatcagtgggacgagggagagtttctcatcagaca

SEQ ID NO: 43993 - DNA, 2010 bp, Cannabis sativa
attacattctgttcaatttttaaaaataatttgtttatgtgactaaaaattacaaaaacagtttcagtagaatgacttatttaataactttaaactatctaaaatttaatttactctaaaaatacattgacatattttcataatttatcattagactcttatttatgtatttatttttaatctaggctcttgaattgtgttaattaaattaacgttatgttagtgttgtatcaataaattatttaaataaatgaataaaatgcaacttcaaaaaggtatttccaataatttttataacttggggatccgcaacagagaaaagtttaagaggtaaaactttacaataatcattattctaaatttaatgtattggaagatatataagtatgtgaaaattttaatttagttaacctattataaatagggttttgacgatggaataaatattgctatgattttataatacatatctactagagcaagtcaaaggaagcagaaataataaacttaaaaactctccaaaatgaatgtcaaaatgaaagtttaaccttaagtagtactttgatatcacaataatattaaaaatggaaatacatctaaaaaaaatgaaaataaaattatttattctcttgatatttttttctatctattccatactcaaaatattagagtatcaccaagatagatcaaactaggtttgaattgaattaggttcccgtttaaagttattcattatattcacagaactttgtaaggaaatattttttttcaaaataaaaataaataaatttcacacttgaacaatatataagggaattcacaatgcctttgaagtttgaagttgtttgattgtgttttcagtttttaattttcagaattgtattttcaaaagtgaggatagagaatagttttttgtcatttgaaattaatggtgtttggctcatgttttttaaaattatttttaaattttttttactaaaaaaaattaatattctacaccataccatgacatgaacccatcctaccccagattcagaccccggactcggaccaagtccccagaccaagacccgaagctggaccccaacttagacccagagacccgaaccccaaacccagacctaaacacagacccagaccccagacttcggaccaagacctagacccatacccgaacgtggacctaggtcttgggtcgtgttcggggtctgtgtcctggtcccaatctaggtcttggtccaggtttgtgatctaaggtctgggttagggtcttggtctggctccgacatctaggtttgggttcagggtctggggtcctaggtctggggtccaaggttctagtctaggtcttgggtcttagttcgggtccaaggtctaaggttcgggaataggtctagggtttgagttcagggttcgggtctagggtctggggtttgagtttgggtcttggtctaggtccagggtttgggttcgggtttggggtctcgatcttggtctgggttcgagtttggggttcgggtccagggtctagggttcgagtttgagtcttggtccagggttcggggtctggggttcgggtcttggtccgggtctagggtctagggtctgggtccaagtctggggtcttaggttcgagtcttagtctagggtctaagcccgggtctgggtctagggtccaggtccatgtttggggttcaagtccatgtccagggtttggttcctgggtcttggttcgggacaagatctaggtatgggtttgggttcgggtcttggtctaggtttgagttcgggtccagggtcttagtctcagtctagggtttagctctggatctaggttcggggtccggggcctaggtatgggtccggggtctaggtcttggtcttggtccgagtctggggtccagtccgagtccggggtccaagtctgggtctagggtccaggtcttggtcttggtttgggtctaggtttgggtccgggttcaaggtctgagtatgtgaacaaaaatataa

SEQ ID NO: 43994 - DNA, 1219 bp, Cannabis sativa
attttgaagagtgggaaagtgttatactagtgtagagtttattagtaatttgcaaagggtgtgaatcactataaatatgaattgtatagctattatgggagagaaggagtagatagaactttggttcaattgggagattggcattgtctcgaagagtgcatttcggagatttgtcctgtctcgaagatgtcccgtatctatcacttcctctagtttcccatgaagaaagtttgtagtaacatccatctattccacttctagattgaagtgtgtaactagagccaacatgattctaatagttttgtacttggcaattggtgagaaaatcatgtacaatctatcctttcctttcgtgtgagccctttggaagataaccttgcattctacctaattggatctacatttttgattccttctttgtgtttgaacaaccatttacatgtaactatgttcttaattccatcaggccttcttaccaatctccaagtcttgttcttcttaagagaagtcatcttctcacccatagccttgttccattttgctgcatctctggacttaattgcttcttcatagaagtttggctctatgttattgattttcattgtagtgagtaaagcatttactagcacttcattgcattgaaactaaacctttgagtagctttgagaattctctttgctctatctctgttgagtttaaactatgagatgttctctttacaatttccaggttgattttcttttgtttgttccacctgacctatgtcaggttatgttgtgtctgtttgaaattgttctactggggttggttccacctgaccattgtcaggtctagttcctggttattctacttaaaaaggatgtgggggctttgttagtgtctaaagtacctgcacttgaaccatcatttgtaatgcaaggaaaattgttttctttaaagaacacatgtaactccctaaccctgagtgacgccacatgtatagttttataaattagtttataatcataaattaaagatttaaataaaattatgatttaattaaaactttattaattactttgaaatataacactttttacattaggatccccttttaaaatattacaaaaataaccgaacaatattacataaaaatatacaatggtcggaagttccataaacaaagtctcaataacttggcactgctattaggataagccgatatgtacatttgtcagga

SEQ ID NO: 43995 - DNA, 2281 bp, Cannabis sativa
taatattttgttgctttcaaaaaatatatattatcttgtcatatataaactcgtttgtcattctcaacaaaataaatagaatgaaacttttattgggttacaaaactgaaataaactatgccatatagttatcaaattttcactgatcgtatgtatttatgaaggttaaaaatgcttatagttataaattttgtatatctccgaaagtgttcatgagatttttacttgtatgtattggttgaagtagaaatgagtatacatatatacatttttaaacaggtaaatttagaaaatcgtgcaaaaagttctttgactttatgacttcccaatgggtactttaactctagacactaacttcttctcttctgctgctgctgtaagtattttatttaatttttctatgtaaaataaaagaaaaaggaaatgattattgctgttttgaaattcaaagtgtggaatagagaatttttgttttaaaaaaaataaaaataaagaattgtaaaggggacttggggagcttattgggaagaaggaaagaggagaagtgttcacgggaagagtttgaagctgaaaatggtattgttttgaaaattcagaattagctaagtttggaaatagttttaaaaaattttgaccaaaaaggtttcgaattgggaaagaatggaaatgaaaactattttctgtcacttccgttataaatatcacctggattgatgtgtggtttgcacagcacagcatagcaaagagcagcagagagcacatattagagacaaaatacaggtcatgctgagactactgaggggggatgggtacgacaaaatgctcaaccacaacaacacaccaattggggaatatcgtacggtaactgtaaataacaaattattaaaatttcaaactcactcccaaaaaaaaaaagaaaacaaacaaaccccacccacttttgcttctaatataaactagaaaaaataagattttttttttctctcgaattaaaatttttgtagggtttttcacatatatttctcctgatttttttctttttattcataaaagaattacaaatgtccaatgttctccattcgttacttcttgtttatttttctaaaataatttattttttggtaagcaagactcattccattactcacttcaaaaacaattacaaataatcactttgtttgtataccccatcacccctgtacaaatttccttaattctctatatctatacaaatagaatcaaaaatactcggaacattacatcacatttaactcttttaactaagtgtcctatgctacataatttctgagaccatatacatcattccttccttgctctccacaaatgataaatcaaagctgtacaaatagcagcataaatcaaagttggctttgtgtattcttgccaataaaccatctaaggacttgtttggtgtgtaccaccccatccagttcctggtctttgtaagacattgctaactgtaattcaaattaaagaacaaattggatgcatttttcttgatcgatcacagaataaacagctttgatctatagtagaatcaaatgtggcaatcctagatcttgtgcgaagcctccccaatactgctagccaagtaataaatgtggtgttttggaatacacagccttccccaaatttcattgctccagtatattttttcatgtgaaagaaaatgttagaaattatatgtaaagtatgaaacatatataattatgtatgaaaatgcgaaatttacgaacataaagccaagaaaattatgatttaaaactatttgtatggagtaaccaaaagttttcaattacagtgataagaagggaaatttcgataataagtctattcaatggacttaacaaaacttctccttttatatatataaaaaaaacttctcaatactagtatcataggtttgaaattatctaaacctgtggtttgtggtatgcttggtaatttacttgctctagtacaagcaacatactttagtaagatgctggagcattttctaatggctaactctaaaggaagccttttggcttctagacatagagtgtatctaaggaataattttaactattccagaaaagataacaatcatgaaaaaaattctttaagcatcaatagtgagaggtctcatatatactctggtatcctatttataagtagtttaaaaaaggaattaatcatttcaaaattcaaatttgaatttcccccaaaaagtgtacgttacgcactcattgtagggagtgtatgttgggttttatgccct

SEQ ID NO: 43996 - DNA, 2910 bp, Cannabis sativa
aaaaaacaatacaaagtgttatttttccattgtttcagaataaagttgttttgacgttgctgctatgggaaagtaaaatgaaagaaatatttttttgtgaaaaaaaaacaagtgaaaatctataaaaaataataaaaaaaaagtctgtaaaattataaataaaaagaaaagactgtaaaaatgtaaatatatatataaaaattatttttaggtgtattgtatatgtcatctcaaattacacaagctggcgtaacatccaacatggtgacacgtggagaacattgagaaatttgaacaattggtttctctcaagcagcccgaccaaagaactctctatctaaaactgtcaaggttatatcttcaacaaagatcatccagatagaacatgtatgtgattgtccgcatagatcctcattatacaaaaatatcgagtcttccgagcaagctagttcaacataagaagatcttcaaagatactttccataaatattttggcattcaggtctcgatcacctctttgattttgtgtgattgacttgaatcgacaagaaataatagaaaaccttcctagtttccctttttagttttatctgttttgagaaacctaattattgtatttttctctataaataatggagtcattccattgtatagggattcgaaaaccatattttctagagagctctaatattgtaaaagaattgtaagattttcctgagaattcttaagaaactcacttggccaactccttgtgatcatattaattcttctaagtaatacaattaaaaggggagtaggctattactattatcacgggatcaaatcgctataaatctatgtgttcttatttgtttaattacatataattattattcattattattaattattgtctattattctaattgctttaattgactcaacgacgatggctaaaagcgaggttaatattttggtactttcattaagagcaagaagaacactatttatcctttgatcctctctaaagatggttgtaactaccagaaggtcccaaaccacttaaacaactgatccgatagctatggatcttaatgtgcaaactcctgttaataagagcaatccaatggtggcaaatcctaattcgggaacacatctgcctccacaagttttgccatcagcaggacagggagtgacaacccctttggttgggttcactttgggcgcatagaaaactggaaccaccagtactcataagggagagactgggctggttactggagatccatctattggagaacctcaaatggtgattggtgatgatactgaattgcaaaacctgtgagatgccttagggcaagtgcaagaacataccaaaactctacaccgtgattaggaggacaccagagctactgtgaatctagcattcaaacagtttaaatgctaattctaggattggatgaatcaacaaatggagatcgtgaaagcccaacaagaagcgattgataattgctctaggtaggcaatcgtgctgattagacgagcttatcagttaacgaaacaacaatcagtgaagatactctagtgatacaagtccaattagatcaacttaagagcttcgcacaaagcctgactgacccaaaactcaccgacctagaacttgaccaaacaagaggatcacccttttcaccgtaattcaatgccctcgatcttccacacaagttcaaaatgtccacatgaaaaatgtatatgggcaaagaagatttgctctctcacatcaattactttgagatgcaaatgaattacaagctgtaaagggtgatgtatggtgtagaatttttccagctaccttggcagaggttgcctagcagttggacttcaagttagccccagggaagttcagttcatggaactcttttatggcatattttcacgcacaattctcctcctctagacagctcccagctcacttagaggacatggttgaagtaaaatagatagtaggggagcctttaaaggactacatcaataaatttatgaccgatgctataaaagtgaagggattgactaaggaaggaagactagtcactatcctaggaggaatttaactcttgggagaattgtggaaagatattaagaggctcactatggggtcgatgggagaattcttagaccgtgaagacggatttataaatctcgaagaagtagctcgacgagtagacacaattggtcaaaaaaagatcaaccaaagtctgaccaatgctgccaatacctccgtctagcgcaatcaaaactctcagcctaaaaatagcaatagttatctctacatttagctaagcactatttattgagctaaaacatatgtaaaatagctaaggtttatctcacttattggaaactcaattttgtaaatttttctctataatttaaagattgagctattttagctcatttatttggagtgctctaaatacataaaagtaacataaattggcacatcagaacatagttacaaatcaaccaaaaattccaccaaaatatgtacacttaatgctataccgtttttattattaaaggatttttactattatagctttattaggtctaaactttactttttatgactatttagaaaaataaacaaaattagaaaataaaactttttttttcaaaaatacggtatctataagccttcccaaaatgacttcttctcctccacaaaataagtcaacttctccaaacaatcctagatctaaaatcaacaccaccaccaacgatgtagaagctttgccgatcaccatgaacgctgacgagaagtttttttttttcaatctccatgagtgtcagtgagaagctttgcttcaatattcagccatggtaagagctaccaacaatgagagatctccataaaagccgaagagaaaagatcaa

SEQ ID NO: 43997 - DNA, 2037 bp, Cannabis sativa
gcgcccggtagtccacacagaaacaccaactcccattctttttcttcaccaacaagacggggctcgagaatgggctcatactaggctgacaaatccctccttgcaacatttcactcactagtttctcaatctcatccttctgcacatgagggtaacgatagggccgtatactgatcggggctactccgggacgaaggcagatagcatgatctcggtgccaaggtggtggcaattggtttggcatgtcaaagacactagagtactgctgtaataactcagaaatagctgctggaatgtcattctcaacccccacggtggtagtgtgaccaagctccacccataaaccttcatgttcttccttaattgacttgatcatggtctttagtgaaacacgagtcttgtggagggctggattaccacgaaattccacggtttggccgcccctcttgaatctcatgaccccttccttccagttatggtaagtgtcacccaaggtctccaaccattgaactcccaaaattacatcggtacttcccaaggctaaaggtagaaaatcattaataatttctaccgcttgtagtgagaccggcactcctaaacaaattcccgctcccttaactgcttgtcccgtacccatttgaactccatatgactccgtggatgaaatgggaagcttgagtttagtcaccaagcttgtagctatgaaattgtgggtagccccactatcaatgagtaccgtcacctcctggccaagaacgctgcccaccaatttcatagtttttgaagaggttagtcccaccacagaattgagtgacacttccaccacttgtgcctctgtcaacccttcttgtctatggctgccaattcctccatttcttcacattcatcttgcaccaaaataatttgcaactcaggggacttacattgatgtccccttgtccaaggtccatcacacttaaagcaaactcctctagctcttttctcttgcacctctgaatctgtcagcctgcgatatcccttgccaagttcaaattctcttctctcgctgttgggagtcaaagcacgatatgtgctattctgggcagaagggcctttattacttatcccacccagcccaaaataattcttttgattgagcctagttgggctaagtgcagaatgtttaattgggcccattcctttactcggcccactcccaaaagcccttatcaccttcggattggcctccacaatttcagcaagttccatcgtcttctccaacccgactggttcaagaagtcggagtgtgccctgtatctcggagttcaagcccttcatgaacgctgactccagcaacggctcagccatcggacctagcgccgccgtcaacgcctcgaactgctgccggtattcctgcaccgtggatgtttgctgcaacgccaagaagcggtcatacgttgaaccttcatgcgcagggagaaatcgccggagaaggagacccttcaattccgtccagctacgtatttcctgccttcggttctcccacctaaaccagcgaagcgccggaccttccaaacagaccacggctacctccaattgctcctctgtcgtaagcctctgcaaaccaaaataacgctccgcccgatacgtccaatcgtcgggatccgaacctgtaaacagaggtagctcaatgtttctcgggcgaaactccgatcgccttcccccattacctccaaactcctctcgactactctggtttcccgatccactagacccgatcggaggttgaacggatctcgcaattggacttcgtggaccgtcggtgagctccgtcgccattctcgcttgcccacggagaagcaaatcaagcttctcactaattacagcaatgccttgttcgtgagaatcgattttctccttcatcgaattccaatcaccatgaacggaagtttgagattcctcttcctctgattgaaccgcctctatcaccttcttagaacttctggtattggtcatttcttgctcggatcacgtgctctgataccaatttgatgtgcc

SEQ ID NO: 43998 - DNA, 3118 bp, Cannabis sativa
aattctactaaactatatttacttttacacaaataaaacaattattagattaaataacaataatcataatgcatggcatgagtgagctaagtcctaaaatcttctatgtttaatattgaaaaggcactatggatttgattaattttaattggtctaatttggtggctaacaaaataaaagtataattatgactaattttttttatagagcattgttattggacactagtggcgtctagcactttctaaacgtgtcacattgtaattggttagcgatactccataaaagttattacagtgtattatatgggatctgatacttaattgtaccaatagcaatattagtaaaatcacactaaacatagcatttctctttttaatagtatgatttatgctaattatagctaaaatttctcgtgaaaagtgagtaaaatgtcaaaatctcgtacatcatgatttattgtattgtattgtatcgtattgtattgtatatagtattgtgttggattgtattgtattgtgttaatattatttaatacaatactatgtttgatattgacttgtactaataggttttgtaaaattataaattctttacaataaacttgacctcaaccccaaccacggcctggacttggacgtagacctgaccccaacatggacccgcacctagaccccggacccaaaacatgccccgggactcggatccgatcctagacccgaattgggacttggaccccagatccagacctcagacctggaccccagactcgaacccgaacccagactcaaaacctagacccgtgtggtgtatccatcacgaaagaacttcaaagttaagtgtgcttgacttagggtaatttcaggatggttgatctcttggaaagttttcttaagaagcgggcgagtgaggacaaagcacgctagaaagacttgtgtcggtttccaaggtcagtcgtcattccatgaagtcatcaagagtaacgtacctgtgaaaacaagtcattccatggggggatgcccaatagatgtttgaagtgggaacgttacaaacccaagttgtctaatgcttgggtcaaccttgccttcgactaacctctagtgagcttcttcccacctgtaattgcttcatgtcacagatatctaaatgtgaagaagatattgttagagctttaagacccaacaaaagatatttaatttagagaatgagagtttaaagagaaaaagagaataaaaatagaaactatggtagcaacattctctccatggtccgaacccattgcttgggccctaaactctgaagaacatgattatgaaattattaagctcattaataaagttgcacagaaatatattgaagtcccaaaaatcaacactttcaatagcttgaagagaacttttaacaacttaaaagattagaagacacgatttggcagtaaaggaaaaaaaaattaaaatattttgcttcctagagttattttggagagaaaaaggtgaattgcttacaagatttcatattcctaagaacatacaattgagatagagatacaataaaatattatttattttatgccatattaagttatgaaactatgggaaaaatctttaattttttttaatataggcttatagaaaaatattggaaatcgtgggaaaaattacaattaatgtagataatcaaatcaattaaaatttaatcaacaaataattagcaatgacacgattaacaattcacaaactataatcggagataaaacaaagatgaactgagtatctaaaaccaaaaacgataaagcaataaaataataaaatcaacaccaagatatatatttggttcaagtcctatagatcgatgtgatctatggctctattctagttctggaacaccactgaatcttctttattgattgagtaagaatagggtacattacagtcgagatcaattatctattgaatcctctgaaagtgtttatctcacactcttacctaaaaatcttcttcatctacaaaatttttttcatacaaaatctaaatacagtctctctcttttctctgtacatctctctttctctaactctcaatctttctctattcgaaatcaactctcaaaacttgtctgttcatcactccccataaatgataagtgtttgtggtatttataaataagggatatggatcccaaagtcggtggttgtaaaagctaagttgttaagttagttacgacataacaaatttaacaaactcctcataacagaatctccacgtcaactcaagtaaaagtgcttccaaatgagacgtacgctccctgaaaggaagaccagagcgtacactgaagggactttctcaatagaaaagacgacagctgaagtcgactatctgaaattctctttgaggagggaacaactagccatctggaactccttttcggaagaaaactagctttccttggatactcattccggagtggacaagatagacttctggaaactcccttctagacaacatttatcacttcacgagactccttctggatggacaagttagactttcggaaacgcccttttggatgacttctaactttccataataataacaacttttagagacttttatatttaaaggaactataccataaaaatcatcaccatttaacatatatttttttgactatctaatgaaaatcatttatttaacaattttttattatttttaccttaaagttaaaggttaatactgaaaagtttaacttaaaaatctataatagaatttacaatttaaaaatctatgatatatattatttaaagtaataattttataaaataataataataaaaaagcacgtaacatttgttatatttttacttataactttttataaacttttattagtcatttgtatatataatatgtttatatttatttgtgattatgttaattgattgtcattttttgtctttttttttttttttgaaatattgtgaacgatgattatatttgattgatactctttatatatgattatctatgggaaatttgattttctatacttacaaaacttaattttttttttttaaaactaatacattttacactataaaaaatatgacacttttttcaaa

SEQ ID NO: 43999 - DNA, 2405 bp, Cannabis sativa
  modified_base (2100)..(2100): a, c, t, g, unknown or other
agccctaaaactagaaacaaagagtgaaaactaaccgaaatatgacccgaaacttagactaatttaagcctaacacttatacacggctacgtcactttggatgcttcctgaaatgatgactagccctacaaaccaacatgagtatttctagcgtactttgtcctcacttgcacactccttgggaaaacttcccaggaggtcatccatcttaagattactccagttcaagcacgattaacttttgaaccataagaaaatagatcatcacacttgtccaagcggagatagggtttggtaccaaagtcatacgaggatggaggccaacacccctttgatgaaggaggacttagattgggctgacccttagggggtgaattcggaccttgagaaaataaaacaccatgcatgtccaagtggagacaaggcatggtacgaccgttatatgaggatgagacaagagccaacacccttgttgagagtggactcagcctgggccaattggctagtccctaggggatctcgcctgggccgatccctaagggactcggcttgagccgacccctagggggtacttggcttgggctaacccctaaatggttgagtgtggcctagtccattttttagggtgcttcataccaaaggttcacctttggtctataggggttataatcttttccctttagtagttatccctcatataagttttttatatttttctcacaggtttatctcttctaaccatgtgccacatgtgatgcccttgccacgtcactcttgcaaaaatatgggtaaacaatttttctcaagtttctagtagtatgactatacgttggaaacttatgatgtgagccccgactccgtcttgatgacttagtggcactatactgagaataccatgatgttactacaactacaatacatatcaaattcaagaaaaaaaaaatttcctttacatttttacaacatcacccaaataataattctcatcttacaagaaaaatacattgtaaggaaaaataattgattaaaaggaaaataattagctcccttataaaaataataattagagaagaaagttccaagctgtgggggtgcgtgtgagcctcttggtagtattttgtgaattatcggcatgtaatcttcgtagtgggtaagccatgttgactttcaatgaaatcttattgtttgatgcttgagatgtttagtataggctttgggtaactcgattttgactttaattttaagaaatttggactagtaataccccaattttggtattgtgactttgggtattcttgggtgttatgaagaacactaagaacattatgatcgtgagaaacattttttttttattttcgattcttataaaattctccaaaaagtgtttttggatggtgttttgtagataaagggtgtagtatgtaccttggtaaaaatttgaaccactacccattggggctagaaccacgtaggctgaccttccccttaggagtgtggcccaataccactcgaccatggaaacgtacctcactaggccgagagtggctggccctacttggtaaggttgagttctttactagcacactatctcgttgtcatgcggccttggacaaccctcaaagcaccgactcaatactacccggctagggttgagtacataattatggtgtggttagaaattctactcgacttgagatgaataactcattagtgggttcctacttcccacacagcttaggtcgaagccaaaaagatcgagtcatattaggtcggctattaaggggtgagtgcagccttgcccatttttgactaggaccaagcaagatggattttaaggttttctcttcgcttgtatgcttctcccttgtttggatccttgaggatatacacttggttgtcaacacgaccacatgcccatgtccacccgtactatgtgctgggatttatgccctaaaagtaagtatttaatggataatatactatacaatatatgaaatgtaattataagataaattgatacgttaattataaaagtataattaataaatatatgaaaattccttattcatatagagatggtataatcttgtaaggtcgtanaagagaattaagattatacaatatgaataaaataagttggtagtgtattaaagtaagcgatctttaatatagaattaccaagtacggtttactatacactatactctagggtgtgtgattttgattcggatcacatatgtggatatacgtgtagaaaaactattagtgctctattttaataatagtgatgcagtggcaccctcgaaggaacaaagaagccacaagagaggcaagcacattgagtggaagtaccatctactaagaaatatagtatagagagatgatgtgacggtcttgaagattgc

SEQ ID NO: 44000 - DNA, 2594 bp, Cannabis sativa
  modified_base (2554)..(2568): a, c, t, g, unknown or other
agttgtaagttgttcaataatggtggaacttgttttatttgtaggatcctggtaatgagctatacagcaagtctttggaaatcaatgctaaggtatatttcaatgttaagaaccactatttatgtttactactgtttcctgggagacattattaagttaagagtatgtactagaatgatggatagtgtagtttaattggatacaactcgcacatatattatgtaccagaatttgtatgtcatttttttagcttttgtctgctgttattgcttcttttactgctatatatcatgttggtacaagcagatgacttgaaacaatgcatagttattttcgtatcttgtgaagtaacatggagttttgtcatgtgatatggattatggagactggtagtacttagtattagcctaatcatcactgaactaatcttgttattaattaaagaagaccaatatatactgtatgatattgacttgacattacttatcatcagtgttggtaaaaaagcagctcctgtgttattgaagaaattaatttactgctaatgactaggcgatcataaattgtagtaaggtttctgttgggaaatcaatcttgttaactatatagcttgacaaaacaatggtttttgatatgttgacagtagttaaacaaataatctttttactttgaacatgatttgtgttctttctttctgcataatggagttatgaatttagaaatattgtgctagatttgtgtgatagatgataattagatctctctacgtacaatgttataatcaagtttggctcatcaacattgttgattatcctaggcaacagagttgcacacagagatccacaagcatgggctaggtcaacagactgcagctgcaggatctgatacatcctttaatgcaaaggtatttttcacagaattatctgcacgtaatattcatcttatgaatgatttgacaaacctgtttctttgtgtgatatgattcttgcaagttgatcttagatttgttaggtaatcataaaattctcaaacttgctactagatttgtacgcatctatcttaatactgctattaaaagctgcaacttgcatattaacactttcggcactgtcatatctgtgatacatgcagtttcgcattgtgtttgactttttgttcatttctgtcttgttttggacctttagcattagcctgcatacatgctgctggccagaccgtgctctttgttataaatggcctgccctgctttgtgatttgagtctgtatgtcaatttaatggctgttggttcggatctcattagattgattacattttctaaaatatgcatataaaatgcttatatcgaatgttcccacacttgctgttcttgagcttactttggctagaagatggcagaagtatctcttgacagaaaagaggtcgtagttgtgggataagcacataagcataatcttattgttaacctatagctgtttgataaaccaaccctaaaatggttaaacctgttgagtggtataacagaatgtcactgttgttttcttgtgctctattttccaaacattaatagcaagaaaagaacaaagtgtttttccatataaaatatcactgtaaaaagcatataataaatgattaggacttctttacgatactgtttttctttccatatgctcagagttccaagccgaagaagagcagcgatttcaactatgatatttgtggatggatcatccttgcagttgcagttgtcgcatgggtcggaatggcaaaatccaacatgcctccaccaccccctagataagtttttatatccagttatggttaccttaccagtgggatttctggaaggttcaatttttgattagaagacctgctttgttgctatttgatataattcgttatgtctgctatgtattgattatgattagtatgttttctctatgttattcacctagaaaattttacataaattatctgctgctctattgcaaattattggtagccttttgacggtgtatctaatttaagttaattattcgtaggtatttatttctttttcgcactaaatcaaaagttaatttcattattttccaataaaataagataatctttgttaatttgatattctgtttggaaatgaaatgaaaccaaattgatctatttgacactattgtttactgagaaatgttaaaaagtactagtggtgtccaatactaccacgtggtatcattagtgcaattaaatatcgggtttcacaattatttttcgcaagtttctacactgattaattcccttgtttggattggcgtggatttcaattcttattgcaaattgtttttcgaatgataatttagagtgatacttgggtttcattatgtgtaaaaaagttctttaaatttaagggcatggctggaatacaatgaaagtgggtgacttattgtgagatgggtgcagataaggactcattttgggatattcaaactatttaaagtgaaccaataaaaatggtgctgtttggtaatatttttttaatcggttttttgtttttaaaattannnnnnnnnnnnnnntttttaaaaacatattctataaaact

SEQ ID NO: 44001 - DNA, 4766 bp, Cannabis sativa
  modified_base (248)..(248): a, c, t, g, unknown or other
ttgagtatcaacccacactattcaaggtgatacctaggcctttgtagatgactgtgatgaacacaattgaaggaagagaatatctaggttcagatcttgataatgttttgctacaaacatgaatcaagagctagagatttgtacggaatgagtcatattattttggtgccattaatgtaagtttttctataactcttatgtgtttatttgtcgtttttagaaatttcatatttaggatgttagattanagaattataatcaacatacatgttagtaaatatagatcctggtaaaataagtttccaacaccaacaatttctttagccgcagagaacttgttattcacaactactagcagtgattcaatgacgattcatcaaagaacaaagaagacgaatcaataacgaaacaaaacaaaacatacgaaacaatgtcacaaatataagactatgacttaaataaaagacacttaaaaccatgtcagaaaaacaagattaattgcagtagcaaaatcgaaaacctcgaccaagccacacctaaacccaaggaaggttggtgggcctggccgaagaaaaaagacaaccttaaatggctaaagatttaagacgagaaaccctgcaaacaatataaaatatttagagaactatattgttataatgagcatgttttttatgttttaagtgttcaagaattcttaactttaataatatagtgttattttgtgggaaatgttaccaacaattttttttaagttagctttgtataaaagaaagtagtaacaatgagaagatgatcatatagcctatgctacgtggacattgtcttaaatgaaagctaatcgagaacttgtagtcgtactagtggattctcagccacctcatttttatcttgatttctagaacaagatttttccacaattctcaaatgtttgacactttctttgagataaattcttttatcttccaacctcttctaggcaagatgcctatgatagttccaacaagaaatgcttgggttaaacaatcttaagattacccaatttatttagagtgatttgcaatcagggtcggctctaagcataggtgactaggctcgtagggttcacattttttgagagtccaaaataaaaagtaataggtctcattagatttttatttatatataaaattaaatgtattgtaaacaataaatattcataaatttattagttatggtgtataatacattaaataatggtgtggccgtgtgggtttgacactcatttttaatatattttttttttatatatttttgaaagtgaaggttctaaaatttaaagggggttttacatcacatactgaaatttttaacttttttactgtggggcagaatttttctcaaaaatactgtataagttttatattgtgtattgtgttaagttttcacggttgttccatggctatattttagttgttccactgttgttttaattgttctattttgttattttacggttgtcttacaaaaaggcaatatttttgtacaaaattccgtgtgacagtaaaattgtaaatttttgtccaaaatctaatatttttgtaaaaactccaaaatcactttaggctcatatattctcgggggccgaccctatttataattcatgcatttatgaaatcaatagtttattgctataaaacttaaactccatgcatttttttatacctttatccttaagtttgtatttctttggaagagcttctcaaatctatttttttgttgtcttgctacaagtataaaaatcatagaaacaagatgccaataatgcattgaggaagtgacctccataaattagttcatcttcttctggtatattccacatcttgacaatttcctcaatatatttcatttgtgagtgttagaatctcttctagatttgatttaaaacaattttaatcatggatatacattaaccctgttgctcaataaatatactactccaaaaatagagattcacttgtccaacttattcattatccgttatttttttttttttttaaagtaaattattattttattaactgcaatcatttaagattacatcatgaaaatcaaaagaaacatcattattaacacgatcaacaacagaataggatgttctaaccaagtaatgagcaacattattcataaaccatctaataaaaaaaaacagaaacatcattcaaactttctaacagagttttacaattagatataacagtcccaaagtaagacatcattgtaagaggactccgaattagttgcacaactatgaaactgtcagtttcaacaatgacctctgccataattcattatccgttataaaatagaataaaagacaaactaattatcgttataaacagttatgagacttactaaataataataaaaacaaaacaaaacttatcaattactttaaaaaaatatagggaaaacaagatatcatcatccaattaatgttaaaccctactttttttcttccttattttgaaaccaaactcttacaccacctaaaaataaactcctaaaccaccaaagaatacatgagtagaactaacaaatttttttgatagatttaattacacatataatatttatttgattactaaaatcatgttggaatagaactaacacttaaagagcactcatataagtttttctactctattttttaaaagatcttatcaaaatcttattttttttttattttaccgtacatatttacattatattacactttatttttttttatctttataccatttaaatatttaaatttataaaactaattaaataaaaattatacggagcgagagaaaaaataaactattgaaaaattatttaaagaagctatattatgtcataaatgtaacttagtactcttacaaatgtaataaacatacacattttacatcaactaatgtagctaccttttttgaaggattattaaaaaaagataaaagcaacttcattttattttatttgttggtgtgttttaaatttaaataatttaatattaaaaaaataactaatttaaaataactgattcaattatactattgtagattgaattagattatatttgagctattatgcgagtcaaatagaatctaaaatatgaattttgtatgcactataacaaaaaataataccaattgaattataggtactaaatttaatatatttgaataaataattatttattatattatattttttttaagaaaaaaccatgttatcaagaagaaaggtaaaactatgtacatgcaaggatgcattcacctttattttatcacataacattaaaatattaaataatttaatactaaaaataatcaatctaatcctactattatatattgaattgaattaaatgtaaatgattgtattgataaattgaatccaaaatataaattctactcactataaagaaaataatgtgaagtgaattagataaacatgattaaggataaacacctctaattattcaaggtatttcaataaataattatttattatactattttcttttgtttttttttaacaaaactatgtcacaatgtcacatcacatgcatgaatgcatttaccatcacctcatcacataacacttaaaacattaaaaaaatatttaaaaaaagtaaccaatctaattccacaaattccattagattaaatttaaactattgtgcaattaggttgaatctaaaatataaattccacacttattatattctttatggtgtgaattgagttaaataaacacccataaaattcaacatatttgaataaataattatttactatactatattatttttttaacatgttatcattgtaaccacatataaaaaaatattaattacaaccttttagtcaatttttatacctaaaattatatatcagaatatttttttcaattttttcatagcaatatttattacagttacaatattatttttgtaaattttttgaataagttatcgtactgaaaatagagttcttgatattctaatctatcatccgtgttcaaaaacttcaaatttatttttgttaccgtaaactatttgaaattttttaaaaatttacagggaggatattataactataacgaacacaatcatgactttttttttttgaaaaattattctggtatatgttttcgggcatagagattaactaagagattgtaataagaggttgacagtagcactcctcaaccacatatataagaaaaatattattcgcgacaaaacccctttatgttttgatttttttaaacttaattccttatttttttttttgtggcaaacctcccttatgtttatttttttttgtcttgcaaatttgaggtgctgatatcactgttaaatttcaacttgattattaatgtataggtttcgaaattttactttcacatatactcaagtgtacacagtgatcatttaattggtatttaacaggcgcctcaaatttgcaaaaaatagtaaaattaaaaggattttgctaaaaaaaaaagagaagttaagtatgtaaaaattagaagtatgcttgaaagtaactgtgtaattactagggtggtaattacacaattgtaattattagggtggtaattacacaatctagcaattatattatattttaaaatacaatgtgtgtttgaatatgagatggtaattatatatgtattcatattattttgtttgacaaaaacagttagtaatactaattacacaagaaaataatattttt

SEQ ID NO: 44002 - DNA, 5531 bp, Cannabis sativa
atatattatatgtgaactcaatactaaaatatgagaatctaaaccagcgcaccagcaagctcgaaacaaatattaagggtgcccataaatctcttaaacaggttctggctattgtgtaatggaaggattacaagatcggctaactttccatttatggtgaagacaaagagtaatttattcaagtaaattccttgattttaaagtgctcttaagttttatttgcttgtggtctagttggataattgaatattgatgctataaaatatatatgatatccttcctttggataagcatggtgatattgaggcttgagatgttgcctaaaatgatttgacaaattcttgagtctgtctttggtcatgtcatgtcatgtcatgtcatggtatgatgttgtgtgttgtgtagggtcatgaggctaaagtgatggtatggtgtcaaagactcaaaagcttgcttcatgacaaccaaactgaaacactctatctctaattgcacatcctttccaattaattaaggagattttttgaatgaagacactttgtttagcaatttttaccactctcactttgtctatccgaaaatagaaaaaactcgacataagacagtaaaggaaagtaggagttggagtggtattagtaaaaataggatgttttacaaaatgggaaagaaaatgacatatctctatctatatctatgatctaactccaaagattgatttgattgaggttgaaatatccaatcaagtcacttacaaaaatgaagttaacaaaatactgagaggaatggcagccgggtcagaaaaattggcaaacccctttttccctctttcacaacaaaataacatatgctgcatgtgttagtcaactcaactcaatcttctgcttccattgcattgtctaatttcctttcctttcctttccatatatccaatcgctgctgttacttaatgtcattatttatgcctaacatatccaccactcttcccaagtgctatttcccacactcactcactcactcactcactcttccttccatttgttaacataccttgtgaaggcattagctcggttttcccttggcggagctcgtacgcgtgtggatcttcgcacaacagcctcttccaatgccatgctgtgcatcaggtcctttgttttctcttgcagttgggtactgcaacacaacacattagcaacaaacaatgttatgtgaatgatacaactaaacaacgagataaaacacaatttttttaaaggaacagaacagtcacttgccttattttgacgtaaagatgatcgagatgcttttttagcgcacactctctctcgcccttgcagtttagagaacccatcaatgcatcaagctgttccaaaaatatcaagtgcagtaaggatcataagtacataaacaaatcacaacatgttttaatgtaaaacacccttaatacctcatccttgctactgtagtatccccactccttggaatcagaactctccacaaatattctctcttcacgtcgaaaccaccaatacctattataatctttgtctttacccaaagggctggtgcgtataatccgtttctccatctcccgctcataatacattctctgtttcgtaaacagtgtcagaaagaaaaaatgtttacaaaaaagacaaaaagcaaagaagaggtatcacacactctttgttgtatatttcttttcacagctcctttttggccattctccaactgtttcattggttccttcttaatagagtctttgccgttttctgttggtgtattcacatccacattaagtttcttggccatcttcttcgatgaggtatctaatttcttgctctcactgttaaattaatgttggagaagaatgtaagcctcaaacagaaagaaacttcttaattaaaggcaattaattatgtaataagctatcaaatagaatccagacctcttgccctgtgcatcatcctgttcatgttccgatggagagtcctcaccctttattttcttaactttgttcccgtactgctttgtgtgaaaaccattagctgacgtgttttctacacactctgagtttgtcactccattgacatctgactcggttttcaattgtcctttcgcttctcttatctttctcccttcttccaaagcttcctcccttttggaagcccctaaaagatgcctttgttcaacaaactcatccattgtctctctaaaaatacatgtctcaaccacctgatcgatcaattcccgaagaattcctaattttaaacaagtatctaaaaggccataatgcccccttttaatagttgatgtgcaactaactaattcaggaatgtcaatcatctctaacatatcacacaaatactctgtccaggttattaatgtaatctgatgcaaaaaaagaacaacatcatcaaggaattcttaaaattttaagggataatgcatcttgaaaggttaatataacaaaacaagcataagaaaatctaaaagatctgcagtccggtgcttcaccttgcaagtccgatttcgtttccttattgccattaaatacttgccagtaccatcgttcataagcaaccgcagaagagcagcgtgagtttccacaagaagaacggcattgctttccttgtgacagatagcattttcaaaatcttcaagagagtaaggggacaagtgcaacaaccgaccaaaagatgaacaaaagtcccagattaataagagatctccaacacattccatgggaacattgaagtcccttgatggaacgggtcgatcagtaaagactggatcatcctcgccgggcagcaccaacaggtcatcgattggatatttgataggttccacacttggctgatcgcctacatcctggagatgataattatgagatgcagcaatgttatcatatgttcaccaataaatatggaaaagcaaactataacattaccaagtcattaatttttttgtacctcaatattctttcgtttcttattgtacgctactactagcccgttctgcaagaaaaatttgcttctcaactcctcaggaattgcagttgagattccatgtttttgtgccagtttctcgtgaagaacccaaggagcatttctgtatgttgattcccgaataaacgatttccaaacatctctagtaaaaggcagcttcttttgtatcaaatcttttttatccaaagttgaattcccaacaactttcttgtccccatcgagccatgctaccctatatctaactgcatcaccttcctccataattttcaaaactctgcataaatattcgttattattattatccttccttgcatacagttcagcacccacaaagacattgtcttgcaactttgcagctaaggtttgagcaagctctctcattgaaagcatccctgccaagacaagaactagttaagtggcataaatagaacatagaagtgcataaatactacagctacagcacaacaaattagtctattctttttggaagatgtttaatgtatcatttcagtagctcaactaactgcattccctctcccccttcctctaaataaattgataatagagaattcggttagttaatccttactgtattggatgattcgtagtgcaggtaccacaatttctttagggaactgttgcaccttctcattagcacgtttttctgaaaccaaagcttcttcataagtcaagttagtcttcccagtgaccttgcatgtccaaactcttcgacgatatagattaatcttgttcaagtactcactgatcgagcgttaagtagacaaacaatcacattattaagagtagatagatagatagatagataggtaaataaggtataacaacaagaacaataagaaaaggatacttataatcagtgaatatctcttttgtaaaacgaacttggaatatgagctcatttggttcaagatcctcaggcgtttctgccaatgaataaggttttctttttaacaagggcatcctaaagtaagctgagcagcaaaagcaacaacaactagccttgatgctaagccacttcctgcaacacaatcaaccacagagcatttagctaaacctaaagtaactattcaaatattcataagttaatgtcctttcctaagaaaatctatgcaaaataaacaaaattcccaaaacaaactgaaagtttccatcaacaattaacaaaataacttaagagtaagctcaatctgaactattcatggaagaaaagtctcttcattacagaaaccctaaaacaaagaagacgaaaaaaactcatccttttagattgaaaagtataaaggtttggactttggaaacgaaactactaaagctaagaagtacccaaaacacaagtctttaccatcgaatccaaaccatgaagaaaaaataaagaatgcccaattgcgtaaagtgaaatagaaaaccctagaaacgcgagcggggtgaagttcgtatagaaaatcaaaaggggtggctgacattggcgagagattgaaaaaagagtaagggcaatgcactacattgcattgcattgatgttaaatgaagacaaatccataaccaaacacaacaggaagacaaacccaataagaatatcaacatggaagaacgaaaccgcaaaataaacagcgttcccgccacgaacagacgaagcaagtgaattaacgtgtaaaaaacgaaactttatagaaagagaaaaggaaagattgaagcttacagttacagtagaagaagacgatgatgagagaggtgagaatgggaggcatgtagattttagcggaggagaagaagaagaaggaagccaaggaaggaacccactcgactgagtcgactcgtctcgactcgactcttctctcttttgtttcgaatcaattaataaaataaaaacggtttattgtatattatatatagtccctcgtttgtgggagcccaacccaaatcactctgacttttctagtgttctatttttgtaaaaaatggtttatttactacaaaacttaagtacgaaaaaaagaaaaaacaattaatttcttaaaataaatataaaaatattactttgatcctatatttaagttatgactctctatttttgttaaatgaccatctaatatctttttcaataatgaatttgtattttgtatgtattaaaaaaataaaattagagttttttgtttctaaatttatagttataggaagttgtttctttttttcgactaggctcgttggctttttctaggcatatgtacagcttggttggggttgtattttgttattgcgattcggtttttgctactgcaattagtcttgtctttgtgacatagttttaagtattttagtcttgttgtctgtgtgacatgtttttattttgttttatttcgttattagttcttctttattcttactgtaagtggttaaaaataataagttttctgtgactgaaggggttgttagtagtccaattacttgtttgaattattttatcaggatcttagatttactaataagtatgtttttaacatcctaa

SEQ ID NO: 44003 - DNA, 1263 bp, Cannabis sativa
atgattgtatatactataattagttgcttcaattatggcagaaaccaagcaagtctgtttggaaaagcttgtggagtatctgatctgaatacaataataaccaaatcaatcttattacatgaccttttaagaagcttcattattaatcacaactatagttctgcataaacttagtcctcaattcaattatattacaatatatattgtataatcttgcttgtgaagaaacgttataattgattaattataaattattcatcaaattgaattacaaacaaataaaaatattaaattaaaacaatttctccccttattcatctcacaacaaagtaaaagtataggcacatggtacatgaaaacaatttacatataataaattaattggtgaagtaataaacaatattatagctctgatgagctcttgttttcaccactaccaccaccaaaagtcctgataaagatgttccttacatacaaagcaagaaccccaacaaacaaaacagctagagccgaattaaccaatgtcctcacaccaaacttcttcacagacaaactttgcaaaggtctcattgccttctcagccaacccttcaccaggtttacatgcaacaccagccttatcatccaaacccaaaagcttcttctcatgatcatcagctgatgatgatgtacttggcataatcttctttttcttcttcatatcatcatcatccttagaggccaccaaagttggcattgttaccttcttcttgtgatcatgatcagcttgcgccggcattgtcttggccgcggtatcatcaagcaattctttcctcctacgatcatgatcagcctcggcggccccattattaatgtggtccttgtttattggtttgacacgatcaggttgctgttttaggatagaagttggaggaggtggaggtggaggagtaggaattctttgtcgtttttggtcttgatgagcttgtaatgatggggttggggttggtgttgttgttggtgttggtgttggagttggttttcgaggtggctgagtagttgtttttgttgttggttttggtactttgacataaaggattccaccttcgaatttggcagagattttggaggtgtcacaattgagatccaactcgaattccttaatgaaacgacgccatttgttctgacttattagtctttcaccacttattctcagttttccagttgatgttatttgtatcttcagtttctccttttgaaaccctgattcgccaattatatatat

SEQ ID NO: 44004 - DNA, 2042 bp, Cannabis sativa
aaaaatcttaattagatattatttttaatagtatattatcaaaatatacacttggccctcgtctctctcatttttttaaataaaaaattctttctatattattaatttttaattcatttttttacaggttttgttggacacagttggtcccgagttgcaggtagttaataaagctgagcatcccatctcccttgaagctgatactttgattgtcctaacaccggatcaagagaaagaggccacttcaaatcttttacccataaattttaggggactggcaaaggttttatttatgttattttctatttacttgtcatttttcttctctggttttttgccttatcatttttttttggcagcattaataagtcgtgttaaatccacagagttacggctctttttctttttcattgcacgaagtatagtgattaacatgatttggcttttgacaaatatcaagcatttgttgcatgtcactctgcaatactattgatgcgtatttgtctattatgttaagaaatgatctgcctttaatggcttttccttttctgttgttttcttttcctaatgcacaatcttatttgtaagcttataatttatgtttgtttgaactcatctcattattgacatttaaaatgttttttccaggcagtgaagaagggcgacactatttttattggtcaataccttttcacggggagtgaaacgacttcagtgtggttagaggtaaggaatcttgaaaactaaatttcattatttagttgacggttatataactcaacacactactttaggcatgacaaattaacttaacttatcaaatatttttgtttcatcttaacagtcactagacttatacattactttgtaatccaagtaagcttatttaaacaaccatatgcaggaattccctacaaaacagagatgttattacttagcttcagataaatatttgtatttagatctatgtggggtgtaagatgagaacttcaaggaactctgaagttctgcttactactaaatttgatatgttctttttcttcttcttctgtagaacttgaaccaatggccttgcaaattactctttttttatcctattttcaaaatattttcctagaaagggaagaaaatgaattctcgcatccagtttctcaagtttctcgtatccaatgcaggtaagtgagataagcggtgaagatgtggtttgtatcattaagaactctgctaccttggctggatcattgtatactttgcatgtttctcaaattcgtattgatcttcctacactcacagataatgataagaaggtaagtttgatggtgttggcatgaacctgcaaatgctaaactttctatgtgttcaaagaaattacttttcctgctattacttgagtttatgaacttctggatttattgtctgactgccattcaggttataagcacatggggtgttaaaaataaaatagatttcctctcgctatcatatacccggcatgctgaagatgttcgtcatgtgagggctacttctactttgttttgtgtctcttcttatacataatagatgatttgaaggatttccccatcttcattttctctgctgcattctatatctaaggctagtttcacgtttagatttcaattttcttattagttttctgttgtccctcttatgcaggctcgtgatttcatctctaaattaggtgatctcaaccaaactcaaatttttgcgaagattgagaatatagaggtcagccatattgacaaatgtataattgattatgtcatttgctttctgctagatactgcctgtacagtagactcaatatacaccaaagtgatgttacttgggttttttaaatttgcattttttaaatttgcagtttaattctgtaaccatattcaattcatatcatattagtacgaacaactcacatctacatggattaggatgtttatataaaataaatatctttagtctgccattattctcttctccttttcatcacattgtgattcttaacatgaaatgcctctctctctatc

SEQ ID NO: 44005 - DNA, 4140 bp, Cannabis sativa
cagcactatcttcataaaataaactaagactcttgtatgtgtgaagatttttttgtctgacagaatcaacttccattgagagaaaagatgcaacatgctcaattatagcttcagcaataaatgatccttgtacctctccaggacctcgcattattgtcttacttgaatgatttgttttgcataactttatgtcaaaagccagagctccccaatcatactttttaaatgcactcgtaaaatttgatggaatgataggacttgcatctatagacatgcctgcatcaattaatatttctagttctaaagctgtaatcttcccatctgacttaaatccaacactgtaggttattttcatcggatgccttcctcctgccattattgtatcagtttttcgatccatatatatcctcacagggcgttgtaatttttgtgctgcaagtgcacatgctgttgcaacctgaattatcacaatgtaaagaatgccttattttttaatttagttataacttataaaggagagataaaaaggcagagtaagcaagcttatgacacgccatacaggagagaattatcaggattatgaaatacttcctcagtactactcatcattttaacagcttcaaactattctaaagcagctatttgaattgcatttgggctggggattccctatcagaatcttcacaagatcttgctccaaactctgagtcatacacatacacatgctccatcatctaagtcaaatgaaaaagatatacatgttccaatccaacaagagttgcatatttattctaggcgacaaagaaataaccaagccatgaatcctcaacacagtcaagagactaatccgatggtagatccttctccaccaaatgtgtcaagtaatcttcacttaaacattgattctgatctagacattcctatagtattcagaaatggaactaggtcttgcattggcgacaacacaaagtagatgaatttgatcaaagaattattggcagaagaatttgaagttaagggtcttggaacactgagatactttctgagtatggaaattgccaggagtaaaaaaggtatttctgtatcacaaaggaatttaacccttgatctcctaaaagaaactgaaatgctagattgtaaggcaagcaaaactatatcgaacttgggtcaaaggaaaaccagaggacaaaggaaaataaaataccatcaattagttagaaagctcatttatctttacaaatactagactagacattgtctttgctgtaagtctagtgagtcagtacacgcatgacccctgccaaggtcatctcaatgctatgtatcgagttttggagtatttaaaaggaacaccaggcaaagggttattttaagaaaactctagaacgaaaagtcgaagctttcacagacatagattgggctggatcagttaatggtagaaaatctacgtcgggctacaatactctagtgtggggaaacttgataatatggcgaagtaagaaacaaactgttgttgcaaggagcagcacataagctgaatatatagctatggcccatggagtgtgcaaagcaatttggctaaaaatattactgaaggagttaactattgaatatgaagatcctatttaactttattgtgacaaccagtgtacaattaatattgctcacaaccgagcacatcatgaaacaaaacacgtggaagtggatcgtcaatttattaagaagaaaattgatggaggggttatcaaaattgagtatgttcacacagatcaaaaactagcagatattcttacgagggattgtttgaaagattatttgatttcctcataaacaagcttagtctcgtcaacatctatagtcaagcttggggggagtattggcagcaaggaaatcatattttcttgatttgttagcttattttattcgaatatttagtttccctttttatagaaaaatagaattaattttgtattaatgtataaaatcatgtacaacctatatattgtatcgttctactcaaatcaatatatcaaatcttataccaatgtcaaatatttttagagaaaggataagagaattttgaaaggatatcaaccaagacaagaataaataaacatctggggttatctttctcactgaagaaaatatcaaactcgtcaaaaagtattatgtcgaaagtaagcttacaccccaagagatttttttttacagtgtactaaaattttactcatcttcacagggatataagttaatcttaagagtgtaaacttggaaaatttcaatcgtgatttacaatttggttatcttaggaaggaaaaggagatataaaactgatactataataatacttacaggcatcgctttaatggtctttccaccaaagccacctccaacccttcttgtgataacacgaacattatgccctggtacatccaaacattttgcaataacatcgtgcgtcaattcaggactctgagttgaactgtaaacaaccatgcagttgtcttcatctggtatagcaagggcagtttgtgtctccatgtagaaatggtattgtgaaggaagttcgatctagtaagaatgaaactataagtttaatactgcactgaggtgccaaattagtgtttatgcaacttgttcacacattcaatttcttctaaacagatgagactgcaataccttagcagatataattttgtggtcagcctcagccatgttttttgatgcatcaccaacttgttttgggtaaacggaagaaggcacttcaaaaaaactagatcttctaacagcctcttcaacagataaaatggggggttctagatcttctactccataatcgaccactgctaactccgctgccacatctgcatgtttctgagtatctgcaacctaacaaagaacagatatcccaataaacgaagaagacttctatgcttgcaaacctatatagtaaaattattgtcaattggtgaaagccattacacatagaaatgcgtagtgggagttggagttaccacaaaagctagacgctgaccagcacactcagagagatcatcagcaaataaaggttcagtaccaaacatgtttgttgatccaatgttctccccaccttcagggatatctttaacagatataacatcaactactccacggggctgttggtcaggcttgaatgttaaatccttcactcgtgcaaaaggttctgtggtataaatgaatgctccatacaagcaatttggtggcgaaggaatgtcatctacatatacagcctggcctgtgcagattatcagcataattgagacaaattagttgttaaggaaaaggaagaaatatctggaagcaattcaattagcagtaatcatgagaaacaagcataccgtagttctcttgacaatgtaattattgaaagaaaaatagcatagaggaagaaaaacaaatgatacactgtcattcacaaagaaataagcataacactcaatatgaaatgaccttgatggacggataagaggaaatgttatagcacatgtaaggttaaatatgaattgttatattccttaaatttcaacatcatgctcacgtaaattaagatttcttcattgacagttataaacaacataaaaaatatggaagtctatcaaaacacgtactggaacatgcagaaatatagagggaggcacagtaaagatcattcacacaataaattaagttcaacataagtgcaagtaatatcaaggaggaaaaaaagaaagaaagagagagaacatatgcaattctatatgttttctttttttcttttttgagggcttccatgcaactaggcaagtcttgtgcaaaaataaaatgatgcgctagcccagaatacgaaccggaagcttggagggctgctccagattttgtaattggcttgccaacagggtaatattctggacttgtttcaataaactgcttccctgatgatagcagggttggaatttcgtcatgattgaactgattttcatttgccaacagagcatccttacatttcttcaacaacccatcagtagtttcagctgtagtatcaataaaggagctaaagaactcgaaaagaaaacctacagccaagcttgacctataagcaggacttgaagtgccatcttcagg

SEQ ID NO: 44006 - DNA, 3145 bp, Cannabis sativa
attcaattttactatttcagtgattatttatgtattatattatgtttctaagattttgatatttaccaaatcatgtctctcgaactttgacatgtactaaattatgcctttgaattttcgttcttgttaagctttttttattaaaattagacaaaagtccttaaattcaataatctcaatagttcagagaaaatttttaacgaccttaaaagttcgggagtataatataatagaggacaaaaattttaattagtctttaaatatatatttatagagatagaattagtgtgttaaaaataataagttgaaaggtaacataagcattatgcttcgatcatcttctctatcccaatacatacgacattattatttattcggtagcaattaaaatatatgtgacagcgacttaagattttttattttttattttttatttttgttagctattattaaactcatgctctttttatatatgataattattactaaaatggattatgactagtacttcacacttcacatattatatatctcaatacaattagaaaaagaaatttcaaggtcaacctaatttttttgggcacaaattaccagaacaacttgtaatttgcatagtagtgcataattatgtgaataacaacataaattcattaatactaccaaacaaaaagaccaagtattgtaactaatttaatttacagtaacatcatatttatatttatgtagatgaaaattaattctctctattcatatatttaaaattacagaaatataaacagaaaccaactgagcttaattactgtccaaaaagctacaagtttggtttctctaatcacaacttaattaaactaataaaatcttaatttgttctaaaatatattcttaagagaataattcccggggaccctttttctcatactaccatccctctggtaaaataattctccttaatttaaaaatttacccaactttttccttatttaccaaaatcaccccaaaacccaaaaacttttcattttcaccctcgtcatcacttttggtgagccaagttttttgcgtcgacaaatgttccatgaaatccgtacggaactctcgacgggagtttaactgaagcttccatctttaaatcaatggcgttcacaatctgtagctctgatttcccactcctttcgttgtgaacaaacgccattatataaccctcatcttcttctccttcattactttccgaattcggcaaaaaaaacggttcgccgccgaatttccggtcaccgtagtaatactttttcacatcgccggtagagagatcaaccttagcgaaaccagaaaccttcggccacggctcagcaatggcgaggtaagcaaaccgggtttttctcccaagcctattccgattcaccattccggcttccaaattcacttcttcgtcaacgttagcgattatagggcggcgcgtggagacacgcgtcttcaagttaatccttatttcggagagaacgctcttcaagctctcgtcgcactcgttgaagatcgaatccggtggagtcatgcaagacccgatcaccacgacctcgtctgtctccggctcttcccacgcgttccagagatggaagcagaaagtttccggcgactcgacccagatcatttccgacgcgtcttctgcggttttggacagaatcccaaaccgggatttcttctcaccgtcgaagacaacaggggacccacctctgaccatttctcccaacttgaaaaccacctgctgatctgggatcacgacaaaattctcagtaatggcgaaatcgtgaatcatggtcggaaccggaagagatatttccacgtcgggagatttttccccattgggtgagaatttaaagtatttaaggtaaggtttctgaacgacgtcgtaactaagagcaaaaagctcccctgaaactgggtcaagcttaggatgagcaatcatggcggaacagagttgttcatcaaaatcgtatcttccaacagtttcgagatcaccggaagaagtgattctaacttggtaaggaagatcatcttccgacatagcaagtaaccgatcgttgaagtaaacaagaccggcgttagcaactccggtaccatgactacggtcaacgagtccaaaaagtccacgagcatagaaaagaaagagacgagcaataccagaatgtccatggagttctccgatggctttagggaaaacagagcgaccgaggtctcgttcttgaacaagtctctgagtttcagtaaatcggcaagcgtaactagctgaagcttcaccgccattgatagtaacggcgtgaaccattccgtcaccgtcaaagaaatgatgaccggcaattggttcaaaaagtgggttagctccgtttcttaagtaaacgccgttaatgcaattgggtatagttccggtaacatttaaggattgtttaacgggttgttcaggtacgggagcaaagtttccggagatttgtacacgtggatcggctgtctttggaagtgggtgttggcgttcgcgtgcaactaacgcgccttctgccacgtcaaatgccacggcggcggctctttgtaggaaattccaatgaggagttgttgttgttgttgggttggttttgttgttgttttcatcttttgaaattgtgatttgtttagggaaatgaagaacagaagcacttgttataatgggtttcttctttgttaataaagaaatggacttttttgatgagtagagattattatgagtacttaatttggttccaacccaactactagagttgggagccaatgaaggagtagacatggctgtgtttttttttcttttatgagtaagtttttgttttgggtgtttggagatagagagaaagaaaagaaaagaagtttgttgtattgagagaaagaaagaaagagtttagttttggtttggattaaaggagagaaaattggggtataaatagagagttgtttgtttggagaagaaggaaaaaaagaggtccacctcatacatctaagagaagagcacgtggtggattcttttgtgtgtagaaagagcacttgaggatttacatatatatgtatacgtatagaaattacaaagtatgtggcatacttggcttgtgttgctattggggcaaaataggta

SEQ ID NO: 44007 - DNA, 1575 bp, Cannabis sativa
cattagctgctcatcccaaacacgacgtcgttttggagtttcccttgctcctactagagccattcttaacctaccaaaagtgcaaaaccaggcaaaaagtacaacaactaatccattactttctcttcaaaaaatcccatactctttggggtttcaagatatggatatcataaaaagatcaaatcttgattcgtcgaccatacaaatggaaaagatgtatgcgattttggagtctgtgacggacagagtggagatgcataagaacattggagaacagcgtgataattggaacaaactcttgttgtcatctgtgaattcgatcactctagcagctgcaacgatggctggaatttcagtactgtcatcaccctccatagccctgaaactctcctccacgattctctatttggcagccactggaatattggtgatcatgaacaaaatccaaccttcacaattggccgaagaacagagaaacgcctctagattattcaaacaactacaaacagagatccaaacccaactcaccattggaaacccaacagctttggacgtaaatgaagccatggaaaaagttttggctttagataaagcatacccgcttcctcttttgggcgccatgattgagaaattccctgaaactgtagaatctgctgtttggtggccgagaaaaacagagcagaaaaagcaaaaatcacaagaagttggaatgagaaacgattacaataacaacaatggttggagtccaaaattggaagaggaaatgagagaggtttcaaagattatagaaagaaaagacgttgctgattacttgaagcttagtgaaaaggccttgaaactcaacaaaatgttggcgatttctggacctgtgttgaccggtttagctgctgcagctacggctgtttccggtggttttagcagtactcatggggtgggagctgctgccacggtggtcggagttgtggccggagctttggctagcgtggtgaacacattggaacatggtggtcaggttggaatggtgtttgaaatgtataggagtaatgctggtttcttcagactcatggaagagagtattgaatctaacttgaaagaaacagatgtggagagaagagagaatggtgaagtgtttcaaaccaaggtggctttgaagcttggtcgaagcttgtctgagctcaaaaatctttcttcttcaagttcaagatatattaatcctcattgttcttctgattctgaagagtttgcaagcaagcttttctaagattaaagtatatacactcacattatatagtcctaacgatatgtgtaattaatagttaactattctttgattttttttttttttttttgttaacctgtataaatatatgcaacacaaatatttgttaatggaattgtgattatttagtattatcattattgattgatcttcatgaggaagttacaaattttacaaaatatggcttagaaaaaagtaaaaacgctattttatcgaaaaaattcaattgaaaaaaaatggaaaacaggtaaggataaccagctaatatggagtcaatcagatagtaaccagagtaa

SEQ ID NO: 44008 - DNA, 1654 bp, Cannabis sativa
  modified_base (1567)..(1572): a, c, t, g, unknown or other
ttttcttgttgtttttatggaaaatcgtaaaaatatataaaaaaaaattctttaaacgtaaaaatatattttttttataaaaaataatgcctcatgtaattatctcttttattaaagatgctctaaggtgatataatatgtggaatccaataattaattgcacaaatcaatattaagaatttaagatgatgttggacattacgattccttgcaatgctgacataattaagttgaacaagttttctcatccaaggtaaagaaatgctactggttctgttctggtacacaaatataaagcagaccaaactttcatgactttgtgtctctcagcttattgcacattttctatcactgaaaacaagcatactattttaattttattttctatgaaatgctcaagatttttcttttgcatggtttaagattttaacacttctttaaaattttctcgtctgtatattctcagggcttcggagaaaaaggttgttacataaaatgacatcacttccagtctaatgtttgtctacttggcctaatttatatgttttgattctttatttagatttcaaattataatgcttcctataccattgcttttgtagggattaaggaagaacatactcagctaacagtctaacccgttgatataaattcacaagctttgtcctgtttcattctcagtcatattgctttttttgtatattcataattgttctttagcctaatccatatttccttaaaaaccagacacacctgctctcaaaaataataaaatgaagatcaatataatccagcaccagcggatcactgtggaaatatagatcagcaatttatgcaactatagatttttatatctgctaacctaaatgaattttttttttttttttgaataaacctaaatgaattatgaattgaggaaggcgaggattatacgttggaggcggaactggggtttgtgaacatagctcaacattgggaattatgaatctgagctcaacgatttcagatttgaattgaaggtcacactgacagcagcaatggcagtcttctttagggttttgattctctgtaatcgttttcattgagctcggcatttgttgtcagtcacacttgttttgtattttatttttatttttacgactgagtagattaaccctctgttttggtagagaggaaagaaaatagatatagaaaatattggagggaaataaaatctaaaagaaagaagaaaaaaaataaaaattacatgtttatgactgagtagattaaccccctaatgcagtttgaccctgtaattttacgatcttaaacttaaagtaaatattatttgttatattttttattatttaatattttatgtaatatttttttttcttacgatgtcgagagtttaggaactgtaattagtaagtagtataattattagaatttaggatggtacagtctattaattatattatattttaaaatgaaaaagaataataattataaatttttaatattttgttgaacaaaatacaataaacccctatccaagaatacaatattctaattgagaggttataannnnnnagagttatactagaaaaaaaaattaaaaaaccaaaaaatatcaacgtaacaataataacaataaataatcattaatactata

SEQ ID NO: 44009 - DNA, 2089 bp, Cannabis sativa
tagggcacaaaacccaacaaatgtattatttcaaaaaagaccataacattgtcagatatcagacgaccagtgaggaatgcactctgcgtgtcagaaatcaccaaaggcagaacccctttcaacctattcgccaacaccttggaaataaaaatatacaacacgttacacaatgaaatgggtcgaacattagtcatcaccttaggctgcttctttttcaggagaagcacaatgttggtatgatttacctctcatcgaaaagaaccttcaataaagaagcccttcacaaacttgataacatcactaccaaccgtactccaacatttttgatagaagcccggtgtcataccatcggggcccggagatttatccaagtgcatttgaaaaagagcacgtcgaacttcatcatccataatcagttcaactaacatggcattattttcaggagtaaccgtgacaggagtacaatgcaatatctcagaaaagttcacagtagtaggcaaaaaaagctgagaaaaataatcacttacaagcgagtcaaggccattctgccaatcaaaccatactccagccgcattcttcattttttggattgaattttttcgcctcctagccgtagcagtagcatggaaatacttcgagttgctattgccctcacggagccagagttgtttactcctttgtttccaaaaaatctctttctgcagcagaatctcagtaagtttagtgacgacctgtttgtaattctccacagaagccatatcccgacccttgttccacctttgaatattctgcttacactctttaatacgttgagaaaaatttcttgtgttatccttcccccaaactaaaagcatctccccacaatttttgatttttctcaggacatcaagactaggaaagagagaccaactctcttcaataaccttaaaacagagaggttctttaagccaggaattctcaaacctgaacacacggttggaagctaccatagtcccattgtgaggaacaagatgaagaggacaatgatcagaattcgaagcttccaaattaaaaagtttcgcggtgggaaacaagtcaagccaagactgatttaccaaagctctatcgatacgcacctccacccaatcatccgtaccacgatgcctttcccaagtatacggatagccataaagctccatatcacaaagaccacactcacccaaagcatcattaaagccattaaccaaccaatttgggtaagggttaccccctcttttgtcatctcgagaagtaacattattaaggtctccaataatacaccaaggaagccttgatttatctcaaattaatctcaacaaagcccatgtccttctccgcaaacttcggtttggctctccatacaaaccggtcaatctccagcaaccaatatcattatcagaaatacacacatcaatataatcactaccgagttccataacttgaacctcctcatcaactctccaaagcaaagcaaccccaccaattttacctctagcattaacagaaatagctccatcaaagccaatggccacacacaactgatcaacaacatcctttcttgataaagtttcacataaaaacaaataattgggtttctattggatcacaagatcttttatgaattgttgggtccacgggttcccaagcccatggaaattccaagagataatactcatgatgtctggtgggcctgagaaccaaggcccaccttcaaatcgttttttgatcaaagcttaacaacactaacccggcccaactctttctcagccacctctgttgcacatgaggcatgttccatttcagtacgtcttctcttgctatccaaaaccattaacaactcatcatcactaacagctacctccccttcttttttgccactattttctccttcagaatcatctccattattgtcattattccccaatatcacacctttattgtttcctgaattcatggacacaatctcctctccttgattatcataatcaatctccatgattctaggcccaaccgttgcagaagatttcacaccaggacgactaccccgtctgccaccgtcgactggctcggg

SEQ ID NO: 44010 - DNA, 1582 bp, Cannabis sativa
cagcatcctggtttgttatgtttagctctgtacattcggtagttaataactcggctatttggatgtactctttaatagctttgattgctgcctgctacctcaggtgttgctgatgtcactaaaggccgggggagtcggaatcaatctaacagcagcttctagtgcctttgtcttggtatgtgtacatattaattaacacccaatttggatatggcttctcttactccatttacaattgctgaaagcatagctgatatgccattacttatgcattctttgctatttccaattttatgtgcatgttcataggatccatggtggaatcctgctgtggaggagcaagcagtcatgcgaattcatcgaatcggccaaacaaaaaaggtgacaatcaaaaggtttattgtgaaggtatatttacttctcttactaaaaaacgagttttaaatattttgctgctgtatattttgcccctaagtgaataaactaaacaaagatttatttctttagatttagttaataaacaaatattatttttacttaattggatctaatccttgagaggtgttaattgcatggatatggaaatgtcattgttataaattttggatccaacccttcaactgatgcatttttttcatattctcttatggcagggtacagtagaggaaagaatggaagcagtacaagcccgtaaacagagaatgatttctggtgccttaaccgatcaagaagttcgtagtgctcgattagaggaactgaagatgctgttctcttagagttctgaacgagctgtaatgctttttctccatggagtgagagagctctttcttttcgaagtgtctgttaccgattcagacaagatccttctctcgagttacaaggtacaaaatagtatgcctcgagtttatttatgaaaaattcagtgaagaaactcgaatttttggtgatggattgagtaggctgataggatcattggcttagctttggtgaagttttgctcagtgtgcaatatcaggtcatgactagtgattttgcataacgttctgatgtaaatatttcaagagggacttctattatatatattggttgtattgaccttagctagtaactcaagatttttatagtgctctttattaatatgtagatgtatgtatggatggatatttgataattaatgtttcaataacatatggccctactgtgtcgtttgtcaattatttggggatttctgtcttcttaccttttatctaacatcatacggttcattcagaagtataaagataatcaactcttttttctctttatatatttatattaacttttatttagttttaaaatcatagtattcttttatttatattaactgagcgttcccaacaacatctctactttattctttaaaatacattattaattttttattttattttattttacactagatgtgtataaattgatctaatttaatgacaattaactgatctaattacaaccaatcactaaatattaaatatttaattatgattaaattagattggatattatttttaaatatctaattagatcggatgttggatggggt

SEQ ID NO: 44011 - DNA, 1133 bp, Cannabis sativa
aaaaaaatatataaaaaaaatggtatttatctaaatatatataatacttacagcagcacaatagtgaacgactttgacttggtcaagatcaatattctcagggtgacgccacaacatggctaaaacaagattataaactggtggaataggcttgtatttgtccctgaagaacatattcaaaaaatcctgttccaaaaaaaattaaaaaaattattaattaattaatatagattcattattatatcattttttaatgattaaataaaaataaaaagtggtgtacctgttcagcaaaaagagttggaggggtctctttgactgttttgagtagatcatagtaagtgggcaaactgggctcaaaaacgaacattccagcgttgaagtaaagaggtggttttgggcccaactctttgggccactggactctatcggggcattgctgacaatacccaatctggtattgtgggctattactccatgttttctcgcaaaaacagtccattacggcgtaaaagtaggagtctggctggtcaaacagatggtcaatgttcccaaaaacttgaatatctccatccaagtatatcatcttgctatactccacaaactgaaattttttattcaattaacaaaaaaactattagatagaaaattaatgaagaactaatgaataatattgatgatatataatataactactttttctattataggttggtgaaaatgaaacaaaaaagagtactatatagaactagtgggatttttgtgatttttttcttttttacaaacctcaataatccaaaagttccaattatgattccgacaaaaaagacacacccaaataacttttaactttatccactaattataatattatttttaatttgtattttgtaaaaattactgatcagattttttatttattttgtttaatgataaaataattttatatttttcaaaatagtaaaaataagacaatcaactgattttttatcaaaataaaatttaattaaaatctaatctaaatatgtgatgacaaaattatttacattttctacatatgttcgtattaagaattatcttcaaatttgttatattaaaaaaaattatcgaaaattaagtttagaattttattt

SEQ ID NO: 44012 - DNA, 1549 bp, Cannabis sativa
atattaacacataggagggtgctaagcaccactaatgctctttagcatttctcataaattaattaatatcaatctctctagcataaatgaccaagatatatatgttgacaaattaactctaccataatcccaagtatttgaataaacaaaattgcatgcaaattaatatacattaatgcagggcagtacgattgacgcaagtgtttcttaataagagagagcagaagctagtacaatcaggaaattgttagaatataatgaaaatttctctatattgatgtatatcatcgtgtatatgagtataattacgtactttctaacaacataataatggtaaatatggtatatatatataatgcgatatatgccattcatataagatatttatatataataattaattatacacattgacaaattaatgttgataaacttcaaatattggagagaagagtacggtaaatatatgtatagtacgtattataaaacactcataataatctacatttataattggttatatgtataacaaaattaatggagatgaagctcttggattaattaacgttgctaaataataatactaaggaaaagtaaataaaaatgaggaggactgacgttttaaaaaataattaaaaaaaacagctcacaacagctgtcactgctagctaattaattaattgatctacctagctatatgtacatgaaaataaaataagtgtgcgcatatgtaaaccaattggcatgttaaaaatccaatttatctctaatttttattattattgaatagtaaaatgtataagattttatgttaaaattaattgaaaaaaaaaataaaaaaattacagatcttatatattgtattaagtgtctatacattattaatgtaagactttttaacatcttcttaagatggtatttattttttttctcaccaattaatcttagacctatctatgaatcacaataactcttttgactttacaccatgtccagagtgttgaagtatggtggagactggagagagtagaatattatgagatatacatatatatgatttcatctctaaactcctaaataattaaatgaataatccatacatcttatatattatattaaatgtccacacatccttcatatgaaataattcacacaaagttttaccactaccacttttttttttttttttttatggcgaaagctgttcgaaacatatgatacctcgtactttagtatacaaagtctttaactataaactgattcttatcttatttctttcttgatacatggtgatatacttaaatttccttgcatatagctatatatatactaatgtatatatcaaattcactatttataatttacacgtatatataggaataaattaagcaaaataatgagaacaaactaataatcttatatataaattatattatgtgttcaaattatagctagtggttaaaaatttgagatttgaaatttcaattgttaacatatatcatgtatctcatggtaattttcagttgttaacatatatctcatgtataaa

SEQ ID NO: 44013 - DNA, 770 bp, Cannabis sativa
aacagctgctggtttgtggcgtgctcttgaaagtctctatggagcctattcaagagctaaaatggatgagttcagaactctaatccaaactacaagaaaggggtctgctaccatggccgagtacctgcggcaaaagaaaaactggtccgatattttggcgttagcaggagatccatatccggaatcccatctcgttgcaaacgttctgtctgggctagatgctgaatacatctctatagtagttcagattgaagctaggcccaagacaacctggcaagaacttcaagatatcttgctgagttttgacagcaagattgaacgccttcaaaccttaaccaacaccagcaaaatcctgaacccacctgctgccaaccctcaagctaatatggccaccaaaccacatatccctggtcgaggcagaggattctttaacaactccaactcaggacatggtggtggcagaaccaatggtaatcgaggaggtcatggaggcagatctcgtggtcgaggacgtacaaatggaaacaaaccaacatgccaagtgtgtggtaagtttggccattctgctgcgatttgctattatagatacgatgaaagctattctggtgcagatcaaggaactaatcagacccagttcaaggcaaatccgaatgctttcatagccacacctgaaatcgttgatagtgatgcttggttcgctgacagtggggcaagcaatcatataacatctgatgcagcaaacatgagccaaaaacaggaatacagtggta

SEQ ID NO: 44014 - DNA, 1321 bp, Cannabis sativa
catatagtatagtttaatttaatataatagaatagctttactttaagttaagggagtatcgctaaccaatcgcaagacgacatgctttaagggtgctaagcaccacccaatagcaatgctcttttttttttggttaaaaaaacggttttaaaaattatttaaatttcattttatttttccaataagaggcccatttttaacttttgtcctagcaattagagccggcccgtcctaataattataggtccccaacattaatcataacttataaaaataaagaatttcattgattgatttggagtgtagcatcatttctttcaaagaaagtttgaaggtggctcatttcttggcaagagccttttattttcccacaaactgtcattttatttctacaagatataaataccaatattaatgatcttaaataagacctaacttattttagaattgaaagcatctccaaatttaacttttgaataaattgggctatagaatcctctcacatattatataatagtaacaatgtcaatcacaaaattaatgatcatcaccatacaagttaaactagaatacaaccacataagatagagtacatgatagaacttctttaaaaagtaattatcgaaggagtatctttttttaacaataagtgtatggaatgtattttcctaattctaggaataaactaccaaaaacaatcaccattatcacgcaacaaagtgcttacatattaatcaatataagacaaattataattacaattgagtgtcttaatcacattatttgaattttgaatcatactctctttgatagagataaaaatatatatcatccaatggtacaaggcctcctccctcataaaacatgctcaaacaaacaaacaacgtcttgttccatcccatatatataatttctaaccactctcctaatgaccatcacaccaaattcacataacacaacaatattcatattcaattttaacaatatccaactcttatgacttaggcaacttagaatttatatttcaatattatgacaggaataataaaacttaattagcacataacatatccaaacaaattaaaagaaggtgaaatgatctcataacaaaaaaattctataaaataactttaaatttgttaagtatacatgactcatcttaggtaaagatattattaaataaggttttcgtagataaagatataagcaggtccacgttgagcctaaaaagaactatataagtttcatcacaattgtaaccactagtaagagaagaaattgctctaccatcattccacttggctacaacttgttatatatt

SEQ ID NO: 44015 - DNA, 1736 bp, Cannabis sativa
  modified_base (71)..(78): a, c, t, g, unknown or other
atattttagtataatttaaagtttgacatagtattatataaaaatataatgtataatccaattcaatatannnnnnnncaatacaatacgacctaatacgccattccaaacgagccccaagtcaataaattaaaacaatactaaaaaaaaccattagtgctataatactctcttacttattaatagtatgactattagtctaactaagtatattgggtcatttatagtttagtataataatttttaaggagtattgctagctaatcacaagacgacacgtttaaaaaatattaaattctactgagtgcccaataataatgctcataaactaaatcaagcattcaatattatacaatatacaaatttagtaagcggctaactaaatcaagtatttcagttcagtttattaaacgatttgggaaccaagcggctaactggttagctcgtttttctagttcatgtcttgatcgtatttccagtagggggtttgttccttctggtttggaagctattttgttagctgatttgctttaatgaaagttgcaatctttgtttcaaaaaaaaaaaattaagcattcaatattatacaatatacaaatttagttagttaaacgtgtcattgtccatcccacttgaaataagagttgtgtaaaataaaataaattatagatataatttatgtcattttccttattctattaccatataataattagtttaagttgttttactaacataacaatttttaactttccattctcatgtgagcatagagacataagtcattttatatttataaagtattagagagacagagagtagtagaagattagaagattgataggtatgtattggaaagagagatatatggggtaagattcattgaaggtagaaggaattgtatcaaattaatcatataatatatattatttatttatatatatatagatatatggatattctcttacacatgatcatcatagatacaaaggccatatcatctaatcgtatctaattatcttctggcttgatttctattttcattactttataaattcacaaaaaaatacaatagaaaagatatgcccttttagaaagtagggctccatgcattgaactagttaggtcatgtacatataatataaaataaaataagagaaaaaaccaatttggggccattcatagctagctaaaatatattctgagattattgatgatatcagttgtgagtcaacaaaaacaataagaaagccaaaaggccagcattcttggattttgagagcatcttttactgatcatcactataaatatatatatatatatatatatatatatacacttctaagctcttcattacatagatatgcatatcttcattgtgaactatcatgaaatattcttttgtagattttatgtatatatataaatatatatcttgtaagcataataagattgtgccctcaattttcattttttattatgttaatgagtagtgtgtgtatgatccatcttcacagatcccataaccttctaactattttattgatattattaatcttcatttatctataacttctataaaagtgagaataattttagacttttactatgtaaattatacaattaaccttcattaaatattaaattacaaacttttttttgtttttttggatgaacaacaaaccattaatattttttttatgctttcaaatataaaaaattatattataatcatc

SEQ ID NO: 44016 - DNA, 2582 bp, Cannabis sativa
  modified_base (2532)..(2537): a, c, t, g, unknown or other
gtgtcagtggtggtaagaaagctactattaccattagcaaaggtggtcatggtggcggagatggcagtgtcagtggtggtaagaaagctagttttactattagtggaggagtagatggtggtataaacaaagaatttagctttagcaaagaagttaatggtgatggaagcaaagaattcacaattaacaaaggatttagcattaacacaggttctagaagacttaaggaggcatttgaatatccatcttggttgtctggttcagatagaaaactattaggtactaacaatgaaaaccaaaacttaacaccaaataaagttgtggcccaagatgggagtggagactttaaaactattggagaagctcttgcttcatatccaaaaaaccatcaaggtcgttacattatctatgttaaagctgggatttacaatgagtatcttatagttacaaaagatcaaaagaatgtgtttatgtatggagatggacctcgaaagacaatcatcacaggaagaaagaacttccatgaaggcgtttcaacctttagaacagctacattttgtaagtttttcttccccatttagttttgttataaagtgttatctttgcttatataaagtgttatctttgctcatgtcagctgctattggaagtggatttgtggcgaaatcaatgggatttcaaaacacagcaggaccagaaggacaccaagcagtggcacttcgagttcaatcagacatgtctgcattttacaattgtagaatggacggttaccaagacacattatatgttcaaacacatcgtcaattctatcacaactgtgtcatatcaggaacagtcgatttcatctttggagacgctgcagccgtcatccaaaactcgttgatcattgtcagaaagcccggaccaaaccagaggaatgcagtgactgctcaaggcagagttgacaagtacgaaacaaccggcatagtaatccagaactgtagaattgtccctgaacagaaactccacgccgaaagattaactgttcccacatacttaggaagaccatggaaagagtattctaggactgtgattatggaatcaacaattgaggatttgattcaaccagctggatggcttgaatggaatggtaattttgctcttgacacactttactatgctgagtatgcaaatagaggccctggtgctgcaactaaccaaagggttaaatggaagggttacaaggtcattactgataggaatgaagctatgcaattcactgttggccaatttcttcaaggaaatatgtggttaggaaacactggtgcaccctatttccttggattaaagacttaattaattcagattagttatgtattattattcaataagaaaagaaaagtgttataataactcatataggtttgtattttttgaggatttgagaggatggaactacttattcccacccccacctcattgattatgagtaaaataatataatttggtgtattcatttttggtatatggctcaatattaaatgtagttgccattcaaaataaatatatatactttataatttggttctcttacatttcttcctcatctattttttgtttttgttttttgggattcttatatagtaagttattgttattagtgctatgttagagtgtgatacatatatggatagtaatatatattaatttgtgatgatgagattcagtgctttaggttttgagggtgtaattgctattgttaaatggattggaatttatttgtaaaaatttatttatatgtttatgtatgtataatactcttaatttttttaagcaataaacttgtttgactgaagtggtaattggtataaccacttgagggtagctcaagtggccatagggggtgcgtgtgtattggaggtcctgggttcgagtcccaggttatgctaatgtaatatataaacgcttaaatcaaaaaaaagaagtggtaattggtacaagccactaagactagtttagtggtgagggagtgatgagaaaaaagaagaggttatgggttccaacctaagatctttaaactattaattgattgtaatactattacgctacactcaaaaaagaaatagtaattggtacatttttagtaaaaaatattatgattgtgcaattatagaatatgaatcctgcatttgaaaatgttatatatatatgggtgcactcttaatgaatattactcatgaatgagtaaattttaatttttaagtttagtttttctatctaattattttaattttaatttttacattttatgagttgaggttgttccatcatataggaaaaaaaaaataagaaaaaagttattcagtaaaaagaagataaaaaaaatgagtttgacttaaatattttgtatctaaatatattttaaatatagtgtaaaaaaaatattttttgatatttttttaattaaataactaaattaaacatagatattaaaatttctatttcattattcgttattaaatccacatttaaatatatatacagtagaacctnnnnnnaagaatacacttgggactaagaaaataatattctaattgagaggt

SEQ ID NO: 44017 - DNA, 1894 bp, Cannabis sativa
ttgttgcaaaaaggataaaattgttcacctgaaccatcaaattgaaccggtgagcgctacttgtgagtttatgttgaaatgctagcgtattaccagcacctgtacttgaaagtctgccagactgacgtgttgttaccggagggtatgtgagtatccaatcatcagcagctgccaaggcagcagtgctttcttcaattcttttcaaattggcatttagtgcctgttcaacactaggtctaaaaagtttcaagagcacaggacaaagtgccaaaccacgagcctccaacaaggaacaatgacctaatgctatttgaacacattccgctgcagctcttaaacccccagcagcagctgacgaagctaacgcgtgtcttttaacaagaagggcaaaggcttcggtttgctttgtagcccacatcacaagttcagaagtatatgccggttccccgccaaaaatggctatcgagtcactagcagcttgagcaatagcggaaaatactagctgtgatagggcagcagtatatgctcctccatatgaagtgcttgaaggacgaaggctttgcatattatatttatatctttggaggtgtgcgttcattaacaatgtatgagcacgagggccatccccaagctttttaagagctgaaatagcagcacgaagctcactaccacgtgtagaaggctggcaagcagcttcggcaagctgatcagccaacttttgcctgtgctctattatagaagtctgaagagacgagagcatagcaggactcagtttcttggtttctttttcttcggaaactacacgctctccttcatcaagcaaagccaaggcttcatctattctcctctcagctagcaaaacgtctaagagatcagggaactctactaaccatttctccagatccgaaggttctttatcttcaaaagccgatggagaattcgcaaatgaaccatcaggagcagttttagttaatgaatcaatgttaactccttctgctaaaccatgaattaaagcagtttgggtagacatcagtttgcggatagaagaaagctccccctctaaatctgaaatctctttagaggtcctgtaagtaataagtaaagactacttacaatctgaaatattaagtatataaaagaaaataaagtcatgacggtataacattaactacataattttgttccattctctgtttcccaaaggctagaaatttatttcaagtttgaggaaagacaaatgtttctgttcttcttcatcaaatgataacaagatttgtcagctaaaaaataggctttactttgcatcaaatagtaccaaacagacagaaactagaaaaaaagcttcagttttttttgggtatgatgattgtctttagacaggtcaatatgaaatgcagtaatatgaagtaaatagattgtaacttaccgaatgaaagctgtataattagcataaacacttttacgcatttcctcagcagaagctttcttcaaatccaaaagatatgaacatagatgttttatttcctgtaagaaaataaaaaatgtataccaagaaacttgtttttatgtatgcattaaacaaagagctaacaaattgattttatttggtatcaagtcagacatgaatgtctagcaattatagaatagttgcagtaatatcagcaataactgtcactcaagattaaagtaaccatcttcaagaaacaataaaatgcataatcttaattaacagatgaacaatacaaatataatgaagaaacaaaatgttagctttcaagcactgattagtctaaatcagacgtgaaaaaataaaaaaaaagagagaaagggaccacttgtcttagactctctcacttgtggcggaggaataccttggtaaacaaaatctggtaca

SEQ ID NO: 44018 - DNA, 1553 bp, Cannabis sativa
ataaatatataaataatcttaaatacacttgaaaacgatttttgaggtctatctaatctagtgggtttgaaattcaataatgtgatgcagtgattttgagccattttgtttgaaatgagttagtagtacaagtgtggtgatgtaaaataagtcaatttttgagacttaattttgttagagagaggacagaaaccatcaattgtgtggcatggtttgttgtctactcctattaaattaataaattgctcagccagacagctgatttcacataaaatggtccataccttaagaattgccatattccaaacctattaattatacagacagaatagtcattttttgtgtaaacttccataataaagaatattacatctacatttgcgtttatgctaagcactccagtatacaaattataattaaaaataaataaattgatacctttctttttttacttttaggttgtgtcaaaatcagcccattctgatcccgttgggattttcttttgctctaatagcttttactgagtttttttttcttgatcttttatttatttacgtacactttcacggacagtatgtatatatttagatgtagagatgtgtcttatattgaaaaaggaaaatatatctaatattgttgaggtgtgattcacaaatcacaaacataagccaactaataatgttttgtttggctaccaccatacctccattgtgggccgtaccaaaatattagatattcaatctttcaactcttcattttgtattaaagaaataatactttgtattgtgaggttgtctttgttgtcctctctatagtgtattaagttctcttatgtgcaagttgtttgacactacttttcttctagatatgctgggaaatgtactgtgagcattaaagtgtaaaatcaattatcaattactcactgaaatatcttccaagtgaacgatgctcaatttgaaaaatattttagtgaaaagttagcatcttttgtactaaaacataattcatctaatctaattgtaaagtgttaacaaaacattcttacaaaaatattaaattttgcatcaaattttgtaattgtacatttaagtacaatactaaaaattgatgtaaattatcacaaaagtatttttttttattaaatatagtatagtttttatattttcgaaaaaaaatactttaataaaaaataaactttgtaacaaaatttataattatttattgaaatataatattaaaattaaaacaaatatattacaaattttttttttttgtgttaaattgatcatgtcctggagtgttatggtatccctctaaaattccgtcattggatatcgcaatgtatttctactacaaccctaaatatttgtctcaataggggtcctgttggcaaaatcaatccctcatgtgggcttcgtcagggagacccgctgtccccttatcttttcatttgggctgctgatgttctttcaagattaattcacgatgcccttgaccagggttccatcaaaggtattaaactcagtagaggtggtcctgtgctatcccacatt

SEQ ID NO: 44019 - DNA, 2265 bp, Cannabis sativa
  modified_base (1785)..(1790): a, c, t, g, unknown or other
taatccatataattcagccctaatccctagttgaaacactataaaaggaacatgatgctctcatctcattctcttatcaacttgactattcaacctactagttttcattctccaagaactagtagatgagagagttccttccttagtgatttcagcctccttcattgttcttccatattcgaaaccttgagtgaacgagtgacatgcccacacatagcaagtcaagtactcaatcatagtgagtaagacgctggtaaccaaacccgaatgagagaaagagatccaggtttagatcttgataatgctctggtacataaatgaatcaaggtctagagatcttgaacggaatgagtcattatattccgttgcacccaatgtaaggtttcttaaacacttatgtgtttatttttcatagttttagagaattcatatttaggatgttaattcaacatatttgttagtaaatctaaatctttgtaaaatattcttaacacaagttacattgagtaaagaaacatgttccactgaatttggtgctattattaaggatattggaaatgtttggtccgctttctctagtatttctctttctcattgtaagcggtcctttaatggattagcccacttgcttgcttgtattgctcattctttggatactgttaaagtttagtgctcaagtcttccccctgtcttttacttttgaattttgtattgatcgttttgattggttggctttgtacaaattagtagaattatttcattatttcgaaaaataaaaaataaaaatgttactgtatttttttttttcaataattaactagagtttatttagtttgataaattttaatcaaatttataggatggatctaattactaaaatattatatcttgaagttatgattttgtgtgaaatataaatactataaattatttatacatgaataatgtgggcacacaaaagtttattcttttaaataaattttaatcaaattcataaagtattgatccaattagagtttattagttaaagtaaaacatcaatctaataaatgttattacatgtgcctaagtatgataaaatagaaatcaaattaacatacctttagaacatatttgaatccatattaaaatattcaaaagaaaaagccattggtacacataaagattttcaaaaataattttttaaaaaataaaattgaaaattgcaataggttccttttctatctttttatctttcggtgtaaaaaaggtcaactaagtctcacttaatttattcacagaattatttagttaacttaattagattaattaaatctaatcagtatgtcctattcaaatttttttaaaagaaattaattaaaaactgaatatttataaacatcggacggtggtttggtcggttaagagatcatgcaagcattaaaaaacaactatggttaaaatattagcaatatgccagattaagacttggacaggtttgattaatttttgattaggatttataaaattagtgatggtcattgggaaacaagggaaagaaagttgtaaagaatgagcttaaaataagttaatatttcctattaatatgcccgcataatcatgctcccacttttgggcttacatatggtgcaggcccaaatagtttggataaggctataggtttttcatttgaaaaattaatagattttatttcacaaatatataaaaataacagaaaaattacaaaaatacgattttacggaattttaaatatgtttattaatttttttattttatttacagaannnnnngtctttttatgttgtactcttattcatttattgttgattttttgttatctgtacgttattttttatttttgttttgatgttattttaacgttactttttcatagattttttgttgttttcgtatttttttttttatgaaaaaccgtaaaaatatacatataaaaaaattctttaaacataaaaatataatttcttttataaaaaatagtgtcttatgtaattatctcaaattaataagaatatggtatttttttggggatattgataataatattagaaaaataattgaaatttagataaatatagcacaaaaagttaaggccactaaatatgatattatctaactaattaaactaaaaatatgagtttgtaaaaacaaaaagtcatagaaaacaaaaatacaatcagaattttaagagtccttattttttttcattcttcgaaaaatttatacaattctctctctctctctctc

SEQ ID NO: 44020 - DNA, 2973 bp, Cannabis sativa
ttatgccacttacaaacttgaaactttaagtacttatgccgctatttatcctaaaaaaatataatatttattatgatataaaatttagctcatactatatttgttattatgaaaataacaattttactctgattcgagtgaggtaaattatctaaaatttctaaaataattataaaaaggctattaacaccatcataaattgtttacaaaaaaaatatattaaaagtatctcaattagactatactcgactgtatgatttttttttttttacataacctaccatagtcacttcatatattataaataaaaaaaatataatgtacaagaaattcctaacttaaaatttttcttttgaataatttaatataaaaaattcaggattagaattgtcttttgcatgccaaaacaaaaacatattcaacaagctggttaaaattttgatttcgacatcctaattacttgaattattttaaaaattcaagtaatatagtggttaaaaaaatcttagtcatgccaaaaaaaaataatgaactacctaatcactatcaaacaataccactctcaagtttagaaacattttccaataatatgaaccaataaccatggaggcttttatgcatgaacaatcatccaaaagtcaaaacacataaaattttggctgtccaacactactttattattttgagaaagaaatataaaccattaacaagtttactttcttctgaagagcttctccttcattctttctacagcagctctaagagttgcttcatctttacagaaggtaaacctcactaagttctttccttcttccgggttcaagtaaaatacacttgtcggtatggctacaaccccgacttctttgattaaatactcgcaaaactgaatgtcatcgttggctaccccgaaaggggtgtgatctacaaccacaaagtaagtcccacttgatggataaaccttgaatccaacagctttcaacccttcaaccaaaatcgccttctttgcattgtaatcccgcctcagctcctcatagtaagagtctggagctctaagagccgcggcagcagcccactgcataggagtggaggtagcgaatgtgagaaaggcatgtgcttgcctgactccccatgccagatgtggaggagctattgcccatccgatcttccaacccgtcaacgagaatgtcttacctagtgaattcattgtcactgttcgctcatacattcctggaagagaggctatagaaatgtgatccatttcaaaggccaacttatcataaacttcatctgagaaaaccaacacatcattttcaatgcagagagatgcaattgtattgagttcttcccgagtgaacatctttccagttggattatggggagtgtttagaagaattgcacgagtgtttttcgagattgctgacttgagctcctcaataggtagagcgaaatctggagggcacaatgtgatgccctttactttagcaccagccatggataaagtagcctcataagaatcataaaaaggtgcaaaaaggataacctcatcaccaggatttatcaaacccaatatagtagcagctatagcttcagtgcacccagaagtaacagtaatttctttctcggggtccaccacaagacccgtatctttcttgaatcgctcagcaatggctgaattcaagtctggaactccataaccacgagcatattgattcttcccatccttgacggcttgaatcgctgcttccttcacaaaatcaggaccgtcaaagttggggaatccttgaccaaggtttatcgccccatgtttaacagctagattgctcatttgggtaaatattgttgttttgaacttctccaaacgctttgcaatctaccagagtatataaacaccatttacagtaagaagaaaaacagtaacaacatagaaaagttcagcacaaaggcatggcaatcatttgattaacaattacagcacgatcgagttctgtctttcaaccgagcacaaaacataattaaagaagataaaaccaaacgcaacaaaagtaagaaactattacttttacaaggagggatagtatgaaaaaacaatgcaaatgatgagtaatttgaatggcaagatttaacatgtaaagagttaaaagtagagttctcccttccttgaatcctaatctatttctttattaaagttttgtttaactagagaacataaaccaataaaaagcagaaactgattcataacatcagatagtaaccatgaagcaaaatagggaagaaccctttattttgaggttcaagcacactaattttgaatatttacctatttaaacaaaaccaacaagacatcaagcacgaaaccatgaagtaaataagagtgttcgaagcctaaaaatgcttccaatttatgaataagcaatgcagcaaatctttgattttaagaataaaaatagcaatgctgtgtactccatctcaaactacagacatgctctaccataatcatcattaaggttatctctccgtatttagactaaccaataatatttgagaaacagtaaactcagacaatcaacaactcatgttaacaataactctaaacactgcaataaatgagcaactcgaaactcatattaaggttaggattggattgcttttaagaataaaaggaaaatattgattttctctctcacaatttgaatctgatttgacttgtaaatcagagaacaggtgaaattttgtgaattctgaagccagatttgaagaatacatagaccataaacaaaaggaaagacatgattttgatttaacaaataataaaaaaaaaagaacaaatctgataaagggtaacatttgcaatagtttaagtttaaaagagatgaaaccaaattattgaaagaaaggaagaaaccccatttccaattcaagcatataagaaagacccatgaaaatgcgaaccgaaatgcagttgaatcaatggtt

SEQ ID NO: 44021 - DNA, 1817 bp, Cannabis sativa
tttgctggatgtgaccgacataaaaaattattggatcaaataacaacaaatattatattatattgttaatcattgccaaaaagagaaatattaataaggaatttattttgtaatttattataaaaattcaatattttataatccctatcccctatggcaatcgttttttattttaaattattttcttaccatttaacagcagattaaacaagaaaggaaaaaaaatatatatttgaattatatcaacactaatgaattaatacttagagaatttaatggatttttagaaataaaaacttaccataaaaaaaaaaatatcacacgtcaaaaccaaattaagctaatttttttttttcctatataacgattttttccttctcttttttgggtgtcaaatcgatatgatttttcattccttagctaaaatctagagtaaaattctaggaattaatccttaaaataggatcaaaaatgtaaaaaaaaaaaagaaaaaagaaattaatttaacaattttctaatattaattaattaacttaattaatttactcagggatagaaaccagcatagggcgccacgtcctcctcaataacgacctataacggaaacccgaccaccccgcgggtctaggagaacccgacccggattgtaatcgggtcgacccgacaaccataaccgacactctgttctccttataaatacctttaacttcttcttcttccaattcaaccggagaagaagacccgaaaagctccttaagactgttcctcttcaccggagtagctttctccggcgccggagccgccgtagcagcagccctgaggaatcgaaaccggtcgatgacggaggaggtggaattggaattggaattggagtctcgttgtcgaggaggagaagtacggtaattgacggtgctttttgatcggccgagaagcatacggagggtagttttccggcgacggaggtggatgaccggagaagttctagggctacgtgtggggctctgtgtgacgccgcactgagttgcgaggagcttgaatctttgaagagcagccatggttttgaggtgagtggtgtggttagggttttgttttatagttgtgaaattgaggttgaatttgaatttgaatggtgaatttgatgatgataatgattgagtttgaggatgaggagagagagtacttatgggtttttttgttgttgattgtttcttttcaaaaatggatctgttgttgttgttgttgtttttaggactcgaatgcattttttttatttcatgaaaatatgtttcaaagatagattagggcttaggaggagaaaagagaaagtgaaagagaaagagagagaaaataaaagtgggtttatttttcattttccgagaaaaattctaagggtggtgatctaaaatctatgggaggttgtgaaaaagaggttaattactttgtctagtaatagtcttgactagactagtctaatagtttctgtttgactctctctatttcctattagttccaacactttctataaatgaccatttataattggttaaaaattataatagaatagtgttattctaccaaaataatagaaaactcattccatttcaataatttaaaatacaactaaataaagtaataaaataaatttgtctcatttcccttctagtctatttcattactttcaaccaaataccacattaatataataatttttatagagtattgataacgaatcacaaatcagtactctaaataacaatactctttttatttaggtaatgaaattgagtaaccaaatagtttgtctttttatttcaaac

SEQ ID NO: 44022 - DNA, 1070 bp, Cannabis sativa
cctgctgccttaaaagaatcaaaacacgcactagagtttgtccactccgatatatggggtcctttcccaactatttctagacatggctatcgctactacatccattttgtagatgaatatagtcgctacacttggatctttccgctcaaaacaaagaatgaagctttttgtacatttaaaatttttcaacttcaagttgaaaaacaactcaacacctccatcaaaacaattcaaaccgattagggaggtgaatatcgaaagtttgaaccatatctccaattcataagtgttaagtttagacatccgtgtgctaacacgcatcaaaaaaatggaaaagccgagagaaaacatcaacatatagtcgaaacgagccttactcttttagaacactctagcatgcctcaacggttttggttagaagcttttaaaacagccactttccttatcaatcaccttgctacacatgttctccattacaaatgtcccgttcaaaaactgttcgatctttccctgaattacaagttcttaaaagtctttggatgtacatgatatccctatctaagaccatacaacactatacacttcagtttaggcccgctaagtatgtcttcataggctatatcccaagccacaagggttacttgtgtctccataattcagggcgtgtatacattgcaagtagtgtttcatttgatgaagccgactttccctttgctagttgttttacctaccctagtgcacatacagaccctccattacaacctagtcactaccctcaatggttacattatttgtttactgtgacttcagaccgtgataatggtgccactgtgaacaatgaagacaccccttttgctattccgaaagaaactccttttctcaagttcctctgccacttcaccacacaagaccctttgttcatcagatcacacccctcccaccaccaaatccacccactcataatctactattccattacatgtccaccttctactgtcacctctcactcagttgaaccaatccccccaaacatccacctccttacaaccaggttcgacatcccctattcc

SEQ ID NO: 44023 - DNA, 3623 bp, Cannabis sativa
ttttgatacttctacacaatcatctctctctatctccatctacatacatagcaaaccaatgcaagatcaacaaaatgattaaaaaagaatagttaagaggaagtgaagtaaaagcttacatgaaatactttatggtaataatacaacggttcataaaatagagtgaagtgatagagttacgatttttagtttttcctcacccgttgatatttttttttataaaatgtaaatttttttgtattgtactcaattttttagtttagtagagaaggagaaaagttccaaaagtgtaagacaaaatgaagaatcgtaatgattttttctttttgttaaatgcgtaatttccaattgcaatgcaaaaagaattatttctttttcatttgacaaaaatgaaatacatgtgtgtatttatagatgagatataatttttgtatgataatagataatgtaaattcttgttgtgcctaatccattttcaaggactgaaaggcaagattagcatgtgaaaaacacctctttgttttttatgtttatacagattcaggctatttcaaaatcacttaagaacacatagataaaaaaaggaaagaacaaagcaaagcaaagccataactatggtagaataatgacacgagtacaagaaaagatgaatcattaaaaataacaacataataacaaaaaggaaacattaattaagtgagactgtgatatttgatcaatatattaaactatgatgagaatgagcaagagataactactcgtactctaggttatacaatcacacaaactgcaattatgtttgtaccaataatacaacaggttaccatcaatcaacaaaatccaaaagtaaaaggaaagaaagacatcaaaagcataataaacagagtttttgaacgcgataggggtagatcatttcttttacatcgaaagcataaaattatcttaaataaatataccaagcacataatcgaatatttctttcaataaacagagaacaatggcttaacacctaaaacaagagcaataggaaactagcaaaacagagaaaacataagcttggactacggttcattagaaaaaatgtcaacactgactaaaatatgagagagagagagagagggagagagaagaaataccgttaaagtgatggtcgactgaagagatggtgtcgatttcttaggcgattgaagagacgaccgctgttaaggtacttgaagtaggccgacgaatgaagatctagactggtcggcaagggctcagtcaatttctcagtggttaggactggtggtaggagatgaaacatctgtaggaaaaagatagtaaagtgaaacgattattaggtttagaattatttaggtaagattattttatatatattataatttttttaaatatataattaagtgtagattggattggatcggttactttttgaggtcaaacaacatccaatctgcacaagtacagatttcaaatttttcaatccaatccaatccgtacaagtgcggatattcacattttgcggattggattggattggatcgtgcggattggattggatcagatactttatgaacatccctacttgaagatcaatctgagaaagctgagaaaggaattgaaggttccaggaaggatgatccataaaccataattaagcaagcaagatcaacaatcattatgaacttggctgataatgtattgagatagattattggcgaaagaacaacttttaaaatctggacaaagctcaatcaactctatatggctaagtctactacaactaaaatcttcttaaaatggaagttctatggttttaaaatgaatggaactaattctttagaacaaaatcttgatgaatcaaataagattgttttatttcttaataacatgggtgaaaaaattaaagaggaagatcaagttgtgattctacttaatggtcttcttgatcaaattaaagaaatgaggactgtaatcatgtatagtcgagatactctaactctgcaagatgttatacactcagataaagggatgctaaactagattggcaaaaaggctaccaaacaagagtccatgcaatatgaaagcttattggctcgagtaaggaatacaagaaggagtagttcaagattcagaagtttttcaagatcaaagtcaaagccaaaagacaccaaaagtgtcatcattgtggaaaaggaggacatttgatctagaatttttgggagatcaagaacaagaataagagaaacaaagaagaagaagagaagtccagtgtttcaaatgtagtagtagatgacacatacagttcagatggtgatatcctctttgttgtgataaaagtgtgtgatgatccaaattagatagatggagatgtttgtaccagttcataacagaaggattataataagttgatcctggacagtagatggacttatcacacgagtctcaataaagaatgatttactgactatgaaaaaattaatagaggaagtatgatcatgggaaatgatcacaagtgccaaatgataggcattgagatcaattgcaattaaaagttttgatcaaactgttaaaattttcaccaaggttaggcttaggcatataccaaacttaaaaagaaattaaatatctcttggtactcttgatgatgaggatgttaacacaaaaccatcaatggaactatgaagattaccagaggatctttgctggtattgaaggacacaaaaagacatggactttattttttaaatggccagacaataatgcctccttgtgcaacatctgtggataaatgtacaatcataaactaagctatggcatgctcgaatggggcatattggttgtttaccccaaaatagaccctgatgacgtgaacatcaatatttgacatgtggcaagaagtaaaactttctcgagttgagtaaagtacaaattgatgatatcacatagatacgactagagtactgagtgtaagctaatattatggttaatcttactattatatgaacgctccagacctagtatgcgttggacataggataggattgtgattggatgtatgggtgcttggttatagtctggtttatgtttatgttatatttatgcttatcttactaagtctattgactcacagatattgtttacatgtgtaggtaaaaacaaagcaaaggctgaacaatagtgagctcggactagatgaagattgtacatatcgaggcagttagacctgaagtgttctgatctttaggacaacaaactttattttgatggttgctatgcgacaacttttgtaactaatgtattttataaactagattttaactttgtaaatgagttccaggaatatgttttgtacttatgtatttaagaatagttaaaaagcacacagtagtttaaaatcacgataacgtgtctaatctagtagggagttataaaaattaccatattacccttcaatgtattttacccttaaaacacctagcttctcataaatgatatttcagtaaactaatataattactgaaaaggagctcttaaatttatgtttgttaccaagctctaaggaaactatcatttcacttataactgtttataaaagctatagattctatttatatgattaa

SEQ ID NO: 44024 - DNA, 1626 bp, Cannabis sativa
caatagttcaggagacattttcaatagccttaaaagttcaagggacataagttagtacatgtcaaagtttaaggggcaaaaatcttaattagccatataaaaataattaatttatgaaaataactaattagtattgttgtcttaaatattataagcatgttctatatatggcagattagcagtctctaattacagtgactcagttttgggtttcagctccttcaccggcgacgaacctaagatctttgagatctaacaaccaacctccgccactctttctccggtgaaacacagcacagcacagcaggggaaatgaggcatggtggtggtttcagaaggagacgggtttcgatacaatccttcgtggtggtctgcgcaatcttcgccgcaatgggtttgtttatgcttaatctcagacccattgatcctcccaccactcataactttcttgtcaagctcgcagcaactcgtgattttcctgttcctgaaatcgatgagacaaccaagaagggaacgaggccgtgtgcgaccgtggaggagatgggagaggattttagagatgggttttggaggagtagtcttagggttagaagaattatcgatcaacactttgatctcaacggtatgttgttattgtagataatagataaggttgataatcatacacacacagagatttcattttaggaagaaaattttgaaacttggttgtgtaaagctaagaagggtttgtaataaaaattagaactttagcttatacatgatttttatagactcttatagcttgtatatattcaaattagaaaccttcttaaattcagatggccatataaaactatgtcatatacaacattgttttcaagtaattgaagtagtttgtgaagtttaatccattctaggggttcagcttatcaatttccaatgaaatttctgtctttaaatgcttatttttatactcttttaacttgtatgtgatcaaatcaccttggcatacattttgaaatagatttagatgatgccatatgaaactatgtcatatctcatatgcaacattgtttcaagtgattgaaatagtttgtgaagttcaatccattattggtgtttagttatttgtctgatcccttctaggggttaagctaatcaattttccatttaatttttagtctttaatggctaatttagaacctgttttcgaagttcttaaaaagattctattgtatggacactaaaactactagtataattgttactttattctttacaatctcagtttcccaataaaatttcagtctttaaaagctaatatagaacctgtttttatagtctttaaatgctagtatattgttcagcttatcaattttccaataaaatttcagtctttaaaggctaatatagaacctgttttagaagttttcaaatattctacatggcctctaagagtactagtataatttttacttgaatctttacaatttcaggtgctcagagaatccgaaatctttctccagagaagttctgccaacatgggtttgtattggccaaggcatcagaggctggtcttgggaatgaaatgtacaagattttaagtgctgcagcattgagtataatgttaaatcggtccctgat

SEQ ID NO: 44025 - DNA, 4420 bp, Cannabis sativa
cacacaggtgtcgatgatggtgcacatcagaacaccccaggccagttcagctcccctcagatcaccactggtaatgttcagtatggcgctcagatgggatctgcaggtttcagcaacgcaccttttggaaatactcttacacaacctttttctatcaaacttgataggaataattacacactttggagaaatctggtctcaacaatcatcagagggcatcggcttgaaggatatgtcaatggaactaagatctgtcctacagaatttatagctattcctggaggtcatgaagagtcgactggtgttctcgagcaacaactaaatcctgactatgagcgttggatcgtttgtgatcaactcctcatgggatggctttacgggtctatgactgaagcaatcgcaacagaggttatggggtgcacttcagctagaactctttgggtagctttggagaatctctatggagcgcactcacgggccaagatggacgatactcgaacaaaaatacagactattcgcaaaggaagcacaaccatggcggagtatttacgacagaaaagatcacttgcagatagtctagctcttgctggggacccttaccccgaatctcatctgatttcaaacgttctaagcggccttgatgcggagtacttaacaatcgtgtgccagcttgaagctcaagccaaaatcggcttaacctggcaggaattgcaagagactctgctgagttttgacagtaaactcaaacgcctaaacttgctggtgtctaatggaaagaatgcaagttcagctggtgttggtccctctgctgcccttgccaacaaacatccaacaggtcgcgggtatcctaatcacaacaacaatggtcgaggaggcagaggctatggttacaacaataatggtcaaggaagaggcaacaactctggacgtggtcgagggagaaatggaggaagaaacaccaaaccaacttgtcaagtgtgtgggcgctatggacactccgctgcctattgctacaacagatacgatgaatcatttatgggtttcacaccaggaggaaacaactcttctgctcaagagaaaaaggaccctagtgcctttatagccacaccagaagttgtcgaccatgaagggtggtatgctgattctggtgcgagcaatcaccttacctctgaccaagacaacatgaccaataagaccacctacaatggtaaggacaaactgacagtaggagatggaaatcaactagccatctctcatgttggttctggtatttttaaatctgattgtggtaactctttgcatttaactgatgtgctacatgtccctaatattgcaaaaaacctgattagcatttcaaagttaactgctgacaataaagtttatgttgagtttttctctgatgtgtgttttgtgaaggatctagcaacaaagatggtggtgctgcaagggaaacttaaagacggtttgtatcagttggaaggtcacactacacaaagccaaacttcctcaatcggttcaccattgtcgagtcatgaaccctctggtttttcttcaagtttgtttagtggtttagttgagtctagttcacagcctccctttaaaattaatcaaagttgtatttcctccaaagacctatggcataggagattaggtcacccttcttcaagggttttgaatcaagtgctgaatagtgcatgtgtaaagacttctgttaatgaaaatttaatgttttgtgaggcttgtcaatatgggaaatcccattctttacctttcaaattatctgaaaatagagccactaaagctttagagttaatccacacggatttatgggggcctgcccccgtaatgtccaacaccaatttgaggtactacattcactttgtggatgattttagtagatatacttggctttatcctctcaaagccaagtctgatgctcttggagcattcgttcagttcaaaactatggctgaaaaccaatttgattgtaaaatcaagaagcttcagaccgattgggggggagagtaccaagcctttagcaatcttgttattgagaatggaattctctttcagcactcttgtcctcacacctccgaacaaaatggtcgtgctgaacgaaagcacagacacattgtcgaaatgggcttaacccttcttgctcaagcccatatgccgctaaggtattgggttgatgcctttcaaacatcagtctatttaattaataggcttcctacacctgtgcttaaggggaagtctcccattgaggttttacttaggaggaaaccagactataagttcttaaaaactttcggttcagcttgttacccatgtcttcgttcctatcaaactcacaagtttcagtttcactcaactaagtgtgtcaacttaggatatagtgagtttcataaaggatataaatgtctaagttccaatgggagactctatatttcgaggcatgtcgtatttaatgaagaggaatttcctttcgaaaatggtttcctaaacaacttcaaaaaggagtctgaagttaatctttcacttcccagtacctggtttcaacttccctttcaacaaacaacttctcatgagtcaaacaatgctccagccgtgtcctcaaactctgaaatccatactgatacaaacaggtctgagcaaaacaacagcacatcaccatccttgaggctggaccaatcacccacggatcaggtagatcactctaataattcttttgttgagctagacattgatcccacagaaacaatagatgatgatatgacagtaacacaacaagatcatgtcactgctgcctctactcagccatgccatccaatgatcaccagatccaaggttggcacctttaaaccgaagacttacacagcccaaagcagatggcagggtgatataaccgaacctcttactgtccaagaagctttggctcacgaggggtggaatagagcaatgacagaggagaatactgccttaatcaaaaataagacctggaagctggtgccaagattgaaagacatgtatattgttggtaacaagtgggtgtacaagataaagtacaatgctgatggttcagttcaaaggctcaaagctcgtttagttgcaaagggcttccaccaaagaccaggaatcgatttcggagaaacgtttagtccggttgtcaaagcatcaacaattagagtggttcttaccatagcagttgcaaatgcgtgggatgttagacaacttgacataaacaacgccttcttgaatggtgaactagaagagtcggtgtatatggaacaaccccaaggcttcgaagacaaacaaaaaccagattatgtgtgtaagttggaaaaatcgctctatggtttgaagctggccccacgagcatggtatgaccagctgaaaaatactcttctcaaatggaattttgaaaactctagggctgatacttctctctttctgctgaaaacatccaggtatgtcattatggtgctcatttatgtggatgacattgtcatcacgggaaatgacacaaatgaactgaatcggttcatacagaatcttcacaagacctttgctctaaaagacttgggagctcttaatttctttcttggaatcgaggttttcagagatgaaacagggatgtacctatctcaagggaaatatgttgctgaattgcttaaacgagtggaaatgaccaatattaaatcctgtcctactcccatgacaggtggaaaacctctgtccttgcaagatggagaggagttaactgatcacactcaatataggagtgtaataggggcattgcaatacttgacacacacacggccagatatcgcttttgcggtaaataaattaagtcagttcttgaagtgtcccactactgctcactggacagccgcaaagagagtgcttcgctatttgaaaggtactatacatcacggcatacacattaaatacagtgacaaacttcccattgttggctactgtgatgcagattgggaatgctgcccagacgataggaaatcaatatctggttactgtgtgtattttggtgaaacgctgataacttggtcatccaaaaaacaaaccgtggtagcacgctcaagtaccgagtcagaatatcgagccttagctcagataacggcagagataacatggctggaatctctgcttaaggaaatgaagttcagcttaccttccacaccagttatctggtgcgataacatgagcgccatagctctagcttcaaatcctgtttaccacgcaaggactaaacacatcgaactcgatatacatttcattcgggacagagttttacaaaagaaagtggaagtaagacacatatcaacacaagaacaagtggcagattgtctcacgaaggccttaactcatcccaaatttcaggtgctggtggacaaacttggtg

SEQ ID NO: 44026 - DNA, 2209 bp, Cannabis sativa
ttttaccatttctctcttaacatataaaagagaaatattaaaaaagcattaaggttattagcacccttctctcgatatcaaatcactattagtataattaaatattagatcctatataatttagtgtaataatttttaaaatataatgctcactagtcacaaaaggccacgtatataaatagtgatattaaatattaatcgtacccaaatatgaatgctcataaatttaatataattaataaatcataataataataataatatcaaatcaacccgtgccctctttttttatttttaatttttttaaatcctagtgaagttgttttcactaaacagtaagtcttctctttctctttttctctatattattttatattatatattacataaataaatataattgacaataataattaaaaataaataaattaattacctctgcacaaattctaagaacccaaaaacatcatatacgtccttattctccttaactgaacttcatctctttctctctctctctctctctctttctttctctctcatcaagaaccctagaacacatatatatgtttggttacaagaataaaatttctcacaaattttttctatagccacaatccaagatccaatctttgaaaaaaaaattattatggattcaattgcagaagtagatagttcaaattcagacggtgccagtatcacaaatactggcaccgttcccgctactactactactctgattggttcatcgaactcgagcagtagtagtagtagcaacaacagcagtagtcgttacgagaatcagaagcgtcgagattggaacactttcgggcaatacctaaagaaccaccggcctccgctatctctatcccgatgcagcggagctcatgttctcgaatttctccgttatttagaccaattcggtaagactaaagtccacacaccaatatgccccttttacgggcaccctaatccacctgccccttgtccctgcccgctccgtcaggcttggggcagtctggatgctcttatagggcgacttcgggctgccttcgaagaaaacggaggcaaacccgaagctaatcctttcggagctagagctgtcaggctctatctccgagaggtaagagatttacagtctaaagctagaggaattagttatgataagaagaagagaaaacgaccgccgccgccacctcatcatcatccacctcctcagccgccacaacagttctcgatgacatcagcacagccaccgccacatcagcagcagcagcagcagattgctcctcctcaaccattgattcatcatttgggtcaacaccatcatcaccaccatcatcaccatcatcaatgagctatatatatatatatatatggtgattgatctaatattatggaggtactacttattgggtagggttttttttttcctttttattattatttaagctatattataggttgaagaaagaagaaaaggaggaagaagaagatgatgttattattaatggtaaaaataattttaattattagtttgggatattttttagggttagattgttaaaattattttatgcaagtttgtggtaattagaagttgtttaatatatattatattctatgtaattctctgtttttaattttgtgtggttttaatctacatatatatatatataaatcatcattatattgtcatatgaatctgcttttgaggcaaacagagagttttacaactatatatataaataattattaattatatattatataaattgtatagtagtacgtagtagagagtagtactagtagtgttagttagtatacattaattatatatatttatttatataatgctcttagttttatgcagcttgattcaccagttttcattctgttatgttatgtcacttttagaattaatgacaatatattataattataatttaacaaaatttgttaatctttgtcaaaaaaatcagtgatttatctatatacagtttgaaatgactttacatatagatcatcttgtcagattatatatatgatatatatatatatacacttttctttcatcatgcttgtgaattcaatattttcttttttattaatttttttgcacctttttatatatctttgctttactgtctgtaaaaatcattaaattaatttgtctaaaaaacttttttccacaaaatcctcctcttct

SEQ ID NO: 44027 - DNA, 1335 bp, Cannabis sativa
gctgcagcgaatcgctctgtaaaaataccagttatacaatttcgacaattcctgaatacagttgctccaaccgattgttctgagttgatgcaaatatctgtgcaacagctcagccaaccctgcggcggagtaaggtgggtcgaaataaaaaaattgtggatatagtcaacagaatgatgctccttgtatcaaaaacagactgccttgattgcctcattgatcgacatcttgtgagatccatggacaatatcattcctcattctccagatgacattaaaaatgcacagagctcccaacatgaaatcatgaaaactgaggctttgaggtctattgagacttatttgaaaccacgacatccaactctcccaatcagagcaatggacaacctcaatctgatcccccataagcttccaaaccagactgctttggaaacggacacttccaaaacaaatggaaagcagatttaacttccattagacaaatggggcagtccatggaaggaatgggaaaagcactccccagtttctctctagtagggagggagttgctaaggattttccaccaaagtagtttaaatcgtgcatgaaatggagagttccagatggctttccaaatccaattaggatggtcttcaagggagtgttttcaaacaaggtggtaggctgattttgttgtaaaaacaccactcttctcgcccagccagcgccatgaatcatcttgtgggagcgcagggagaccaatgttgagtatatgtatagcatcggatgggctgaaccattatctaaccttcgcttcattccaggagagatttttggaaatgaaatcacttaccaagttagccccttgggtagcatgtaaaagaggcctcagtttatgatccccttttggtacccaatcgtcaaaccatatagaagttgatttaccatccccgatcttccagcagataccttgacttagtaatggtctagacttgagaatcgctttcctaagcctagagtctgaaggtttaatgtcaatgtagaagaagttagctcctttgtgatacttttccttgaaaatcatactccaaagactagaggaatcggtaagcaccttccatccccacttaagaatagaagcgctattgatatccttgacatgccgaaagccgaggcccccattgaacttagatttgtagagggaactccatgcaatggtatggagggttttctttgaatcaagctcaccctaccagaagtttcgaaggcccttgtcaattttgtttgtgatgctaacaaggataatctctgagaaagccgcataaatcggaagcgaagcccccactgtttggattaa

SEQ ID NO: 44028 - DNA, 1750 bp, Cannabis sativa
  modified_base (33)..(41): a, c, t, g, unknown or other
  modified_base (961)..(964): a, c, t, g, unknown or other
cgtgtcctttaaataggagtctggtctcgagtnnnnnnnnnagagaaatctcactataacatttcttgcctctgcttttcttctctgctcttagcattgtttttctctgttctggttttaccttcttcagagaaaatgcctcctcccctcatgcctattgtattttaactcttgttttaatataataacatttgttcttaaaaaaaaaaatattgttgtgaaaaatagcatgaaaataatggttagtatttttgtataaaagtaaaattacaacttaaaaatattaaaaaactgtaaattcataattttgtaatttttttttattatttttaaatatttataaaaatattcctttgcttttggttagttagcaatttgatttttttttttttttgaaaagattgaaaaatttataagtaaaatatagaaatgtagaaaagagaagttaaacaacttttttttaaccgaacaacctcgtaattacatgctctaagattttcactttctgactgactagtcacactatgcttttggagaatcttatgacgtttcgccaaaccaacttttttttgctgaattttttgctaaaccattttgttttatgagatttgagaatatttttaatttttattatttatccaattgaagctttatcaagaaaataaataatatttccagcagaaaaaaagaaaaaaaaaaaagaaaataaataatattaagattaatttctcataagaagaaaagaaaaaggtagaactagaaaataaaactaaaaaaaaaaggtaaaattgaaaagcacaaacgccgccacgacagtgccacgtaggttcgaataaaaaccgaagcaagctgttcagtttccgaagctggtggctcgtcagacacagctggagacagcctgtcaccaacaaagtcccactcacctattcccctaactacgttctctctctctctctctctnnnnctctctctttttctctctctcttcgcgcttccctgtctctcctctctctctctgttcctggctgtctctgtgtattagggtttcctgatcttgttcagcgattatcagaatacagcttccactctaccggatcaagattcccacctttgtaagctctccaatgatatgatttttttctctaatttctgcatttcgccaccatttttctttaatttagggtttattattcgcttccaatctttctttctgaatagtatttcgttcccttagttttcatcgctattgtattgtctatggctgttataatcgttgtggcagggccgaattatttatttctgtgtctgtctttaagatttgtaagtatctatttggtattagctgataatttattttattgttaagtttttttaaaatgaaaattgttaataaatcttgtggtaacatcagagaatgaaatcaaatttatcaattcagaaaaaataaaattagttcaatattgttttggcatatatcttttcgggtggtattatcctgaagagtaatttactcttttaactgaataattaaataaaaatttacttagtcgaaactgttgtttgacagtcattttctttaaatatgtgcattgacatttcaaaaattccattccagtttttctattttctttgaagatgggcgataaggttttgttttcagtaatgaaaggaaatttagatttggtttttgtgtgtatgtacttggtagttgcggtcacgttaagcaaatctatgattatttgatagtttt

SEQ ID NO: 44029 - DNA, 1669 bp, Cannabis sativa
ttaattaaaataatgtatacaaaattgtaaaatgcccaaaattatatttaatcacatgataatttaatatatgttatcttaatataatgacagccaatatgcttagttataaagtttgttgtggccataaaaacatacagtaaatttaatgacaatttttaagtcacaatttaatgactaaatgtgatttttgaacacagcagaaaattactttgtgactaaaataaaatatttagatacaaattgttactaatttaattttaattgcaataaatattctgactaaaaacacatttaatcacgtacaacaaattataatttttattactaatacatttaattacgaatcttttaatcacaatacaagaataataatttataaattatcacaaattacaaatttcattttaactaaactaaaattttgtgtggtgatatttaaacaataaatttgattatatatacttgtttaactatgatatagataagttagaaactaaaaaatatgtgcaaaaagatgtaggatccgtttctcaattgtgtggcaccaaaccaatagtgatgttgtacaatataattaagatttggctatgttgaaaagtggtcaaccaatcacaatttttaactatatatcaatcttcacatgttttgacaaataagtaaatatattaacatttagctagctgccaaactaataagactttgtcttttttttttttaaattcacattagcctaccaggttggaatttaaataattaagtttatataagagtcaaccatgccctaagtgtacggaaacgacacttaaaacctttttgtcatctaatagaacaaattttatgtaggtattgttgaccttgctttcaattaatgaccaatttttaaggtgatgagttcataaataaacaaataataataaaataacaataaaaacatatattttttttttaatagagatttggctctattataatggtaataacttactctcatttttgttgtattaatttagtaaattattaagatcacaaggaactgatcaagtgagtttatttaataatagtaggacaaagtgtacaaatatttcgacagcataagagctctctagattgatgaattctcgatccctaaaccatgagatgacttcagtatttatagaaaaaatatagtgaatattgttactcaaaataaaaggaaaagaaacgggaagctaaatattatttctgttatcctaaatttcgcacagggtgatgtggcaactagtaagatacacgtggagagtagaagtctgaacatataattttccctcgatggtccaaccagagaagttttgtacaaaactttcaagttttcacctttagcaggaatcagctaggtacgaaatctatacgtgattgtctgcacaaatcctcatcattcagacatgtcaagtcttccaagtagggtaattcggcataagaagatctttagagatactttccttaaatattccaacactcaaatctcgatcaaatccctaattttgtgggatcgactcgcattgacaagaaataataggaaactttcctagtttttcttttagttttacttgttttgggaaacctaattattgtattttttttccctatcactactacaaaaaccacctttagaggcggtttttaagcc

SEQ ID NO: 44030 - DNA, 3853 bp, Cannabis sativa
tagtaagttcatagtcccaaaggataaatcagttttataatctggagatctaaaaaaggaaaacaccgttcaatgctttaatgacaaacaatagaagcatttttaaattaaaaaagcttatgatgtgcacatttttcaaccacgtaaattgaaacaagattaagacactttcttatatgaatacctacatcaacttgaaaataaaaaatataaaaataaaagtgacaagtacctcaacatgaaaataatctccataaggaacatcactaacttcttgtgatgtctcaataaccaaatggctgcaaatcaaagataaatatgttaagaaaacagcaaagctacaatctacaatagcaccatgtaaaaaaaaatatttagctttaaaaaaaaattaccaccgcagagaacataaacaaacattgacttccacataagcatcacaaattgcttagaatagatagctatgtccacaatgtcattgtcaatcaaatatattactcatctaaactcaaacaaaccatattgtttgacaagagaacattatccaacttatagttgaacagcattaaaaaacattgaacttataaaaagaacagaaaaacatcctgaagaaaatacatcaagaatgctcaaactctaaaaaagagactcaaacttctttactgcaggattgctacaaattagtgaatccatatccatatgtttaaacatactaaaaaacagtatgattaagcaaaaagaagaattataaatcaatattgaataaggagaaaaggtcaaactgccagacttattaagttcaattcaaattatttttaaaaaccagtacctgttcttatatagccggaacttctgggtttcctgacaaccaccaaattttgcacctttgcaacatcaaaaatcaacacacaaaatgagacacaagacaaataagcccctgcatacgcttgacacttaaagttgaatgatccgtgggccataccaaagtacagttttattggatgcagaaatgatacatcgcgagcatgcccaaacttgtcatgtggataccatgtattgcatttaaactctgtaaagcacaagagcaataaatgtatcaaaacttcacagtaaggagagcctaagaaaatggcattaaaattatttaattacaagctgcctacctttgtctccacagttactatgaaatgattcaacaaaactaactgcatcatctgaaaagaaataattaaagaagtcctcgacttttatctgcacacaatgattgagagtgtaattatcattaaacttgttaaattacaattaaacgtaggcattatttgcaattgatcagaatcctaccggaaattgtgattctgcaaccattgtataaccttctgcaactgcaataaaagagtacacacatattaaggccatatactaaaactatgaaaatggcacgacttctataactcaactaaaatgaataagtgagattatatctcccaacaatatttagaaaaggatttgacttgattctcatatatatagctttaacacttgagtatgttctgaaattttgaaatcactatttcctctaaacatataggagctggttcaatggacacacatttctacacaaattattgtaacatgttaatctaaaagttgatgataaaaaattacatttatatataaatatatatgaggaaatttttatttttagttttaataaatttcaatcatcagatcagctcgatctaacggtgtttatcttataaaaatttgtatagaaatattcgtccattcaacatatcacaaatatatatacacatataaatttatataagttagcatgtgaaatgaataagctttaaaattactctcttagaggctcttctataatttgcatgaaatataacattataaatcaacttgaccataagatggacaatgtgttcccgtagatatatacggacaataattgtcgttgtgtttctatattaggaagctcaactaagaatagagaaccgacaactatgatggtaatgttacaaaatctagactaaactcactcttgggggcttcacaatcctcctgcttcaatatagaactggtggttgaagatgaagacttagtttccggaactattactatatcctgttccacaatatcctgcagctctgcaattgttgtcgttgcagcaacatcttcaacattggaaggagccacaaaatcttgtacaattgagatgtctagcttcctagctcatatagggtaataccattaatctgttatcatcaatatttctttgggtaataaaagaataagtttattatctcataattatacctattgttagaatccacttcatcaactgcctgaataatgctagtgacttcctcaatcacaactccattctcttggctgctggctacagatactgaatcctgataatataggaacacacaataatgtttatcgttttgcaatagttattatatatgaaatttaaatttctataaatgagatgaaaagaaaaagggataagaatctttaaaagtctatccaaaagctaaaaggtacaaaaacttttgtacactatcatccaaattcctaagagtaaaaagaagagcatctgtaaaaaacttttatccaccaaaatgcacaatacttttttaggggttaagaaacaccattaagaaaaatgaactcctgacatatttctacggcattaatttaatttcaacattgcttgatattacccccatcaaatataaagctaaaaaaatgcaaagttgaagaattttaaaatatttaacagctcacactcaatgagaaacgagatcaaaaatgaaaattaaattaataaaacacctgatctgtaattagtttggcgccattactatgttgcaaccacccatcattaataagcttgaaagcttcatcacgagagagaaatgacccaaaaaagtactgccaattaaagaataatgcaaatcatcatagctgatactaaaatgaaagagcatgacaaatagaggctgtagtacaaggtccatgagagccaattaaaatattaacataaaaactcagcactacctttttgcttcctgcataaatttctatggcattagggaagatgcccgctgtctttgctcttcgtacacttgtcacttcgtggaatgggatcattttctgaagcatgacccacaagattcccaataattaaaaacaaagtttataatgtattgcatgtataaaaataaacaatgacagtaaaaatgtcaaaccagtataaggtaccaacaaagtcgagcactttaaaagagttaagctggctgttggcaatgcaaaagctaaatcattagacaggacagcaaatgtagaaaacctttttctatgcagttatactatctagggttctctgtgcaaacgtagtactaaatctagtgctcacaattttgtccattgtccatttgctgggctttcatatggtcaagaatcaagattactaaaagaatttgacgtaagtatgcttattgcaagaatattgaagagcagatgggtggccaaggtgttactggtagcaagcagaaaaatttatggagcatggctgttcggtcatattttggggctgtgtgcttaagacaactaataggagattcatttgggatagagtgaaattctaggtggctaatttggtctttaaaaactaaaactaggcagttcaaagcattatctttcttggtactaaatagcaattggcacccacggttgtaacttataatgatgtattacaaactttaaataaactatcatttattatttagaaattcttgaaacaaccaagccccaatataaatacaggaca

SEQ ID NO: 44031 - DNA, 1967 bp, Cannabis sativa
ccaatagaagccggtacaacaggtatctttcctcctagatagtttgaattcaggtctagaagactgagagaactaggaagagaataaggttcctccataccaactaggtggttatgtgaaaggttcaaaaaagcaagatttgtattgtttccaacttcccaaatccagttaggtatctcgccatgaattcggttgtttgaaagatccaaagcaaccattcctaattggttcttcaaaagattaggaaatgcccttatgttgcaagaagcaagtgttaacttttcaaactgaggaaaggacttgagagtaaacttagtcacacttgcatttactgaccaattattgtatgaaaggtcaagaacagcaagttggtctagctcttgaaatatgtcaagttgtagagttccattgagcttgttataagagagatcaagtgagctaagatttttgagtttaaggatagacaataggaatggcccttcaagattgttgctactcaaatctagagtagtcaaaattgaggaagatgcagtttgaaactcaagattgttaaattggtttttggctagtgagatttttttcaataatggtagttcaaacaatgttgagggaatactacccttgagaaaattatcctctaaatcaatctcaactaagttcaaaaggccttcaaaatgagctgaaggaatttcaccagtaagactattatgattgagatctatttgagtgagtttcttggacttattgaaagagggtattggacctgtaaagttattaaaagacaattgaagattactaagttgggtgagttttgaaatggagcttggaattgttccactaaagtggcaaaaggaaaggtctaatgtggacaagttccaaaggttaccaatagatgatggcaattcctttgaaaaatttgtgaatggaagcatcaatttttggagagaattatttctaggaaattctggcaaagaaccacagagtaatacattgtctgtaagatcaagagtcattagtgtaggtaccttgaaaagttcatctggaaatgctccatacaattgacaagaatgaagactcaaagtactcaaccatgagaaatttgcaaggaattcagggacaggagaaagcaaatcattgttatccagtcgaatcaccgaaagggattgaagcttcacaagtgactgatcaaaaggtccagaaagagagcaatcagagaagctcaacactctcagattaggcaaagaagatgacaagtcttggcaccattcactcccacttgttgacatattaacaccatcgaaatacagttcttcaagcatagaaagattctgaacaagcattttcaaagtgggattctcaagtttgagctcattagctgcaagaactatggttggatcataattgaaagtggttgataaatcaagtgtgatcaatcttcttaggtgtgacatctcacttggtatttgccccaaaaagccagcacttgataaattcagataattcaactttttgagattaccaatcccagttggtatcatagaactgaaaaagttacaagacaaatcaagacggttgagatgttgaagaccgaaaaggctgcttgaatttccaagttcaccagagattccttcattgctcaagttcagatccacaacaaggccttctttgcaggatacaccttcccaatgacagcaatcagaatttcggacattccatttcacaagcttcgtagagatttcaaggtcgaattcgaggctctttctcagttgcagcaacaatgcttgctggtgatcaagacactggcttgaaaccaaaaacacattgacaccaagtagaattgaaaacatgtaaagccatgtgaatagtgaattagttctcattggtgaatatatcaaagacaaagtttaatactcactaaaccatgtaaactctctatttagcttgtgcagaaatatatttcattgccc

SEQ ID NO: 44032 - DNA, 2528 bp, Cannabis sativa
cctattaacagtgttcctatggacttcatgtctattttaatgagcgattgctcgagctaatatagaacacttctattaaaaaaaaaaaaacatattacgtgttttctaattattatgttaataatctttgctaataaaaaaaatttcaagtaaaaagtgtatttaataaaattttcgtgaataagaacatgaaggtgtgtgttgacgacatgctagtaaagtcaaaaacctctatgaaacatagcgagaatctaaaagaagcatttttttcatcattcagaaatatggaatgaagttaaattctaacaaatgcacttttgaagtttttttagagaaatttttagggttcattgttagttctaaaggaatcaaagctaatacagaaaagattcaagctcttctaaacatgtcttcttctcgtaagcataaagacgtccaaaatttaacaggaataattgcagcacttaacaaatttgtttttatgtcatcttataaaaatatttcattttttaacgttttgcgtggaaataacaaatttgaatagacaacaaagtgtgaaaatgccttttagaaactgaaagaacatctatccaaagcttcaattttgtccaaacctgtggaaggggaaccattgtatttgtacctggcagtgtcagatcatgcaataaatgtcgccttagtgagagaataatgaatggtatatggtatagtttccagtatattatattatgtattatgtgagcaaaagattgttgggcgcggagtctaaatatctaagcttttctattgtttactgattgcttcacgaaatctaagaccgtactttgaagcccgtgccatcaaagtacttacaaatcatcatctccgccaagtacttcaaaaggcagagttatctagaagactcttgaagtgggtaatggagctaagttaattcaacatccattatcatccaagagtctttattaagggtcaagccttagcatactttattgtggaatgcacatgaataaacaaaaatcctagagaacccatcctgaaactaaaatatggagaatatatgtagacagagcatagaaaggttccggagcaggaatcattttaatttctttacaacaatatatcaacttcaaagtgcactctaatttgagttcgaaagcttccaacaatgaagttgagcatgaagcaatgattgctagtttacaatttgttaaaagaggttggagtccaaaacattgagctctacaatgactcgcaatcggtagtcaattaagtttttagagaataccaaacgaaacaggaaaagatggctagttacgtggtaaaatcttgagaactgctacaaaacttaaagcattacttttagttaagcaaatcccgatggattgaaataccttcatggatatgctagcaaagttgtccattaatccagaaattgaaaaatatgtatagtcctcatcacctacttatcagttccaagcacaaaaacactcgaggtaaccgtgatagatcactcaacttcctggatgggtccaattcagaagtacatagaatttggaacacttccggatgacaaagcagctgcatagaagattcaatatcaggccccaaggtatgtgctcatggatggaaaattacacaaaagaggattatcaatgtcatacttgagttgtatagctaaaaccgagataagcgctattatgcacaatatacatgaaggattttgtgaagatcatacatctagacctagtttttccaagaaggtcatccgccaaggataattttggctaactatgaagaaggattgtatcgaatatgtccaaaaatgttcaaaaacgtgaacagtgtcagtgttattccaaagttcctagagctctgccaatagagataccttgatgagcagtatgtggccttatgctatttaaggaatcgactttgtatgatcacttccaactagaaaatgaggaattaaattcatcattattgttgttgactacttcaccaaatgggtagaaattgagcctatgaacacaataacttcgaagaaggcacatgactttttcatcaagaacattgtatgtcgttatggtctttcacacaaaatcgtgtctgataatggcaagcaatttgacagtgatcatttcactgattttttgtgtcaagcatgaaattatcaaaagttttccagctatagctagaccacgagcaaatagacaagtgaagccgtaataagactctaaaaatgaccttaaagaagaaacttcaggcttgcaaagtacactgaccggaagaacttataaaagttctttgggcatatggaacaatagaaagaacttcaacaggacacactccatattcaatggcctatggatgtgaagtagtaatcacgattgttggttatatggtactaaattaggtacgcaacagaagggtttcgtattatttgattataattgtaccatatcccaatggatctccaaatgtacgtgtacatttaaatcaaaacataaattacaagtttagatcatata

SEQ ID NO: 44033 - DNA, 4150 bp, Cannabis sativa
  modified_base (2167)..(2172): a, c, t, g, unknown or other
cactaaaaaccaacatcaataacccataaaatgtcacgaaaaatgtttttattggtgaaagcaaaagtgacgctctcacataagaattttcttatatttatatatatggaagaaattttaatagttacttttttttatataaccatgatgattacattttattatgacctactaagacatcattattaaaataaatttattttagataatttggcatttgttgacaactatgttgagtatgcgtgtcattttttgttggtccattcgctttttaagcatatcaacttactatttttttaatggaaaagtcaaactttataaccaatcacttttgttactaaaattggtaacaaatcagttagaatagatgctaaactaaaacgacgaccaagataaaaaattaaactctagcaaaactataagctgttatatttactgaccatttaacaaaggacaataaatatatttcttaactcaataatcaaagatttacaatcttgaattatatgaccagataaaaataccatgataactgagctacataaagcttaaataacacccaaacagtttatttcaattgttacttgattccaatgctgttctcaacgcctccctcaaattcgttgtttcagcaagaatatgttcattcatgctataaaagaaaggggtgcacccttcaattaagaagccattagaatcccgagcaattaacccaaagccatagctatagttttccttaaatatagctgcatctacatttatttttatattattcatctgtggtgcgatttaatgctcagtcccatcactcgtccaaaaatcagaccataacgactctatcatagagttttgagcaattctccattgttcaagataacctcttgtaaattcaacaatattagcagcttgagtttttttcgcatttccacactagatcgttacgtgctccccatatagcccaacacaaagtgcatattaaacaccttaaatcattgtttgcgtgactaaaatttccaataaaccaatccaaaaggtaatttttggtgtaacagttgtgcctatacccggcctgttccagcacaactccaacattttacaggtcaccaaactgtgaagagtagtttctgtacacaatttgcagctaggacacaacaaataacctcaactctcttgatctaaaatttgtccatggtcggaagacaagccattccttcatgccaaacctaatttttaatctttggaggaagttttaatttccacatcttcctccaaaaagttttagcttcaccattaatccatttgccatgatcttgttgcaaaatattgtatgccgactttacacgacacaagcttgagcaacaccaaaacttacaaatatactataaataaggggaaaatttaattttatattgttacgcgaagaaatttataaaaatactgtcgtacacttaaattctttctcttatactgtacagatgccaaaacaaagaggaaggcttcattctcaagacccactgtcagaaccaccagagcaacactaaaacagccaaaaaacaactattaattcaatcagattcaaggcaaggttagttgccaaagggttcactcagaaggaaggcgtcgattacaataaaaatttctctccaatggtcaagcaagcttcaattagagccatgatggcaaaggcagcaagcatggacgtagagattgaacagatggatgtaaggataactttctaacatggggaattagaagaggaaatctatatgcaacagcctgagggctttggcaatgggaacctagaagaggtatgcctactcaaaaagtctatttatggcctcaagcaggcacctacgcaatggaacttgaggtttgacacctacttgcaaaatattggatacactaaaagcaagtatgactcatgtgtatatttcaataattaaacctacttgctactctatgttgatggcatactgatctttagcaaagcaaggtcagagattgacaagctgaaaaggaaactcaatgatgagtttgagatgaaagatctgggcaaagcaaagagaattcttgggatagacataaagagacctaagcctcgcatgataatactttctcaagttgcctacctacagaaagtattgaacaagtttggcatggtcaagtnnnnnncagttgcaacaccacttgcttaacacttcaagttgtctgcatctcagtcaccaaaaatagatgcagaaagagccaagatgagcaaggttccctatgcaagttgtgttgggagtctcatgtactccatggtgtgttctaaatctgacttagctcatgctatgagtgtggtcagcaggtacatttcagaccctagccctatacattgggaagcactgaaatggacaatgaggtacctgaaaggtactgtggacaccagtattatgttcagtaaagagaaccagttcaatgaagaaatcattggttttgtggactcaaattttgtagcaaacctagacattagaaggagcctaacagggtttgtgttcaccgctcttgcgagctggatcagctagaaatctaacctacaaaatgtagtagccttgtcatcaacagaagctgaatacatgattgctacaaaagccatcagagaggttatatgtaggttgactgagaatttaggtttcaaatctgaggatatcacagtttactgtgacaatcaaagtgctttgcatctcatgaaaaatctaatgtttcttgtgaggtcaagcaggtggaagtgaagaaaataatcacatatgataaccctacacatattttcactaaaagtgtaactagagacaagtttaggcattgtctaaacttattgagcattcaagacatttactgtcctcactcatttcttttggataagagattaagtgagtctaatcaggtagaattgttgggaataaatccacttaatctgtcaaactcagtaggtcgatctattcactcatcagatgaatttgaagaaagttgctattagttataatagttagctttaatacaaagggaaacccactaataactataaataggaatgtctctactctttcaagagagttctgatctctaatctcctaaactcatactttagattcagagacaagtttagagagagagagagtccaagatcatagtgagtgtgtgtggagggatgtaataggagtatcactcttgaagttatttctctcaatataagatatttcttgtattcattcactgttttgagttttattcatgtacacattctattgtgtattagtgactaatcgagcaataaagatccacgattcattcattttgaagttaagtttattcttatctaatttaattaagttctagttttaattttgtaatttgttctagtttgaattgcattttcttaaacattgttactgctgtaacattcatattttgagggtgatcatgcaccacaaataataattaaaaaaaaaaaatacatcttttaatgaataattcctagaatatatttaatccgagagtgtaacaaggattgcggcaatcaagaaaacttttgtaataatttataaagcatgggatgaagtgaaccacaaaatgattgactatgttatgatagagtagaaatagatagatatgcattatccatggcatgtttgtctcctattctcattcattccaagtatttacttattcaactacactcaccatgcttgatgctcaaatcaatgtgactcaattgcaaatatatcactctttctttctttattattattttttctaaaattctagtagactaatgcaatgtgacgccaaaaaaaaaaaaaaaaagaaaaaaaaagaaaaacctctttctacaattctacgtactttgtcccttttttctaatctttttcttcttttttgtgcatggggtcaaatatgtattcaaatatctaaatgctttccaaaaaagggacccaaacccaaaaaaaaataaataaataaaattggaaaggtctaactgtgttgattttcctttagtttttggccaaaagtttgtaatgcagaaatgaaaactttatcttaagaggaaattacactctatactctttttatattgttctctttcatttttacccttttttttaaagtctat

SEQ ID NO: 44034 - DNA, 2047 bp, Cannabis sativa
  modified_base (30)..(37): a, c, t, g, unknown or other
  modified_base (633)..(633): a, c, t, g, unknown or other
tttattccattctattcctattcccattcnnnnnnnnattcccattcccattcccatattttcattcctcccaaccaaacgcctccccatattttaaattacttgtataaaatgattaattttcttattaacatgaaataagaacacaaaaagacaaaattccgaccaagggaatctaatgacgcagcggaatgatcactccaaggtgattcaactagcttataatgactaaaatgaactgatttgtaaggattttagtcttttcaacacaaacaaagtaagaataagcaatctcctccccaaaaggaaaaataaatgtttactagaccttattgtttgagctcgtcaaagtgttcggagtcccgagattgaagaatggacatttcaaaatccgaaaagactactctgacaaaaactcaattgaagaaaaaaaaaaggataactttcatgatgggcatcgttaagtcaaaataatcagcctattttgactgatataaagaagtactgcggaaacccaaatgaagaaaattgtttacgggtttaagactagagtgtgttattctttttctttacttttttttttcttagttttctcagcaaccaaacaggaaacacagagagagagagagaganagagagagagagagagagaattcgactctttattttgttgaagatttctcaatggtcttcattttcagtttgaaattagaacaaacttaaaacaaatatagtgatcagtgatcacaatatgaacagtgaaagaaaaaagtgaaaattgtgtgcaaaactttaactttcccactacgagagaaaatcgaggaagagttaaagcaaaaacggaaaagcaggaaagagacgaaaggtgtgattttgtcaaaaaaagaatcaagtaaaaattacgtaattataatacatacatacatacaaaaggacaaaacaaataaaagtaaaagaagctgtaatgctctgtttccattgaacaaagttgcagaagataagtcacaaaagattttttttttttttttccttcttcaatatcaattgttctgtttgtttaaaaagaaaactcataatcaaatcagaagaaaattcaaatctgggctttctctatccacaccggaaaatctaaaacagagaatcctacagttaacagagctgtttactatctaatttttgatatcaccaaatctgaaagtttcattctttgaagttaaaagcaacgttacaaacaaaaaaaaaaaaccgagactctttcactgtatagcccaaaactcaaaatttgaatagacgttacatacagatcttcaatttcattacactgtttaaaaatcctaagattgcagcaaaacaaacagataagaagaaaggaaaaatggaggtacataaagcaatgtaaagtaagataaatgagtgaaagattaaaactttgagaaagcaaaagaataagagaaagttaggagcatgaaaactcagttacctttgtggaggctttcagcaaattggaatggataggatccgagcggaggaaaaacggtgaaacagagaggcagagaaggaaaacaggtagagggttgagcaggaatattaatattggattggtgaagcattaattgcaaaagcagaggagaaagtgaaatggatcaaagtgttaaaaagaaaagaaggaaagagagagagagagaattgattgatttttctttttatttatttagtttttgaaggcaacagttactatggcagtggggttgggttagcactactctctttctgcccaaaatgatgatcgagattgtattcatctcccaacttcacgctcctttcatggcgcgttctctgactatatatcaacataattcattcattcacgctttcgaaaaaaaaacacaaaagataattcacatattcatgtaattattaaaaataatgggaaagtatctagtactggatggcaatattatactgttaccggtgctcatagtttttttttttttttttttttttttttaaaaaaaattccttccttaaataaacaataggcagcaga

SEQ ID NO: 44035 - DNA, 2024 bp, Cannabis sativa
atttctctcattgattattctaatttcaattacagtttagtaaacgcgagagaaattttcagataaattcttatatcttttattttagtttacttcagctttatttgtaaattcgagataaatctttcagttaagatgtcagttaagactgtcatggtataaatttatatacacgtggggcatacgtagagtggaattttcggataaactcttataatcttttactaagttaatttacaatctttagttgtattcttaattttaaaattaatatttgttatgtgtagtttttttatatatatatattttttttaaaaaaaaaaaatactacataaaagttgtaaagaatgtaaattagaagcaaaatctccaaaacattgtccacataatataaatttgatgagtttatatcagcactcagcagctgaatataaacattttatacaatgtaatatcaagttaaatattaataactattgagataaaaattacattttgccactatgcccaaatagttaaccgttggcgcaggaaataaatagttacctatttgtgaaatggcaaaccgtatttcgttattccagatttatatgaatttaaggactaataaacttataagaaaggcaagtttagaaactattactgttatttttaaatattgaacactaatcctcatcaaaaagcaaattctgaaataacaagttaaatgaaattataagaataggaaaatgaatgagaataaaataaaatttataatgtattaaaaaaattattaaatatatatttttccaaacaaaagaatgaaataaaacttaatttctttacatttaattttattacctacaactaaacataacataagtgttttacctattttattagtacgaggacggttagaaaaatgcctaaaaataaatttataaaaacttaggtctaattcgaacaatatcgaaagcccaaaatttatatacttttctttttgtcattctttttctcagagaaatttatctactttgttattttcatttagtataacttatccattaaaatattttttataaaaaagtataattgtaatttgataaagttaatttaaagccaaccatatgtatcttaaatataaattttttcagaaagcttaaagagatatgatataactcttatgagtagttagtgatttgttttatattatttattaaattagaatatataaaatttaatattaaattgcatctagtatattatctcttttgggtgtgcttaacaactaaatgtaataaaaatatgtcttatataatacaaatttaatttaaagagacgtatagttgaagaaggaacagctaaatcttgttcgtaccttaaatatatatgtttaataataatagcgtttgtactataacatcatatatatgtaaggaaaataataattttagatttaaattaaattaaagctgacaaaattaatttgaagaagtattaagtacctttccccaccaaacccaaaccgtataaatatatattatatgtactaatctaaagacttctctagataagcttgacgtctaatatataattaaaaactaacagttaataataaatttcaaattattttatcataacgtggatcaccaccatggtgctctcaccttgattaagccaaaaatttagatttcgtattcacattatttttcctccccgagatatttatataaattaatatatataaacatattatatatagtgaggttatgatatttatattatatagaataaactaattaaactgaattaattaacaaagaaaaaagaaatcatgaatcatcaagttaacgccgcagtcaataatatatataattttgtaccaattaagcaagtgcatgataaattaattaaggttatgtattgtcggccgtacactgggtacactgttcgttttgtttaagtatatatcatcaactagctagttaatttcaaataatatatgatatatctatctgatgtcaaaccaatgtatataatatatg

SEQ ID NO: 44036 - DNA, 3274 bp, Cannabis sativa
taaattatatgggacccgatacttggaccaatagcgatattgacacataggaaggtgctaggcactactggtaccctttagcatttctctttgtaaaattattgaaataaggtctttctatatccaaattttgtgaaaaaactaagaccatttttatttttgttattggagctggcttgttaattttttcttcttttaaagtggtaatcaaaatattttaaatttaatagtattcaaaaatattttagcaaaaactgaatctaagtacgagaggtacaacaagagtacaattttaaaaattacgtgatcttttttttttaatcgatgcaaaaatatgatcctttttcgaatagaaaactaagtaatatataattttatttatatatatttaactgaatattgttatacatatgtaggaggaactgaaaagaggtgatgctccgacatcaattcaatgttatatgcaagaaaaaaaagtatctgaggagaaagctcgtgaacatattaagtttttaataagtgaaatatggaaagagatgaataatgatgttggattatatccaatctcattgattgaagatgctacaaattttgctaagatgggatttttcatgtatcagcatggtgatggtcatagttctcaagataatcaatccaaacaaaaaatttcatccttgattattgaacctattcccttatatacataataataattagttaattaatcgtttggtgcacggtatattgtattgtattgtgttttgttggattgtattgtattatattagtattatttaatataaaactatattttgtattgacttgtactaataaattatgtaaaattataacttctttacaataaacttgaccccaaccccaataacgaactgaaatcaaacccgaactcggacctagaccccagacttagaacatgccccaaacccagacccgaacctgaactcaaatctagacctcaaaccctggccccggactcggacccatggacccaaacccagacttgaacccaaactaaacttggacccagggtcggccctgaaaatatatgggcccaagatgaattaaattttggggccctcaaaaatatataaaaaaaaatatcaaaagaagagtgttatggggtttgaacccatgaccttgaacattatgtcatccacctaattaaccaactaaactatgaatatttgttgcttataatacatttaaattttacttaaataaaaacctaataattttttttatttttttattttgggcccccggaaagtgtgcgccctaggcatgggcctagcccacctatgcctagggccggccctgcttagacctgaacccaggactccaaacctaagacctagactcgaccatggccctaaaccctagacccgggacccgagacccaagacctaagacctagactcggccctgaccccaaccctaaaccctagacctaaaaccctaaacctagacccagaccctaaacccaaaactcaaacctgaacctgagccctagaccctagacctgatcgtattggaccccaaacttgagcccaaacccaaacccaaacccaaactccaaaccccaaacccgatctgggtctaagtttgggtccaggtctaggtcttggtctggggtctaggtcgaggtttgggtctgggtcaaggtctagggcccaggtttgggtccgggttcggggtttgggttggggtctgcgttcgggtttgggtctaggtcaggctacacgttaggtttaggcctaggtttggggtctgggttcaaggtctgggtaaggatctgaggtctaggtttgggtcggggttcagggtatgggtccagagtttggatctgagtcaggatttgaggtccaagctcaaggtttgggtttggggtcggggtccgagtcaaagttcgagttcgaggtctaggtcccagtcggggtccaagtttaggtttggggtctaggtccaagttcgggtccgaggttcgttactaggtctgggtccggggtccagggtctagagttcaggtctacggtccgggtctaaggtctatgtctcgatctgggtccagggtttgggtctgggacagttttatagaccacattgcaacaagcaacgggcctaaaatcactcacactatttgggcattttaccttgtgtatgagactcagagtggtagcattaacctctttgagtagattctcaaaattcagagtttcagagaactgttgtgatgacatcctctctaacaatgtgcccagttcaattagttttctgctagctttttgttcaactcaacagagttaaagctcatgtataaatgctcttgtattgcattgtttatcaatgagaaatgaatcttccaaatatatttgtttcgacatggtagagctctgaaattatttgagttatcattcgtctttcttattcttcttttttttacttcgattgccatggctagtcaatcctctactcacagagaactagtctctttcaagtattattctcttttatccaaacttgatgaaaacaaatttctatcctagaaacatcaaattcttacttctgttcgtggtcatcgtactcaatgattcttggaaccaaattttgctcctccaaattaagtttgatattgaagaagattatacaacaaatacaatctatcaaaactatgcaaattaggaggcacaagatccacttctccattatggatattgtcctccatgaatgattagatgaatgacaaggcatgaaaaccagatggttggatcacatttcaagagttcctcactgcttaaacaaatcgaagataactcaaattcgtaatactgagaaaaattcctcctctattaaagattacttattatagattaaatcaactgttgatctgctgaatgcaattagtcacaacattactatatgttagattatgtggagtccattttcaatggtcttggatctgaatatgacattttttacacttcttacaacattcataaagaaaagttcaccatttaagagcttgaaactcttttaatgactcaagaagcacgaaattgacaaaactgtaaaggatcttgatacatcctttgcagaagtgaactttgctcacaatggatccaatcctccttttggtaatggtgaagaggttttccaaatcacaaaggaggctatagtggaagctctacattttacactggacaacaatctcagggtagatacaattctccaagggatccttatggaggctttaaca

SEQ ID NO: 44037 - DNA, 3263 bp, Cannabis sativa
ctaggactccccattttgaagctaacacatcctcttctccgagctttggactcttccaatggtttcagagagttcaaccagattcagacccagctcgttgtctctggccttcttcaaaattctcttgttgcgagccaagctattaagaagctctgctctgctcccaagactctccctcgtgctgttaacgtatttgatttcattgatgaacccgacgcttttctctgtaacactattatgagaagctatgttaattcgaatgatccgaattctgcaatcgggttctactacgagaaaatggtgggaggtaagaatgttgttcccaatcattatacttttcctatattgattaaggcttgcgcaggacttgggtctttgagagaaggggagaaagctcattcaaggattgtgaaattagggtttgagttggatttgtttgttcgcaactcgttgattcatatgtactctttttatggtagagttggggatgctcgtgtgatgtttgatgaagggtctgagttggatttggtaagctggaattccatgatttatggctatgtgaagaatggggttcttagtgttgcacgtaatctgtttgatgtaatgcctgaaagagatgtttttagttggaattctatgattgggggttatgttgaaatgggagatattgaagctgctagacagttgtttgacgaaatgccgagtagagatgtcgtttcttggaactgtatgattgatgggtatgctaggatggtgaatgttcttgaagcttttgaccttttcgaacggatgcctttgcggaacatagtttcgtggaatataatcttggctctatatgtgcgtagtaaggattataatgagtgcttgagattgtttgatagtatgatagaagtaggagaggtgaaaccaaatggagctactctaatgagtgtccttactgcctctacaaacttgggaagacttgataaaggaaagtgcgttcattcatatattgaaagtaataggattaagccagatgtattactttctactgcattgttgacaatgtatgcaaaatgtggggatatggacatggctaggaaagtctttgatttgatgcatgagaggagtgttgtgtcctggaattctatgataatggggtatggtatacatgggaatggaaaaaaagccctggaaacatttctagagatggaaaagaaaggtcctttgccaaatgatgcaacttttatttgcattttgtcagcatgtacacactcaggaatggttttggaaggttggtggtatttcgatcttatgcaacgagtttacaatattgaaccaaaggttgaacattatggttgcatggttgatcttcttgctcgggcaggtttggtaaaagattcagaagaacttatgagaaagatgccaatggaggcaggaccagccttatggggatccttactttcagcttgtagaactcattcaaattcaaatcttggggagattgtagccaagcgactaattgagttggaaccaacagatattggaccctatgtgatgttgtcaaatatatatgcatcagaaggaaaatgggctgaggttgaatgtgttaggaaaatgatagcagagaatgggctagaaaagaaagaagggagaagcacagtccacattgaagaagttggatctgaatcttctctggaaaatggttcatttcatagaagaagtatgatgtactcaatgttgagtgaaatgggtgctgagatgaaattttcttgtacaaatgctcatgagttagagagtttaaatacttaatctagagaaaaaatgctctggtaaaggacttttggagatggaaaatattgattttgaatagactagaccatatcatataaaggaagacaatgtcagtaggagaaaataataaatctgtatgcattcaagacagcaaatttggatgcatatccagcaggtagccctttattaagaaaaatttgtggctatgtacataaaacatatgttgttctttatactttgtagctcatagtcgatccactgtgaagaaaaataatttatcattttttggggccacctttgttgtattttaatgacagttaatataactttgaattttctctttattgctttaaggagttctagttttcgagtggtatgcttcttctgcttccatatagttgagaaaaattgggctatgatgctactggttttcttgatgtgatcctgccattgttttataacaagatttggatgtttaaaacacatttttctttttattctattagtaatatcatgaaaagattacattcacaacttcaatgacactttttatagcagcaaaacaaagaaatttaatcaaaaaaatgaagcacaccattacaactattaacagcaaaaaccatggacttattttatggtacttgctaaagacataaaaataataaattgttgcagatgattcacttagttcacttgaactcctgtatcatatgtttctccagctttccattcttctggtatgttattcacaggtacaacccatgactcgtcctcatcatcactgaacagcatccttatttgcagagctccacttgggggtgagtttgttgtccataccgatccttgactcctatccaatactttgcagacaaaattttgagtctgcaccaaacatcatcacagttttctttagttgaagttaagttcacacaacgtgtagatgacgaaaaggtatgatatatttgtatattagttattgtgaaggaagtgaaataggtacctcacaaagctgcacagcagtgatatctttctttccttgttgatagtatatgacaaaagcaaaatagtgagggtaattgctgttctcatctattttgattgtgatatttttgttggggtagctgcaagaaacactgtttatatggacaaagagaaagaacactattagttaagtttcataaaacaaagatgattttgaagtttgaacaagctcttaccgtctgtattcaatatcaaccacaccaagggataacaaagatgattctgtgtcagtagtttgagccatccgacgaaaggctctactgctcataatgaagtctgttcgatcaccagaaccgtggtctgttacaacgacggtaactcctttgtctgagcaatatgcactgttactgcatctcacctgtcaaagaagatcaaaatgagtaagtaattggcttaatatttttatgattttgatgtttagattcagactcacctcgtagcaagcacca

SEQ ID NO: 44038 - DNA, 1577 bp, Cannabis sativa
  modified_base (805)..(806): a, c, t, g, unknown or other
acacaacagcaaatccatagaatagaaaaatacatccaaagggaaggaaaaactgtagttgtattatacttgcattgacatttcaagaagaatttagatacaatgtatagatatattagaaaaataatgcaaaaccaacatatatttatgtgtgtgtatatttattgtgtatacatcactgtgattaaagaaacggtataaattccacattccaggtaaaaaagcaaactgttatccaagaaacattcacaagcaaacaaatcaaaagttaatatgtattgggaaaagggaaaaagagaaatctaagagagagcatcacttatgattcaagtaaaagacccaaaaaagaggcaaaatgtgagtcatgttagcaaatgagattacaaagaaaaaagtggttcaaagaagaaagcactcacctttgaatagtattttgatctaagctaaccaccttgatcttcttccttgagaacccagagaattaaaggaagagcttcttcttgaaccaaaaaagactcaataagcatagataggccaatgtagacctgaagtaatagaaacccaccaaaacccagatgcctcaaaaggcaagagtcccagatgagtagtttacaagtaggggttctggcctcaagtgggccaaaaccaattcagaagagaatgatattaaacaataaatatatatataaattaaaaaaaagaaaagaaagagaagagaagagaggttaagtaaggccagacaaaaatgtaatctttgatgagaaaatgtagaaagaagatgtgggaaagagagagagagagaganngagagagagagagaaagagattaaatatatgaataaaagggtggatttagagagacaaaaagaaaaggtgggttaaatggttggtgggtattttgtctgtgtgaatgagagagagggacctgaacaagctggaaaggaagcttggtttgcaatggaggaaaccagagagagagaaacagtaaagggaaagcaaatttgaggtgaacagtaatgagagaaggagcattaatcactgggtaacaaaaattaatttcctaaaatcaaacaaaaagtttttttttttgggacaaagaaaagtattttaaagtaaaggtctttcaagagagaaagagagagagagagagagtcaacccaagaagagggaactccaaatctaggttgggttgaggcctacttaccaaactgtcctcattccctcatccccttgcaaaaattattctcttttaaagccttaagctatgtttggtaggaatggagaagaggagaatggatcgagagcaagaaggatggagactctctttagtattgtttgatattagaagtaaaaagtaaaataaatattaaaattattattttattatttttaatataattatatatttaaattataaataaatatttaaatttaattttttgggtaataatacataagttatatttttaaaatttttgtaaatacataactatgaaatgttaagtaaattattatgtagtaatttttgattgatgcaaattattaaattttaaattttttttaacaaaaatcatttt

SEQ ID NO: 44039 - DNA, 4288 bp, Cannabis sativa
ttctttaatttttccataaaataacctttctgggaaaaaaaaaacatacaaacaaactcatttttgcacaaaatgtataaaaaacccataaaatttataatttcgcatttgatccacctatttgctcaagcctttaatgaagaagccttagtcaaatcaaagaaaaaaagttgtgtgcttgaaagaaggaaaaaaaaagtggatatgtgttattgttaattagagtcagttctagaatgaattccacagtataacaatattgttccacaacatatggtaatttacctggatatgtgttattgttaattgttattacaaaatggaaaataaccaacttattccaaacagcatcatatattcacacaaaagttaactaagctctcaaagatttttctctataaagtcccaaattctcttctccatataaatccgatctctttgccctcgaggcatgtggcgttcgtctggaaatatcagaagttcataaggcttcccggccgccacaagcgcattcacaagcctagcagtgtgcctaaaatgaacattttcgtctatcataccgtgaacaatcagcagccgtcctttcatcttgttaacatgatgcataaccgatcctaactcgtaagccgtcgcattatcagatggcagtcccatgtacttctcggtgtagaatgtgtcgtatccatcccatgaggtaactggtgcgcctgcaacagcacattggaagatgtcgggatacctggctagagtcatagctgaaagatatccaccatagctccagccatataatccaatctttcctgcttctgctagaccttgtttgataagccactctgccccagttagttgatcatcagcatcaacgctaccgaacttgtgcttaacagaaccttcgaacttcaatcctcgtctagcagttcctctgttgtccaactgtaaaaaacaagtaaatggctatgattatgacctgaaacataacaaattaaatattaaatgctttgtaataagctaagtaattaccttccatactaatacccctttgtttcgcagatactgtgctctcatgtcgactgtgtttatccaagaatcagaaacaagctgtacacacggtccaccatagacgctgatcatagttttgtaaggtggtggtccaaaccttgtttcgtcaggcttatatagagccccatataatggagatccatcattagcctgtaactgaactatttctggaggctcaaggtgaagatttttatgccttggaattgtgaatgactgttcatacagtgacattattaagctaccatcatgcaaggagcgtagtaaaaccttaggaggagagtcgagtgagtcgtgaatatcgacaaagttcctcatatgatgatcaaggacaacaacatgtttccccttgctgtgagttagtctcactggggcctgcaacggttcgttttcatctctgaagagtttagcacaataaaggttagattctaagggcccatcataggttccggtaaagtacactagccctgaagcttcattgacaccggcaatttgttccaccatccagtctccttcggtgatagctcctaagaggtttccatttgtatcgtgaagataaagatgtcgaaaacctgttctttcacttgcccagataaatccaccataaaatgtgcttgttctgtccaacgaggtgaaacagtcatgtaaattaatccaagtgggatgttcttcttccaacataacttctctttcgcctgttctgatatcaaactgtaggatctttagtttggtgtgcaatctgttcaaaacctgcacggttaacacatttcccgtcatccaatttactcgggccaagtattcttcgtcattttctggttgatcttttcctccgcataaaagatccatccaagtaacaggacctccaacagaagaaacaaccccaagacgaactttgacatttgaagctccggcaaatggatacgcgtgatcttcctgtgcatcggaaccaagagaacttttaccttggtgcataatcctaaaaaggggtatctcagaagaatcaacttctgtgaatgcaatatatctgccgtctagtgaccaccagtatccattcttcctgtccatctcctcctgtaataagaatacatttcgaaatctctgaaacaatttcatgaatcctagaaaaaagaaacaaagcatcacttgcattttgaaattagtttcttgttactgaaacaaaagaatgtgtcataaccatcaaagacaggacaaacctacaagaccctataaattcaaagaaagtacactttatgagggggaatttcggggttgttgaaatgatattctcacctgagctatatattcagcaagtccatgagtctacaaaaaacagaaaatttgagtttaatcagtcaaaagccgaaatctaaaagtgaactttctacatagattacagctgaatgaaactccagattccaaataatcttgtataaaaccttaccacgccactttctttagcatcgaatgttagttgttttgtatcattgtacagcaaatttagaacatgcagctcacaatctctaacataagcaagcattgaaccatcaggggatagatgtgggtcaataattggcgaagaaggggtgctcagaagtttaagctctggcgttgaactggaaagatcttgaaagtatatctgtcaatgtaaataacactaaagtaagagatgcatatagagtattgctgtttcacaggaaaaattattacagtaaaagtaactcaatgtgttacaaaatgagagtagagttataagaaatgagaaatgttcaagccaaaaaaaaaaaagaataaacaatagagaataactttgtgtttcctaataaacaagcttatttgaatttgagatagatactttgggaaaaaagcatgactttcttcatgaataaatactagattctagtacaaatattccactttcactaaatcccaacttgcaataaaggtattaaaaacagcatccttaaaagctatattagcaaaattcatgaaaatttctaaaagctctatacttgtctaatctctatatattaatatatagatatgaaaaagaaattgcagaggaataatttaggaacaaacccctgctggcaatggcaccataattgattttcttttcaagctcgtcttcacccattcgtagcgtgtcactcccaatccccgctccctcaacctctctctcctcaacttctcttccggggaaatattactctcatcaagcccgccatcaggcggactgaaaaacaaatcttgattggaactttttagatcataagcaaaaactttcctactcaaagtttgatcaggactaaacaaaaaagttaaaatactatcatcgggactaaaactgattgaagttggggcaacatatccgggcaatgggtactgtacaatctcttcaacagggaaaagattacattcatcaacaatgttggagtctgtgactggcatgttgcaagagttggatctcgaacgcttcagatttttcttattgtcatcaccaaatgattgcattacaaatcagataacttggtcagatcattaatctgaaattcaaaataacaggaaaaacaaatcaacaactggtaaaaaccattaagcttaaatttgtcaaatctcaattctaattagctaaatagaaaatttcagaaccaaatgtgaaaaggcttcattatactccatatgaaaattaatctagcaatttactaaggtggttgatagttcatagttaagtatgaatatgattttgtaagatggaacaagaatccaatataaaaacacttttaacattttgttccaactccaagcttttcaccaaatttaattataaaaacaatactaattttaaatacccaaatcaacattatccacacatttctcaactagtttctcagcaactaaacagcagaaaataaatccaaattacagaaaaataattataacccaaataataaacttacaaatcaataattcccattcagtttcatcaagcagaagactaaagatttttaagcataaaatggagaattaagactgattattaatcttgaacagcaattacctaccaagaaatccctcgaatcagtcctttttcaacaccaaggataggtatccagtggatccgatcacagaatatgaaactgcatcacaaccacacacaacccaaaagaaaaataaagttaaatcaattgaaaagtgataaacttgaaaagacaataaaaacaaaggtttaaac

SEQ ID NO: 44040 - DNA, 3190 bp, Cannabis sativa
aaaacatacatccgaaaaatttctgtattaacaaactatttattaataagtaaaatgaacatagaaaatttctcaaaataacatgatatgccaaacaaataatcttaaataatattcatacttttatggttaacacaactctgtttcctatgacatatgttgacaaacgtatgggactgactatttctgtctttaataataatcatccaaccacacagaattgaaaaatattaatataaaatatttccaagaaattattttgtgtgcttgtgcatatatatataattgtttacttgccaaacaaagctaattatgcctactatcaaacattagtgtttgtataatcaataaatacctaataaataatattatgttacatgcatgagaaattaatgattgtaactacacgagaatggacaactattcctatttacttattattatatatttacataaacaactactataatcttattatcaatttccatgcaattccatacattgttataccttttttgctcaaaggaaaacatgatgatgataagccccaagaagttaatcatgggaagaagactacataagctagttttagaagggcacaaaaggatgtcgtttaatgcaggctgttgtcgtacaacctttattgctgatagaggtcactttgtgatttacagcagtgataagaggcgttttatgcttcccttaacatatctgagacatgaaatctttcaagagctattaaagatatccgaagaagagtttggactgccaatttgtggacctattgttttgccttgtgattctttctctttaaattctataatctccctcatcagagagctcgagaatagaaagctctgcttaaattactggattaattaacctacatcatgttttaatttaatcatatcaagcactagtttattttttggtaagagtgaagcatattgttactgaataatacttgtaattataggaataaaaaaatgttgctctatgtaattacttcgttttagatatcatcactttttaaatgaacatttttttttatgaaaatgacacatttaaaataattttaacggcattataatgtactaccgattgaaattagggtgaatttttcttcgaaaaataaaaaagaaataaactacggtgaataaaatccgtacaggctgtgagattaaatagatccatatttttaagggatatgtactatgcattaatattggttcttagtatccaagttttgacatttaaatcagaactgttagttaactaattaattaaatcaagtacagtactatatatatacttttatatttcaagtggttgtacatgaattggggcccttgttgttgtgaaatccaccgaattagcaagaagctgtgtgggcctactgtgtcgtttccccacaagacgcctaagattatattgaaatgatatccaatttttatgatagggaggtttggcttggcggccatgaaaaatgcattaattaaaatagttatatataataactatgttgaccatgcaaaccaagaccccctttcaaacacaactaatcacatgctcttgcattggaaatatccaacacacaagtaaagtaccctttaaaaaaatataagccttccaccacatatataaaagagtgtctatcattactttcatgatcacagaatcataaaaaaatccactcaaaaaaaagaaaaaaaaatcagaatcttcagagactttatacaatactatagaatactcaaaattaacaacctttatcaagatgatgatgagcactaagaagctagtgaaaatagcaaaatattggcccaaattgggaggtctaaacgggagaaaaattatctcctttcgtcccagcattaataatattctttcttcttcctacgatcgttatacgacaacaacatcgtcgtcgtttgtcgttgagaaaggtcatttcgttgtgtacacgagagacgacaagcgttttgtgatgccgttggcttatctaaacgacaacattttgcgagagctgtttaggttgtctgaacaagagtttgggctgtcgaaccatggccctattacgctgccctgtgatgcagcctttatggagtacatcctcaagctcattcgacgaggcgtcgccaaagatttggagatggctttgattcgttccatgaataataatcccactggctgctcatccttcatttcttcatctaattttattgaagaaagatttgcaagccaacaaatcctattactagcctagctagtcatgtggttgatcattttctatatacatatatacgactcatttaccaataaaatataatatatatatacatttaatctacatttatatactttgacaaaacctttttgcgtgttttaaaatcttgacttgatatcattgaattttgtaagtacttaatacggtttcttagattttatattcatactctcttattacacaattaatatatattgtgatctcgtaattaagataattctaatcgtcatcgattccagcaaaaaaaaaataaaaataaatatattacatatctagaccagtttttgatttttagattcaaatttaaatatttggccagtttaagcatcaatttagaaattagagtgagaggtccatcttgaagaagtaaaacaggggagagagatttgagagaagaaactaaaaaaacaatgctagaaaatcttaccattccactactgtattgaatttatatatttatacactttttacttttcaagataaaactgtttacaacgaaaacaagaaagcttaactgaaaactaaattaaacaaccaactttagtacttaccaaagagtttgttggctatcatccccctcatggcctcaaacaaaaaggggtaaataccaatttaagtttggcttttaggtagtgaaatttatccttggcaaggctttagtcaagacatctccaacttgattcaccaaaggcacttagtgcattgaaagttcattgtttaaaatttgatcacaaacaaagtgctgatcgatttcaatatgcttgcagcgagcacaaaagacaggatttgcagccaaggctactactccttgattgtccacccaaacaattagaatggcaacaactttcacctgaagctcagttaacagagagtgaagccatttaatctcaattgtagtattgg

SEQ ID NO: 44041 - DNA, 6097 bp, Cannabis sativa
  modified_base (2114)..(2121): a, c, t, g, unknown or other
ggatcagacacatccaatcgtgtttcgtgggaaaaaaagcttagtcaatcagagttcaacactacttattccaaatcagtattcattaatcaagataattggatgcaaacacttcctcaatagctatagcctcaattaacttttatatttatattttttacaataagttttcgatttttaatatttatgcgaaaatatacatagttaggtcgttttaccaagctggcacctacctaaagtgtcattaagtatcgggttgtcatacatggtatcgtattgatcatgttttttaatattcgtggtaataaaacaatgcttaaattataggccttatgaaaatggtgacctatgttttggtcaatattttgatgttttgtttagtacaaattttcaaagtgttttatgtcaaaaaagtctctctctctcccccacattctcacactgtcacgtcacacataagttacattctcctaaatcaaatatttaggtattcaatctgttatggtaaaaaaatatttgaatttgagcgataagctaaatgccaataactaatttcaatgatgcaacttattaatttttatttttttttgtgagtgttattaattgtctttatatgagttgtttaaaagatgttaaacttatcaattaataaatataaattttgttcacggtattatgcttcttgaattttttacattattagacttaacgacttgggcctttgattattgggaacgatgtggccatggtcaattataaggaacgagatccactgctgtcgacggtcgtgtctatttctctctaacttgggattcgccacctatcgaggcatttgaagttcaacactgatacagtcatccgtctgagagtgaccgtacaagatgggagtcagagttgtattgtgtgaccatgataggaaaagattatcttttcgattgtgtggccctcctcaaccacttattctcctgatgtggcagaatgcttttgtcattctccaaagattgcatctttgtttgagaatgagatacatgaattaatcattgagtctgcttgtctatgagtttttaatgctataattgctaaatgttgtgttgattctcatttaggcattattgtgaaaggtatcattttatataattcgatcgattgcgtaaagcctacggtagtaacggaaccgtgaaaagtatagagaaagtatattttttttctattatattagtattagttagtgatctcggctcagcgagtcctttcttctgtgatgacctttattcctcttatcttgaaactattgtacaagttgattctaattatcaatgacatttggtactttattttttttttctctttgaaatatttcttttgaggttttaatgaggctgaacttgatatttgtctaatttattaaaaaaaaaatcacttaacatatatattgtttattggaaaattttggagtaggttggtaaacatattgttgtgctaaaatgtattatttttacataagttgcttcattttgactagaccatgtaatgtcttttcgtttgttgtttgattgcattttaatttgagtagagttggtgagtgttagttaggtttggtaatttgaattaatgctgttgaaaatgttaaatttaattgagtgaaataatttttttttataactaagtgaaataattagtattgtattatttttgtacactttcatgtaattatttttattctttattttacaatgttaatcgaaaaaaacctacctattcgaaaaaaacataaaaaaaaaatgatatttataaattttttttaattatttattaatattttaaagtaaacaacagtataagtacttaaaattttaagtttgtaagcgatataaatttaatatttatttttagcggcataagtatccaataatagtaaaattgtaattttcctctagtttcatcagttcatactttgttttaaatttattaaaagaatatttgtaagtaaccgatactacatgtttctacctagaccaaatgatttagaatctaggccttatatgtgcttgtttaagacattaatactggcacaattagagaaaaattataattttacaaacattgagtacttnnnnnnnnaaaaataaacattgagtttatgctacttaaaaacttgaaactttgagtccttatgctattatttagggttgttcattaaactgctcaaaccgtctgcactgcaaaaaaaatgtgatttaaaattttttacagttcggttgcaatttaaatttttcctaaaccgcgcggtgcggtgcaatttacggttttaaattgttaatatgcagtttaaaccgcaccgcactatatattataaaaataccaatttttatattatttttaggtctatatatataaaggctcaatttaaagcccactaaatactaattattgtcttgttgaaatttgaaactttttttttatatatttattttcaagtcttatggtatttttgataagtgttactcaagatttgttgtatttgtgatagtttaattatttggtgatagtctaaactgcagaaattgcagcaaccgcaccgtaccgcacccttttttgtggaacgatttttgcaaatttttagtttcacagtgagagtatagtctgaaaaaattaaaaaaaaccatatgtaaagatcattagttttaaaaaatggttaaaaaccacactacacgtaccgcaaacacacttaaagattatttaccatctttataataataataataataagggtaaatagcggcataagtacttaaagttttaagtttgtaagcagcataaacttaatgtttatttttaggggcataagtacccaatgtttgtaaaactgtaatttttttttcagttttgtcagtacagactccgttttaaatttaataaataaacatttaaaagttacagtttcataaacattgagtacttatacagctaaaaataattattagattatgtcatttacaaacttaaaactttaggtacttatcccgttatttactctaataataaaaataagcaaaaggtagaatggtccacgtcatgagagattaagtccacacgatgagtttgggggctcccacacgtaatcccatggattataatggaatggaatagtccgccccccaacccaaacccaacgccggactctgttctctcccaccaccaccatcatcgaaaggataagcttaccttaccaatttctctactttcaccacattttcacttcaaaaaacccttcttttcttgtttctatggacatcatttctttgtcatgagctctgaagccgtaggggaggagttaaggaaccaaacccagaaattcagtaccaaaaagggtcagctgcatgagtaggtttaggttagaatcttactggtcctttagggttgggagcttcgacttgaagcataagcatcatcatcatcaacaacaatggctatggctatggctacaacaatttctggtggttgtacggtcactctttcacacttgctatcttctacttgttacttctctttttctgcacggaaagcttccgtttttccaatgcaaggggatttttctcggttacgctatcgtctcactactcgccgatggttgagttcccgttacttatcatctgcttctaatgggtacttacttcgtttctatgctttgcaatgtagaatttggagttttggattcttttgaggtgttttactagtattacgttgtttcgttcggaattcaattgttaagctattcataaagtgaattcaatagatataatggtgttcgtatacagtatctataacagagttccttagattgttcaaaaaatttcaagcggcattgcaaactatttaaaaaaaaaaattgaaagatttaacgggatgatattgtaacctatatcgaacagaaaaaaaaaaaaattagaaaaagaaaatactttggtatatgtttttgaactggttgtcgacaaagaggttgtaattagcactaatcttatcttgaaacttatgaatggttatcaaagttgaactaggtttcctgcaagaaactgcagaagtatgattgattgacataatatgctcatttatgtagtatcaatatttgcttgataatatgagttaggggtttttatttcaaatgttaaaactttattgtctagttttccggagcatctctttctcatgttcacacatggattgacttagcatgctctcaggatagacgataaattttaatagatttgcttgattagttaggttcatataaactttttcgtactatgctttactgatgaggtggtattaaatttgctattctcccttttcctggactgcagagttgatggtttcatctcgaggtgttcattgaccaacactgatacacagtgcaaccatgttgctaccgaagatgaaacttcagaagaattgtcagttgttgaacctgattgttcggttccaatcattaatcttaattctgaaatccttgaggctgagcctctgagtttactaactgaagacacttatgtggattgtctgctaacaacacttccagtgcgtttttctgcttgtccattaaccttttcctctaatattgttttgctatcattgcatcattgtgttacttatgctttctgtttacttctcaggttttatcagaggaggaacaacatgcccttgctgcaactcccgcccatccaatgggattatacggtaagaatttcaactaaaaggcccaactgaagctcgtcatgaattaatttaagataatttcattgcattacctttttttaaataagttgatttgagtcttattctatgctaactttataggatgtttacatttggagtcatttttgacaaagaattatgtatttttcagctttatacgctagctgtttgtctggaaattttgtggaacaactttggaattttgcttggccttctgcaattgcaatgatacatccgagccttctgccggtggcagtcatgggtttcttcaccaaggtctactatttataataatgtgaagttgctcatataagaaagggggaagaagaatatactgtctaacaggttttctccatgttttaacagcttgcaataatcattggaggccctttagttgggaagtttctggattattttccgagagtacctgcatataattgcttaaatgttgtccaggtaactatatcaatgagtcttagcttcatgctatacgatttatcactgccctcatactaggctaacactttcttccctatcaggcagctgcccaattgttatctgcaacaatgattatttatgcccattctgttcctttttcttctggatcatctctgcttcatcagccttggtttgttgcactaatactagctggggctgttgagaggctatctggtgtagctttgggggttgcaatggaacgtgattgggttgtgcaggtagtgcctctgagttatccttatttcttttaagatataatatttgtgtttgttctcttgcaaaatgagtttgcctttaacttgaactcttatgtggacagttagccggagtcaatagacctattgcgcttgcacaagcaaatgcaatccttagtcgaattgatcttctctgtgaggtatgactgtttttttcctttaggtatggatgtttagatttgtttaaatattgatagctactttatctttctcttcgtcgacctaaagtttgcatgcatttttcaatgaagtaagagattataactgatatgctgtttaagcttgtatatttctatgtttgctgttacctaagattgtatcgttctcaactgatatgatagctatcactgttctatacgagtactttattcttttttgaaaattgtttcataagaatttcagttcatggacttacacagtggttgttgcagatagctggagcatcattgtttggcattcttctttctaagtatggtcctgtaacctgcttaaaatttgctgctggtttaatggtttggtcattaccatttacggtaattgattcccttgtcactctctctctcttcttttttttttcttttttctttttgtgt

SEQ ID NO: 44042 - DNA, 4157 bp, Cannabis sativa
atattggatcttcctttttaaccactcattaagttctcatataaaataatatataaaaatataagtaattaaaaatcatgccacacattaaggaataataaaaaaatataagtagttacaataaatattataatttttgttttatttttttaatttagggatgcaagacggggactttctaagaggtcacccatcctagtaatactatcacccaagctcgctcatttgcgaaattctgatggcatcccatgcattagtgttgagatgattggagccccatttcccaatcattactcataaaaaaacagagttagatgaataatatagtcaaaagagtagagtcaacaattacttaaacttgacagcatgtaaaaataattttttcttttcaatatgtcaaaataaaagcaaccagctacggttcctccccataacccatatagtaaattgcctaaaccactatccttttgtacctattaagttttttattaactaggggactagataatttaacacgttgccgtgaaataaattttatatgtaaaaaaaagcttactttccaaccaatataaaataccagcacaccaccacatatgatatgcctctacctacccccaaattgaaagaaagcaaacctggaccaacaacccagcgccaggcagctctatgttacagactctatgtccgtatggtacttgtgaggatttataccaagaaaatcacacaaagttagaagttaagtagataagtaatttgggttctgtggttagtgctacatccagtagctgactgccatcttcatgaggctatatttataatggcaatttttacttcagatgctaaaaaacaaaaaacaaatctttccaagaacagcatatcaatcctccagctaagaatatcaaacagggcagcacgctaatcttgtgatcctgcaattatatgcatgccaaaaaaatcaataacccatcatatctacacagaagttgctctaaagaagaaattaatgacacaagcaacacagttttgaaccattagagagcaggaaagaaaccagtgcattctctaccaaggaataagcctcctccacaaatcaagaattggcagttctctcgagaccctagcatccagtgtcaaaaatctattccttacactacatttgtataagactacttggtaaaatacagagaaggattcatgaaagtaaccaaacatatagcacctgaggaatgcaaaggatcagattactgacaaaaataaacccaaagcacattcattgtgtacatcctgtaggctttaagatgaggcaaccaattttgaacgtacaggtggcaaggtatatacagatacaaattgcaccattaagtaaataaaacacaatatatcaaacaaatggaaaataagttaaatgtataagaaaaacttacccttcactgatcaaattcagagccagattcaccaacactgtttgtgaaagacctaatttgttaagaacagacgtaagaggagcatatggatgatgcacattcaattcaaagtttaaagtagtcagtatcatagtttcagcttcaatcacccgttccctatactgctcaaaccagtcctgttcaacatgaaaccatagacatatcagtacatgataaagtcttaaattcgacataaaaacgtaacgtatctcagccgaatcaagattaaaactttccagttaccaattaagtagggtgaagtttttcaaaagtgcaaaatcgaaaagataaaagaagggaacaaactaattggcttttttctaagttccaactcttgaggaataattagaagaaggaaatcacaattcccaaagatacttacaacagggagcagataagataaaaaagtcatatcctgcttatggaatagttcacaagatgctcgtagcacgttattcaaaggacgcgctgtctcctcagacttagcagcaagaaaaacagccgcagtagcaatcaactgcacaagaaataaatcaattaaagcactttaactaccattaaaaaatgttaatagtaccaaacagtggtcacaacttacatgcaatgacaatgagtccattccatgtgacaaataattcaataaatcatttacctgtttgttttcctttcttttcgatattcttaccactaaaaataataccaaaagaaagttataacagattttttctagtgctatacaaaaaccaatagaagttggaaaactcacaaatctatcatgggaagcatgcgatcgcctaacaaaaaatcggtggcacaataccatagcagtaccaatagtagtttgtggcctgaaagacaatagaaaacggattctttaaatagtttgatcaataaatccatcagagagctcacccaaaacatagacacataaaagttcaacaaaaatagaaacaacataaaatatgaacaaatttcaaacaaaaatacttacaactcaagccgcaagccaagattctgaatgaaggcacaatacgagtaccgcaagtgtgtctcacgcatagcatctataccatcttttctcgacggggagtgtctgtcaatgtcatccctagacataaaaaccagttcttcatcctcatccaattttgaccgatcccgtttacaggaagtggacggagtgacatcagaattgaatctagcaggatgcacagaatcaaaacaggtagatggagcacaatcataagcattgggtggcaaatgaggtcttccactactattatctacccaagtagaatcagaaaattttctcctcttggaagagggtccttgaatatgatcaggcttaacataattagaataattgaatatatccctgttatgcctgcctgtaacgtcatgagggttgttaaaactcctcgtataaccattgtttctgctcctactccggctgttaatagtattattactgaaattgtttctacttaaagaagaccaatactcatcatcgattgttccccattgaggtcgaaagtttctcataaacgacataattcctggtaattcaaaaccaaaaacgacaaaagtaagaaatgaatcagatcttattattccctacaaccaaaagaatttaatccccaaatagcacaaaaataacacaaaattcttgtttattgatgaaaaaaaggtaaattctttatgttaatcagaacagaaacccgtagaaaacattggattaaacgattaaaacgataatcagagagaatagtaaacggtatactaatcgatgtacgtaccttgtgaaaacgacgaggtgagagatcgatagttggttggatcgatttggaggtaggaagaataaacaaggcttgtaatggaagcgtaggggaagataggagataggaaggtaaggaaaatatatatgaatttagaggtaagggggcgaactaaaccaaactctcccaactctctgtttttctttttgaaaaaagcttgtaaaatttagttggtatactaattttaatattttttttacaaaaatggcattttttattttttttattgtatttttttataagttgcaataatattgcagtatactgtgttaagttttcactggtgttctactggtattttttagttgttctattattgttttgagttgtttgttttgtattctaccggtattttataaaaatacagtatttttgaaactttttttgtctgacagtatttttgtaaaaattaacccgaatttcaatatttttataagtttcgcaaaaggtttggatcactttttcctttcactatatcttagcttcacctttttcttcttcacgtaacgggccgagacgccgcccaaatgttttcagttctgggccaattgtaaaagccccgttttggacaagtgaagacaagagttggttaatggacttgggcttattaattatctcaattgtctggggctaaataaaatagtagaaattatggttttcttgaaactttgtttggaaaataggtagtttaagatttgtccatattttatggtatattttatttttgttttggtgttttttttttctttttatggtttaggatatcctatatttctgtaaacattatttataaagagaaatttgacttcttatgcatttattaggtgtaaactaatacgttaaacttaagtggatcaaaatt

SEQ ID NO: 44043 - DNA, 3310 bp, Cannabis sativa
gacttttaaattactttgatagtcccattcatcactaatataatagatgtcgattttgtcactaatatattgataaaaatgcatcaattatatgtttgaaagatgtcgattaattttgtcatttttcaaaattaatagcgaaccagtacaacacaattatttaaggaataatttcataaatacctaaaaacaataaataaaaatataaaaatacagttatacaaaatattaaatatttttaccatttttaagattttatttatagaaaatcatgataattttttatgttaattttcaacttatttttatgttattgtgttgttaattttttgttattgtatatatttttatattatttttatataatttttttattgctgtgtgcttttataagatgtaaaaatatatataaaaaaattaaaacataaaaatgtaaaaaaaaaaatagtacaatttttttgagaaaaaaaaatagtacttaatgtaattttcataatataaaatttctttcataataatcatatttttgttttttattgaataatgtttgtgtatagtataataactcgtatagtgttatttatataataatcattactcggcatttgattattagagtgagagtgaaaattgctaccaagtgataaaggagtcgtggcaacagattaaagacactgcaaagacttcaaaaggaatcaacttactaagaaagtcattcaaattgtgcaagtaattattaagcaaattaaattttgttgaatattttatattctgtgtatgctaatatatatgttatctatacataaatagtatatctgaattttagtttaatttcaggaactatgagtatataggagattatcttgaaagttggctatcaactgcatttgtttacacagccatgactgattatccaaccccctcaaattttctgaatccattgccagcttacccagtgaaacaggtaattaattaatttatataaagatatatatattgaaaataataataataataagattttatttgtacttgatttgtttggatgttcagatgtgcaaagctattgataatccaaagagtggtagaaatagcaacacatttgagaaagtgtatggtgcagcgaacatctactataactacagtggaactgccacgtgttttgatctagaagataattctgatcctcatggcctcagtgaatggagttggcaggtatatatatatctattgtttggtttaattttgaaagttttgtaatactttcacaatgcaatcaccattacactatttatatataaattaacaattattttacaatatttatataaaaaataaaataacctttatacccttgctttattaaaaaaatttaagatcaatacactaatctttctctaaaccatttaaaaaaaataaacaaattattataatattattttcattttcattattatttttattataatccattactattagaccatctctaataaaagatgtaaaaattaaactatatttgacacaaaaagtaattttgtgatatttttacattaatttttattattatactacattacataattataaatcttaatacaaaatttaatatgtcatttaatgttcacttaataatttttaaaaattataaaataatgataattcaaaagtaaatagaaaaattaataataacaataatacaagtcatttaatgcaaaagaacatgttaattaaaatttaataataaaattttaaaaaattacataatagtaaatataaaaatatagtatttattgtcatgtaaattttgcactatgatatgttatgatataaatttgaataatttttttattatgtgacatatttacattataatttgacacattagagtaaaattttaacataataaattatattttacatttacatttattatgctcttatagtattaccattttcaatctagtataatgatattctctctcttttacctagtggaaagaaagcacctactcttttcttgaaaggggaagatagctcttacttattattatgctatatatgctcttttaagtttaaagtttcaaataatattcaaaatctctatatctatggttatattatttacaagatacaactcatcatatataaatagaagggttatcttagattgtaattaatcaaaagatttttcctagtaaacatagcatctctaagcatccaagaaaaataatgtctcacatgcataggttataccctttattagaatttttataaatatatatcatatatttacataaatgtgattatgactaatcattatccactattagtggagcctatatcaaatgaaggttactaaaagatgaaccacgagtttcaaaatcattatcccctttcatggccccagcctatataaatatgtattgattaaatatgtttttctttggggaatggtacttagtataaaataaaagtaatgtgtattcgatcttggatatacagttcttatatccttcacaaactaaaattttcaaggcaagggccacaagctataaatatatttatattatttcttcttataatattaattatgatgagttgagtagggtagtatgattgattctcatgtttttcctttaatctttttcaaagtcaacaagtacacttactcaatagaccaaaacatatcaattctctaatatgctctctaggagctaacttcttggaagtttacagaattactgctgtttgattgcctgataatctacattgttccaaagtccatcatggatcctgctcaagtcagtgaactgttcatggatgcggtgcaaatagccccagacgatatcacctttactctcaatcctggtgaggttgatgaaccaaaagaagctaaccaggttctggttggcaagattctaagccggtataaattaggcaaagctgcaatacaaggctctttgaaattatcatggagtgccatttcaggatggaagtggaaagaaatagaaggaggactaatacaattcacctttgctaagcgggaagacgcgatgaatgtcctcgcacgccgtccctggtttgtttgtggtgctcttatagtgataatgccttgaccagcttggctaacccctgctgaaataaggtttgataaaactccgctttgggtaaaaattgaaagcattcctccgttctattggaatcgctctaatctgaaggagatggcttcaagagcttctccagtgcacgaacttcccctgggaatcgaggatgcagttggtatgagtactctaagatttagagccac

SEQ ID NO: 44044 - DNA, 3980 bp, Cannabis sativa
atctacttctcctagcattcttgcccctaataaaaccaaatctcctcatcctaggtcattctcaaaccctagtatgacagagcaaaaccaatgggtgcatcattttatttgaatgataagttgcttaggtttcaggataatgtgtattttcaccatttgtggcctgaatattaagtcaaacttaagtacttttcaaaaattagagagctgattgaaaagagagggtgggtgttgactgtcactcatcttcagtagccaaatgaaaatttagtaaggtaattttatgataatcttgatggtagcattttgaacaagaaaagaaagttccaatacttagcttatatctaaggcaatcgattttggtttgcctcttcaaccattagatatgtcttgaaaatcaaaaccattccaatcccattttttaatgaggattttaagcctacttttaaagaaatagggtctgagatcactggcaactctaagtttatctagaatggaaaggagttacatggtaccgtgcttactgagttttataaagtccttcataagattgcattatccaatcggggggctaactcactcatttctaccatcaattataacactggaaaatttctgtttgcattaggaagtggtgtcagtattgatcttccatcccttatgtatgatcggagtgtgaactctgctactgccaaacaggtgaaacacacttttccttatccctatttgattaatcaagtggtgtaaagggggtttcttactgtgttttattaaggcaagattctaccagtccctaaacttggcaagtccttctctcctctttttggcaagcctttgcctttatttcttaggaatattcctgccattggtgaggccttaaccactgatgttccatcatcctccactattccttcagtgactcttgaagggttcagtccttttacttcgcaaggtcagctattctctttggtgcataacttagctgactcttatgcacgagatcaacaatgtcagtgtcattttgagaaagttgtcgttgatgttttgtcttctatgattgtggttttaaagtcttctaaggttggtccttttgttcccactggtggtgattttttgagttcttcagatggtgacgatgccttctctgagcattcaccgtgttatccacatttgatctgacttatgttccatctgatgttgtggttcatggaccttctgtccctacttttgttgttgagccttcattcgtgcctattgatcaaagcccaaatacttgtgctattgtccaggaggaacaagttcttgcttgggtttagggggagtcggttttggttgatgatcaaggagtttcaacaactgttggtgtcagggggagccttcaactgatttcctcccctatggtattgatgttgttgatactttagtgcatgttcctcttgcttctcttgtagcctattccagcaatgaatgattatgatcactgagggggagataatgtgttacatttttgtacagttatgctaaacaatgttcatattttgggtttaggctttttttttgttattctgtctgctgaacttgacaatatcaatgggtaagtttatttgataatatcgtttggattgtttgtgcttagttcttcttttgtgtgtttttgtctatattgcttggtcgttggtcataattttctaaggaggagattgcaactgccatgtttttgtatggaaaattatgttgcttgatattttattagttgtgttctgaattatttctttcctggctatttgagttgatcatctaagtctttttatatgcatttgtttagtctggctcatttatcttttgtcaggtaagcttttagtttttttttattttttggtttagctcattgccagctagattgaactggtgctttggttagttaagtcactgttatcgaagtgttagttaaataagttgatctagctttttcaaactaactcaccatcattgatagaatcttctagtgattattgctctgttatggcaaaatacttttctatgtttcttctttattggttgtgttgtcgattgtagttcattggatcttcaaggattgaagaaggaatgttgatctgcaatgtctgaagggagtttaaactgatctactggagggagttcaacttgatggaagcaaggggatcttatcttattagatctaaggggacttagatcttggtactggattgtaatcaaatgtattggtaactcttgtataaaatcatttcaatttatcttctaacatttttcagctctagagtttacctcaactaggggagatgaatgttattgtctctatggcttttagtaaggttgatgcattagagtttctttcaaagatatatgaagaggaccagatcataagcttgtttgcaaagaagagcaaagttcctaattctttggcaggggaattgcaggctgtgatcaatgggagtcaggtatcttaattaagccttaaatcttagagattttaacctacttacagattgtaagataatttcaagttcgattcatacctaaaaagctcttaacaagtcaactgattcttccttcactttgatgcttagcccttgatgccactgattttcaggtttgtttgatccctcgtagagccaataaacaacctcaagttatggctaagtggaaagtggataagcgttgtaatgaatttcttaccttttgggaggtgtatccctattggatcacaaaattttattagtttaataaatttctttgaggttttcgtaatgacatgtggttattaatttcataaccctcaactagttagataaatatttttagggtattacaaatgaattgtgatatatttttaggctatatgttcatataggattctttcaaactagaaaattaagttgttacacttgtcccacactaatagctaattagttttgacaaaaaaagtaattgataaattttgtacctcaaataatttattacttaaaataagataaatatattaacacacataattaaaataaacaagatatttgtacgtacctcaaaccacaataattgttgttgcatttgtagagctggccctgatacaatgtttagtcgttctggagggggtaatttcgcagccaaatgcaatatattattctcatctgtatcttcataagtagcaagaaggtctttaattgaaccaatctcatgaattagattgtagatatttgcatgacgatataacacggcaatatgaattatacttctattttgtttatcagtttcccatatcaaatctggataagaactgataagtgttgctagaaattcaaaatttccgaattttgtagcatcaaacagtaactctgatggaaaactgataagattcatagcttccacatccccaagatccaaaacatgttcccacaaacatttaactagctcgagggctttagattgcttcacgtttctttcaaatccaatgttaaaacctaataaaaatttcaagaaaatacatcttaatgttatgtagctattttacaggctatatattctcttttgttgtgacagttataactagtgagacaataagaaaatacaattaaaaaattatttacatgatttcacgagtttggtccacccaataggactcccgttgtcaaaggcagagggagataaagcaagtagatgcaaagcagtcttattatccttatctcgagcactagctagccatgtctcatcttgaagaatttcaagtgccaagcctgaaaaattatactaactttagattgttttacttttttacatgaattatcactactacaaaagactcaatttccatcggtcaacgtgtctcactaaaatgattgatcgagacaaaaaaataagtgaaaattttatgcttcagagtataactaaagctaaaagatactaattagcgtcagctgatactccgatgctaaaagaagaaccga

SEQ ID NO: 44045 - DNA, 1179 bp, Cannabis sativa
tttatttatttttattttttattggatcatctttttaaatctagatcaaagttacgcagaacccacatagaggataaacaataaaaagaaaatctttgaatgaatcagagagtaatcaaatacaaaagaaaaagctatgaaactatcaactttcataaacccaatgcaaaagatatttttccagcatctaagttcttctctctccttgttcaatcccaaacaaacaaataattccataaaggggagaggcagagaactgagatagaagaaacccagttcagattaactcaaaagtcaaaattaatcaactgaaattctaaaactcgctgcaaactatcaaaattcaaccaaagaaacaaactaataagaacataaaactgcagaacattcatcaccatcaatcaaaaccgagaacaatacctaaaaatataaagagaaaagaagaaaacccatttaaactatcaatcaataaaggaagaaacgaatccaaaacagaacaacagctggaaacaatctaagttctccataaacaagcgattataaattcagcataatattactaaaatggtaaaccaaaagaaagaagataatatgaaaaagtgaaattgagtggtgtacctaccccgcgaagtgaagagaggagaatggtgtgaataaaaggtagcttggatttcagagaagttccatggatgcaaatcattgaattgagagcggtgtatgaatttcagagaagagagagagagaagcacagaactttccaacttttattattttaatttattaatttaaagaagaaagagaataagaattggccactcttccatgcaaaagaggcatatatcagtatcactgagtctgcgtggactgtggaccctactttttacttctacatgttagtttccgtacgcgtgtgtgctacgcgcttcatctctttgtttaagaaaagattcttacatatcagtctgaggagttctcaaatggttactggtgttagcaagagaaactgttatttgacggctgagctgatctgtcacttcaacgtattatttatttatttccaatcttttaattttatgacaagtgttagtaatcgattatcgtggtatatgatccatttcaatatcatgttttatactttttaatatttaataaataataggataaatagttataattata

SEQ ID NO: 44046 - DNA, 2135 bp, Cannabis sativa
tccttctcagctttctccaatgattcagttgtcccttgtagaacttgcgcttgtggctgtaatcgaaaccccacaaagacttgtaacccaactgagccatctttacttcttcggcccaaaactctgcttctgccatcggagaatcgaaccgaagaagccttggaatgggccaagatcaaaggcttggatgtcccggaattattaccctgcgtcgacaattgtgggatcaacataaactggcatttggattcggatttcaagggtggctggacggcgagaatgactctgctcaactgggatgaaacagagcatgtggattggtttgcagcggtggagttgggggaatctggacctgggtttgaaaaggcttactccttcaatgcaaccttcgttccaggctcaaacgacaatattatcttcatgaaagctttaaagggactgaattatcttcatggagctgacaatggtgacaatcaaaagaaaggtttgaaggtggctggtaaacaacagtcggttattatgttcagcaagaagaagactccagatttggatttgggtggcgtacatgggtttccgacaagggttttgtttaacggcgaggaatgtgtacttccgacaacttttcccacaaacgataatcaaaggaaaggtatggttgtgaagaagagcatcttttttagccttgtgtttgttatggcttatttgttattgtagttttaatttttagtttggtataataatattgattgattgatttttttttcttgcctttgaatttggattaatgtaattttatagttttatatgtaaactaaatcattcctcttttcaataattattatttagttttattttatatatttacccaaaagataaataatacacctaaatttgtttacgtctaaattgtttgggatgcaatgatatctaaagcttatgcagaggtaataaaaaaatatttctttttaataatttaagtttgaaactaaacagcataaaaggaatataaaatacagtgtctcctctcctatatgcagaagcctagctattgtagatgttcttccttataattgtaaaggtaattgttggattgaaccccatcacaaacaagaacaccttatcatgaaaccctgcacacttgatcactcgagacacaactaaagacacttcagttataactaaacaaatcctatatgacataactaacttaagagactctgctgccacttaattttcctcacctgacttcaacaaaagaatataaatgaatctaatctcattgatcaaatcagagcaagatgttctcttcaagttagtgagagaagctccaaaattgttagagagagagaaaaaagaaagagagatagtcaagtgggtttctgcaagaaaagagagaaaccaaatcagattgtattcgagagctgaccttccaccattgttgtaactatccaagcttggatcataatggaaaagagctgaccttccagagaagagctcacaaggatgcagcccaaagtttagggtgaaccttgccaaaattcttgtgtttgatctatacttttctgattaattcatcttttaatttctgttttattacattacatgtttatgtcaaacattgattgtttgcgtctttattatattagtatagtttgaattagtattaacaagttaataactcaattgacatggtttatgcaatttgataatcagtttcgtaaaatccattgctggaagatcaagttggatccaacagtatgtgtcttcacgtaggaaatttattttaccaagatctagatttactaacatacatgttgattataattctataatctaacatcctcaatatgaaaggaaaatgtgaatttctatgtattatttaagggataattggttaggaaaccaataattagggtaattttaaaaataggatacttttacaaaaatacctaaaataccctcctcataatttctaaccctttctctctccatctcaaccaaatctctcccttctctctgcccacttcgcatgaactgaaccccccaccgcccaccacgagtcaagccccacctccgatcgagacgagtccgatagagacccacagccgcaccactacgacggagacgccgacgga

SEQ ID NO: 44047 - DNA, 2800 bp, Cannabis sativa
ctcactttaaggtaataaccctaagtcaatacaccgctcgctttagggtaataaccctaatcccgatttttaattgctcacgtatatcacacccaatataagcaccactgcgcataactctacgtgctaattactgtcttacctgatgtcccgcaaacgtggagattccaaatccctgggtgctcctgaccaagtgccggtaatcctagtcacaattttgggattcgcaagtatagggttaatccctaaatctactttcacataatataaaattggcattcaaagtacagataatcacatagctcggaacgagctttccaacgatataaagaacgtccaaaatagagtcccaagtcaaaagttatgaccaaaacaaaatcgagaaaagggctgactctctgttgggtttttggctgcggccactgggttcaaaaaaccaacaaaaccagattttaaggtctaaaaatgccacttctcctaaatttcgaacctcaaccaaaacagagggcaaaaacacatattaaagctcaaaagtcacagctcaaatgcatctaaactcagatttaaacaacaaacaacataggctccaaacttaagcacaatatcaacaaattcaagctcacaccatgaatcttcaaatcctaaaacataaactcaagcacaacactaaatgagggatgtgtatcagattaaaaatatcattagaatccttacaaatcatctcaaaaataccacacaagcatcttactttaaatttctagctcaatcaagcataaggtgtaaagattacaccaatatcatcaaacatgcataccaagaacatcataccctattttcatgtttgaaaaataaatttcagcaagaattccaaataaaaaactaatataaagggctacctcaattccttccaatctctagcaccaaaggccaccaacaccaagcttgaatctaagcaattcacaatcaaaattcaaggattagaaatgagtttagagagaaggagagggtcggctaatagggctgaggaaacaatgcagaaaataagactttgttttacttaaaatttccttttgttgcaaataacaaattagtagaaaattccaacaatacccttagggccatacacacacataagtacaaattcaaggaaaaatagtcattcccatcacaaatatactcaaataaattcagattatccacacataaataaaattccaataattcatcccaaaattgtatttcagccccgaacccggtttggcccgaaatacccggttgtgactataccgcgctgacttgtcagaacatacctgaaaaagacaaaataggtatactatataataatatagtccacaagcacataattaaattaactttacagttttacccttctcgggtcaaaattactaaaatacccatggctcaccaacggggtcttaacatgtcataaatcataataatttgcatataatagattatataataatataattccacaataatacacatttaactagttagggtttgctaatccattttctaactcttagggtattacacagaccatctaggtccgggaaaggttctcagccataagaaagaaggcgcccaacatggcatattcggatgccctcatggggtattcccaaaagaactgtctacaagataagtggagatacctccaatatgggatctcactaaataagggattcaccttaggccatatcctctaacatttattttatgaatctgacagcgtataacaactgtcaacattaaatggaccccacgattatggctgatcgtgatcttgtaaatcaggtctttcctaacttatccaaagtccatattaaatgaatatttaccccatcagtggatctagcttcataaaaaaatcctaacagtctaaaccctagcctataaatatataaaagattatatctccatgcaaagtgttagaaaattattattcaaacactaatactaaaattaggatttttaagctcgaccaagaacattatccttgtgtaatacatcaaagtttttcagctaataatattgactcatggactaaggctcctgaacgccccaaccacataaaatcttggtcttcttctttattttattaatttcttaagttctaataattttaaaatgaaatggtaatcaaaaatctcagtactttcattaggagtttgaagatttttttaccaaagttgtcacttacaatgatggtggatacttgagaaaccattgcaaaatctattgttcgtgagggtaaagaagatattgctatggatgatgttaacgagcctcctccagtacacactcatgcagatacaataggagacagagaaactgttgggattttatgccctaaataaaatccaattttattgtaattttatttactttcaataaagattagaaatcatatcttgaccttgtcatatgctttgttcacatattttatacatgattatatgtttaatatataagttctattaaattctgaatatatatttattcacagttacgtgatatcattacagtaaaaagtaattatgattatatacatcaaattatttagtcccacgatttatcagtgcactggatttatactgaggtgataattagcgatgggtttgcttacacttagataagtgaaatgtattttccatggcattagtaaattaaactagcatcagatgtattggctgtacattagactggattgatattctgtaacactctaactagcataggcgtattacgcgattttttaaacatactgtgcagc

SEQ ID NO: 44048 - DNA, 2932 bp, Cannabis sativa
tctctctctaaagtggattccatctagcatatcctttcggttactttttaattggcaaaaagaatcttgttagtactatatatgtaaaaaatcttaactagtactttttggacttcaaaacaaaagtactaaagaaaatcatatttactcttcagtgaatacaatacccaaagaaaatatatataatatttagttgatttaatttaattaaaagtagaaggaaccgtaaatatatgagttttcatgagtattatttttaaaaaataaaatatgataattatattattatatgctaagaaatcaagctgaccataaatgttttaaaaagatccaaactttatatattatagataatatatttatttgaaaactgaccctattgacgtggacattaatttttgacatgtagcaaaaaaaaaagtattttggagttaaatagctctgagtcatagcagttgacctaaaatgggtccctattcctacgcccaagttgacttcgagaactccaaaatgggtgtttggatcccgccaagttgtttccaactcactgtctaatcaaggagacaagaagaatcaagtccaaggcttgaaaacttaaaagagaccgaacagcaccccggatgtcaacccgggcgcctagggttttcacccaacgcctaggttgacatcctaactagggttttagttttcgagtccttcttagtgcaaacggtttaaactttgtactttgatatgaataagacatgtcacgaacatatttgaggcaccgaaatcagaatcgaaatacttttatttttgagcacttgaggcaccaggcgccccgaacgcctagagcaactaatggccaagttgacatattgtcaacttagggcacttgcaatcacaacattagaagtatcacgagcattttattcatctccatccaaaacgaacaataaagtgcttttcagaaagaaacagatcgacttagagctgggcccagcgcccaggttgacacttttcatcttgggccatttcaaacatcagtttagaagaattcttcaaggatctccgttttcgtcaataattagatttgggtgcgttcggggaacaaacagagtcatttgagagcaagatctgggacccagcgcccaagtgacctaggtgctgggactaacaaccaggttgacattttttaaatctaggctatttctaatcagctttttcgagaagtcttctagacatattctccattttcacaaataattgagatgagagtatttccaggaatcaaacggaaccatttgatgtcaaaaagctagaccaagtacccaggttgacaccagtgttgggccaagcgcctaggttgaaattttgtcaacctgggttattttcagtaatttttttctaataaagtgttccagacatcttttttgttttcagaaataacgaagatacaagtaatctcggggagaaaacgagatcatatgggggttgatataggaatctagcaccaaggtagcaccgttgtcggggttgtgtctatttaatattaaaataattgaattttattctaatatggtattttgtttcgctttttgctaattttatatgtctcgatttcttatctcatatcaataacaggtagtttatgggacgtcaatgaccaacttgtaaagggcctggttatgccgaaatagagaagattgtagacaaaatagaagaaacaagaggttggaatgagttattcttagagaacaaagggttgaggttgaagaagtcatggctcaacacggaaataatgagggtgcagtaaatcaagccaatggtcaaaatcgtcgtgatagaagcctgagggataatgtgctacccacaatgataatggtccaatcttgtatcagactacccactgttgatgcgaatgattttgagatcaagactgccattctttaaatggttcaattcactgttcaatttgtgggattgactataaaggaccccaaacatgcatctctctaacttcatggagctttttcagacatttaaaataaatggagataatgatgatgccattctcctcagatttttcccattctcactaagggagcaagccaagagttggttggtgtctttaccatctaactctattgccacatggaatgaatctgcaatgatgtttttcttaaagttttttcctccagctaaagctgctaagttgagaggggagatcaataatttttattagttagacaatgagtccctctatgatgcttgggagagatttaagacttgatcttaaagtgtcctcaccatggaatagaaaaatattgttggtccataacttttacaatgggttgtttggtactactcgcacactcatttatgtggcaattgacggggcatttatgagaaaatgtgtcaatgaggcatatgagctgtaagaagagatggccatgaacaaccaacaatggccaagtgaaagaaataatactaagaaagtggttggtgtgcatgaggctgatgcaatcacaaaattaactgctcaagtcgaagccttgaccaaactgatgacagccaagtgcaacaaccacgaatttaatgtgaattatgtgggggtccccatgcctatgagtagtgtcaattttgtttatgtagatgacttactcatggagcaagctcaagccattgagaactaccctcaaaactgtcattatcctcaacaagggaattgtcagcagcaaggattttatcaacaaagatacaggcagcaacaatcataacaaccccaacaaaataaaaagcccgctcagcaacaagttctagtaatcagtctaatcttctactacaatttatggctaaaacttggtcttctatcagaactttggagattcgagtggggaaattggctgctcaaatggcctactgcacccaaggtaattttcctagcactaca

SEQ ID NO: 44049 - DNA, 4386 bp, Cannabis sativa
  modified_base (59)..(74): a, c, t, g, unknown or other
  modified_base (588)..(590): a, c, t, g, unknown or other
tgataattaattataattattgaagagatagatttgacatttatagagttagaattaannnnnnnnnnnnnnnnaagaaaagataagttgttaaataaaagggcaaaattgaaatcatataaggcccactatatgttcggccacttaagggtttattaagccattattttaactttttttaattcaatataattctaaacctaaccttagatgaaatcctataaatcgaatgagatgctcttattttcttaacctaatctatcaaactactttatcaaacaaaaattagaacataaagagagagcctcttgaatttgaaatcatcctattttcttcttcatatttttgaacccttagtgagttgaggaaattccaacacaattcaagcaaacactgaggcctttgtggaagattgtgaagaattctaacaaaagaagaagaaccaagtttagatcttgatcatactctgcgacaaaaaggatcaagggttagagatctaaatggaaggagatattatattctgttgccaccaatgtatggttttctatagctggatatgtatttattttattgttttagaaaattcannnttaggatgttagattatagttatataatcaacatacatgttagtaaattcagatcctggtaaaataagtttttacatgtttggatcttgctaaattgtttccaacccgggtgcctagcgccaaggttgacaaccctactaagttttggttcctaggttatcttaatgcaaatgggtcaaactttgtatgggacatgaattagacctgtgacaaacatatttgaggaaataaaattagaatcgcagcactttcagttatgaggagtcgaagcacgaggtgcctcaagcacctagcgcataggttaacatattgtcaacctagggtgtttcgaaccacaataatgaagaaccatcctaagaattttcttcatcttcatccaaaacatagaaacaagtactttttgtgggaaaaagaattgacttggaggccaaaatagggacctaagacacaggttgaccttggccctaggcctcacgcccaagttgaaacattgtcaacctgggccactttcataagcagtttaggagaagtcttccgggcatattctccattctcatcaataattaagatttgagttcttttgagaaacaaacagggtcgtttgggggtcagaactaggacctagcgcccaagttcacactttttcagcttgggccttttccaagaagtttttgtaagaagtcttcaaggaatattattttgataaaagattaagctgcaagtgtttttgggaatcaacagagttatttggtggctagaaactggaccaagcacccaggttgacaatggcactaggcccagagctcaggttgtcattttgtcaacatgggatgtttccaatcatttttataaaaaagtgtttagagaatttctttcgtcattaaaaataatgaagatacaagtgatctcggggagcaaaaaagatttctagggagcaagaacagagccccagcgcccaagttaacatagcactgggccctgcacccaaggttgacatgcaaccaagttcgcatgtttttgctcctcaaatacaaactctgctctaggcattcttcttaaaatggtcaaaaacaagagaggagaccttgtttgcaatctccaatgtcatataagtatcaaaacgagcctcgggaagttgacacctgacctattgcgtttggttctacttatcagaattttattttgttttgagcattcaactatttttgcatagtaaaggagagctacaacttgtgacgagtaaaattcacactttgatatttcaccttttcaacaaggtggaatatcggaaaaagtggggagtttagagtcttcccaatttcacaaaacaacgacatctcagagaactagtgaacaacttcacctgaacattgaatatgactaaatggtgttaacacatcacttaggcataaaagaaaatacaagtatgggacattttgacactctcccgacatccaattttacgccagaatgtcaacctagtccctgggtgtcaacttgggtgctgggtttatcaacctggacgtagggtgctgtacaacgtttagtaaaacagacataattcactcaatattgatcttactggtgcaattcacctttcattttgaagctatttgagtgatctatcaagtcatgtctcacacccacattgcaattccaaatattttgggatcaaaattcatcctcaacaaagtattgatttttccaacacataacccgaaaaaatcccggtggatgagattcaatgtcctaaaattgaaaattttcaccagtagttaatattgatcatcaagaatcatcatcaatggcaatgatcagcgcaacatattttattttcatattttgtatttttgtatttattattttagtaggatctcattccctataaaattagagctcttctagctcattttccacattcttctgagtccatataaggtcaaagcatctctctcgattttctctctctagaattttgagccccacacttatccaatccttcgtaattatcatgagcaatataaactcgaaacagacgcaactctattaccgtcgtgtcatagtgagtgaattactataaattcattgtgtctctcttacttcttaactctcattacattctcgtcaatctagcgatcgagtgtgactagatatctgtatctaaatttttgcttcaacatttttattataaaattataatatcattattttatttaagtttcatattattttatattaacttatttataattgacaaataattatctatttatttttattattaattttatatggtttataatgttttgtgctgtgctttttaggcttctttcgtgtcgtgttttttggattagtctattaatgtttacgtgtcgcctcattcgtgcatgtcatatcatgcttaagcacatattttttataacgtgtggtgctaatgtgtagcatcatattgtattgtatcaaaactcataatttttttacgtctaatcgtgctcgtaccaatttcgtatcgtgtaaaaaaatttaactggtatttacaccacttgatggatagggtagaagtacaaacttttcttgtaagaattgatcgagtgtaaatgtaattgaattttgttatatattattattcttgttaattattaaaaaaagtgaaaacatgagtgtttgattgtgaaacggattggctaccagctgctgataacgcttgcaccggaagtggcgtcgctttccatctcccaatttacatacccatcaatcagatgagctcccaaaaaccaatggcctttcaaaacattttaactctgcctaaacccaatcatgggcccatattgttattggatatatctcctgagatgggccccattcagggaacagaaccagagaaacttgatttgccacgtggccacatccaacttatgcaccttctccattctgcattgtttccatccccaaaagttgaaaacttataataatcacaataataacacacaccgaagcccacactatatatatcacctccacacccacattatcctttgaaagaaatataatatatataaatgtataattaaataaaatatatagaaaaataaaaaaaccagctaattgaccaaaaccccttctacttgtagcataagtactatggctgaatttgcagctcatttacgaagctttaaaccatcattttcagtcttagaagttgatccaaacatcaacatggaagagataactcagtttggagtgatgaatccacacacatcggataattcaaacttgttgatgaatttccaaagctttaatgttcctttctctagtgataatttttttggcaatccagctgctgagtttcccggaatcatagcggaaaataattttcctggaaataatttcaattacacaaaccaccatctcagctttgcacatcccactagtactagtcatcatcatcatcatcagccaactgttagtgagaatacaaatgagatatctcatgaatgcagaaagagaaaggcactcatgaccaatttggatgcctctgagtgcagctcaggcaactcttctcctccagtctctcaagttgttgttgttgagaagaaaaatgtaaccactttatttatatatctatatcgatactattctatatatgtaaattagtgttacatttttatttttacgtttcaacttttaatcttcttaattggttgcaggattctggaaaagggaagagagtgaaaaacaatacagtaaaagtagaagagaaactaaaggaggttgttcatgttagagccaggagggg

SEQ ID NO: 44050 - DNA, 1167 bp, Cannabis sativa
ttttcaatcgattgtgccaaaatattccctcacttgttccatcctgttagaaagtgctatttctcttaacaacagccagcaatcttcttcagccaatttatccatgcaaatcttgtttgtgtctccaatcattttggccacctcctcattctgcattgtcaccacaactgtacttcccagtttcaacaccaccaatcttgaaaacttcttgtagtcagtagtccacacatagtctagtaccaatagaaaccccttatccttcacagattcacaaatttcttctcatcgatcagcaactgcaactctaagctaatgacagctggggtttgacgagtgagttgtttaatagtttcattggcaatcctaccaatgtcaaatgggtctgagacacaaacccaaatcattttatcttcaaaaatggtcttaatttcagcatcattgtaagcatttctggctagagtagtctttccaattcctcccattttccaacaatggggatgatttgggtttttcgtcatcttggtcactcccactttgcctcagtctatcaatcaaagtttccttataagcaacacttaatttcaattttcaacagcataatcaacacttgttctcctatgtccaaacataaggtgatttcatctagtttcgtaattagggtttggatctctttagcaatgtcaaggcgatgatgagtgactatcactttaggacttatatgtttgctacattgaaatttgaaattgaagacaagagaagaggatatcacagaatctaacctccatcacttgagcctttttcaaaacttcaccagtctcactttggctttcttttccattgagagatcacagcatcggccattgttggccaattacttactaaaaacagaagcaacatatgttgtttgtttggctaagcttttggaatatgatgacacatttagcactttcaataggatatctcaaataatataatttaataactattataaaatatcgtcaacaatttgcaagacgctgcatcattgtatattacacacactgattacatgctatcatataaggatgaacatctaatccaatccaacatttttttacttatccgatccaatccaattagaccttaaaatctaattcaattactaattagattggatcaattttttaa

SEQ ID NO: 44051 - DNA, 2966 bp, Cannabis sativa
tgatcttttcttccccaattatgtgcttgcatttttcctgggttttttctcaatattaaaattgcagtaaatgtgattgttttgtatcaagtgagttttgaaaatctgggattgtttctcctccttccaacacacctcagccaaaaatttgtattttcttatgttaaatttttgcaatggatcagctgctggaatgtatctttgtgatgtggctgaggcagttagcacaagtagaagagcagtgagttgcttcattttcattttctagtttttagctatgatttgtactgatctttcaaattaccaaaactaagaatttgatggttggaaaagttcaagcaagataatttatagcttttgataaatttgtaaacatcttcctctgctctgcagcttagaggagctaaagtacctgaagaggaatttacaacacttcccaatggtttgaagttagtagacactaacttaatacctctcctctattttggttttctctatatgttttcttcattatggttagacttggaaatatggtaactttattctcaaattttgatggtgtcattcaccatagaattttctataccttttatatacatctaaagtcaagataaaatcactttttagaaagattgtcatattttttcttataaagaagtgttcagactttgtcaagtttctactttactttggttagggtaacataaacataatactgtcataggttccaagtgaaaaaactactctttattgtatgtactagtttgttcattgaataatttattttcactaaattaattgagaggtaatgtccttcaggtactatgatttgaaggtcgggggtggaacaaaggcggtgaaaggatcccgggttgcagtacggttgtagtccagttaaatttcattattttcaactatacaacatgaacagataaccgtgtattttccaatatacttggattgagccccatgttaaacaatatgagcatatgatagactgcactaaaatgttgtgaaagaaaaactagttcgcaaattcttgttcttgctgaaaaagtatctgaactaattcacttccaccggaatatttcttgtattcatgtgtcaatttctggcatcgtagttgaagtgaataatccaggtataatgaatgtaagattatcatgttgtaggttcactatgttgctaagtggagaggcatcacttttatgacaagcagacaaggacttggtgttgggggaggaactgtaagatcagagattcatttcttgtttctacaaaagagcttgttgattgattcttggcttttgtttttctgcagccatatggatttgatgttggtcaatctgaaaggggatcagtccttaaaggacttgatcttggcgttgaaggcatgcgggtaggaggccaggtgagaccaatagttcctagatgaagtttcttcatttgtctaaataaagctgctttttcagctaagtttagatttcatgattcttttattttcatgatcttttaatagaagttggtagcaaagatcacttggaactgtactaatggtatcaatttgagtccccgatagagaaccttttcttcttcttcttataagcttatgtaactgttattctccagagattattgattgtgcctccagagctagcttatggaaagaaaggagttcaagaaattcctccaaatgctacaattgaggtaatcatacagcacatgttttgcattttcgtctcaatccttttgaccattctgccaaagtttccaatgggttcatgtcattcttcatgatcactgagatgcataagctttgaatctgcagttagatgtcgaactacttgccatcaaacagagcccgttcgggtaagtaatgggtgcttgaatctatgaaattgtctgcattgttttttagtttatatgctctttgtgacagtttactcaatttactattctgttatgcagatctgctgtaaaaattgttgaaggctaacgaaagtcaatgtgttattgctgttcgaaccgtcttatgtagtttctgtgaacgaaaatttaaatctcacaaatggtgttaaaaaagatttgactaaataaagtgggcgctttgttcctgagctagaaatttgtaacctgcataacataagactagtatgtttttttgttattgttacaattcctagctatttaagctcttcaaaaaaataaataaagaaagaaataaataatccttcaaaagctctatttctattcatatatatactagattaatacaggaatgtttaattttatattagattatatattttgctttttaaatgttataataaataatgttatatatatttttcacgtagtgattaaaatcacagatgattaccgatgcagcaatctacaactggcagcaacacttcctcaaatcaggatagtccatcgtctaatcaaaggacatgttttaccaaatcatgagcaacataattcttatcgcgagctacataggataaaactgttcctgaaaatttagacaataaaattattacatcctcaaacagcacccaattttattaaaaaaaatactcatcctttgttgatagctttagaagtccttgtatcttagcatgatcaagtgataaatatataaaatttattcactataaatacaatattatggaaatgaaataaacaactcaaccaaaaataaataattaaattataaaatgtttttatcaattaaaaaatttcataaaaaaaatatttacttttggaaataaaatcacacacgttaggagtgtaattaaaatattaattaatggtttttttttatatagaaaaattaatggtaaatttctttaaaaatatacacgtatttgaaaaattattgggctgctgcactactctgtacaaatgtatatctaaaatgatctgcagaagattatctgaggaattgcctcagttgattggccaaa

SEQ ID NO: 44052 - DNA, 2005 bp, Cannabis sativa
aggtgaagtttaagttttttttttatttttttttttttatttttttttttttaaactagcttataaacgtaactgatttctttgtgtcaaatttcagcttataactctagtgacaatttcgacatctaatttcgggaacttttttgtgacgacaacttttttagtgaatttttttgaaaactattccaatgacgatgataattccaacaacttttcttacgactatggttgttccggcaaaatttgttcttaaaaaatcttgttaaatttatttatgatactttgttggggttcttatttttttaatacttttttctttaaagttaccatattttgtagcttttttttttttttttttgacaaagcataagttttgtggacggtaaaaatataaactaataatttttttccccatatttttgtaaattcaccttttagagtaatgggctctcaggctctttaatggatcttcactaccttaggcgcacttaaaatgaagctcattccacagcatgattgagcccattaaaaatgggccttagagtctccactttaaacaagaaaaagttgaagttttctttcacgtttttttaaagaaaatttctaaatttactgtaaagaatattataagaatttctcaaaaaaaaaaaaaaaaaaacaggatgtaaactttagttattaaaaaatggctaattaggatttttgttcatgaactttaacatgtataaaataatacctcttaaatttttaaggctaattttagtaaggaaagtctaacatagatgaaagttcaagtgtttaatttggtacatgtcaaagttcgaggagtattattctgtagatatcaaagtttagagagcataaaagaaaatattaacggttaaaaaatttcagggatatagtttggtacatgtcaaagttcagggggcaaaaatcctaaaagaaaatatattgtaacaaatttgtaaatttttgtttaaaaaaaaagctatatttatattaatgtccctctgtatttttttatatatatatattttttgttcaagttccgtgtaagtttgaaacagttttaattaaaagttctccatataaacctaagaaaaaaaatgatgaaacgcatagaaataaaatatgatgagactgaaactcacaatttttgtaaagatgattacttggaagaggccattttgtctaaaaagaaaagtcttgggtcctttacttcctcttcggcctgtctagctacgtatgtgctcacatatcatcatcaaaaccctaaatataaatatgttttgcattctcaagcttttcaaagcttatattatttatatgcatctatggtttcaaatgttaacactcatagtcataccaaaaaaaaaaaaaaagaaagaaaagaaaagacttccttccccacatgaatttcttgtgatagtgagtaataatgcctgttttctaagccaattataaatggtacgcgtagtgcaccactaaaggagtattttggtatactttatctgtttcggcatacaggaaaactttttagtttaatttttttttttataatcatatacattatagttatttaagagtaactgtaaatttttagaaaattttaaatactttacaatgctgaaaataaaatttacatattttgttaaatacgcgactatttttcttatacgtgtagttaataattatttaaattttatttttggcactatgaactattcagaattttttgaaaatttacaagtagtcttaatagatacaatgtatgtaaaaaaaaaaaagactaattttttttctagataccgaaatatatagaaaatctagcactcgcattagatgatgtataagtgttttctttattttagagtagagaaaaaagagaatggataaaaaaagtgctacatccattgttctattataacgaactaaataaagaatgcaatagtaattctggtatgtagagatgtattattcattctctaaatatattttaatatta

SEQ ID NO: 44053 - DNA, 3503 bp, Cannabis sativa
  modified_base (1231)..(1240): a, c, t, g, unknown or other
  modified_base (3086)..(3092): a, c, t, g, unknown or other
  modified_base (3440)..(3457): a, c, t, g, unknown or other
ttttctaaaaggtgtaaataattttcatttaaactctacaaatcttgaaaattgaaaaagttggctctcattataatatgcacttattatcaaattgttggggtccttttcgttgtagccaaaagtatttttgtgaagatggcattacattgattgaatataatgaaaattttgagtcactatcaaatcaaccaaaagcataaataataccccatacaatatgacatcaatttctttcgacctctttttgtgcctatcttgacaataaatcaattcatttatctctaattttaagtgcaaagcttttactatactaaagccttgcccttccccaaattaaattacgtgagctttacaccctattatttataaactttaacgttagagagaatatcaaatcttgctactattaagtattaatgtcagcttcacgtaactgaagacaagtaaatagtaatcctatatatggttttacttacttctatgctttgttatggttattgaacaacacatgtatcaaattcataggttggctggccaccgacaaaagcacaggtaaattattaagagagttaaatgtgaaaacagatgaaccaaagatgaatatatttcagttttcaacattgtcatgtgacaccgatactgattcttgaaaggacaattatcttttaaaacaagccacgagaatgagagtcataatttgcaccaacaagaattgttttaagtttggttgcattttttggaatgcctatgattatttttccaattttattattctacttacattactcttcaccaattatacccttagtccaaattagtattgtaagtttgtgtgtgacgtgctcacataactcgtacttatctgtaccttaaaagtaggtcgtgtcatgccatgctacaaaaaaatatgggttgtgtcgtattgtaccaacatatttaaaaggtagacttggtacaactcgatattttcgtatcatgttctgattcgtatcgtgctttgctcgtgttgcctcgtatttcttaaacaagtcaatccgttttcatattctgacttaaattcgtattttattttttcatatttttttgacaatgactaaagtacacgtatcttttataattttagttatatttatataactttttaataatattttatagataatcatataaaaaaattattagcatcattaaaatttaaatatttacttataaatatttaaatttttannnnnnnnnntgtaaataaattaatatataatcttaattttcatattttaataattttaaatatagaattataatactcagtattatatttaagttttattattacttttacttatttataattgataaatgactatttaatggttacatttctttcgaattataatagcaagttactaatagataaaaattatttttttagaattaaattaattattttcttaaaataaataatttttaatttgaatatttaacaagtcccattttagcaattaatatacataaataattttatttttacatacaagtccctattatatttttcttaacagttaaattatttaattataatatttacaatatttttttttttacaaaaattaaacttccacatatatcttaatttagaagcagtggtgaagatgaataacttataatatttttcatctaaactaaattcacacatatcttaatcaagatgggtggaggcaggaggactatgaaaaactcatttctcattcaatatattttttttagaaaatacattcaatccatttcatattccatcacatgattttaaatgaatttttacttttaaatttttaaataaattaatataataattttaattttcaattaaagttatattatatgtgtaataaaattttaaatcacgaggtcttattataatttaaattataagatattttgctatagatattttaataatttaaacaaattacaaaaaaaaaattaattaatttaattttaaaatatagttgattttaattaaagtttaataaggaaataaagtatcaagttactattaggttacaagttatttattatttattttaattaaatttctgaatatatgacaaccataattattgttggaggaatttagacaacaccgaataaaatattgtaattaaaaagtaaacgagaatatgcgattactctactaagaacggtgagtattcaaactatggacacacaaacgtactggaaatgtaaataacacaaagggaatatgtggttcagtgagatcacggtatgctaagtccactgttgcaagaattttctgtcttgtctatttcatgttggatcactcctttatatacaaagcaagtgtcatttgattacacagagattaatttaattatcaatccatttttacattgaatatcaacatttaaatcaattaaaacgtaaatacaataaatgaagaacagtttcggcccaatttactaactacagcaacgtatgcaacctttgtggtgcgagttgtctgttcatattctcacataagctcccaagctcaagatgtgtacaagactaatcgagtctcacatgcataagatatatgtgtcctgttcgagtcgcatatacgaatatcttgtaaaaggtcgataacttaggacatacgagtccttatcgagttctcaaatatgttgggtccgaactagctcgttgagtaaagaatcgatctttactatctcgcaggaagacctttatagctattgcatatatctcggtatatgcgagtctttaaatccgatcttcgatcctgcatcgtgcgaggcatagtaatgcgactagactctgacagggtcacatcatcccgctgagtctggttcaggcgaggtttacatttaagaggtctccttctgacattttagccctcctcgaggagagtgagtccacgtgtcatttttatgggagcctggtctcgagttcctaggtggaaaattctcactataacacaaatagctaaaaataaatgtaaccatcatggttacacatttgatgtaaccattgaaacctcctccattcatatattattattattattnnnnnnnttattattattattattaaatcataaggttttttaatgtcttaatgtgcttttcaagcttgtcgcttgtcgtacctttccgactaatctatttatgcttacgtatcgtgccttttgtgcttctcatgtcgtttcgtgcttaagaatatatttttcgtgctattttaccaacttataacgttgtaccatgtcgtacacaaacccatattttttcgtgcctaatcgtgctcgtactagtgtcaaaaaactcaacccgtaattacaacactagtccaaacctactaacacttccagcacactactattaataattacaccagtggtaactactgttggaaattattttacnnnnnnnnnnnnnnnnnncacaagtatgttgtttaacaccctgaatatgaactttctaaaacga

SEQ ID NO: 44054 - DNA, 3193 bp, Cannabis sativa
ttcggttttgtgctcttaagagttggaacgaattatgccaacctaaaggcagtggggggttgggttttagaaaatttgaagacatgaatctagctctaattgcaaagctgttttggaaagttctccaacaagaggataagatttgggtcaggatcctgctgtgcaagtattgtaatctctcggatccttggatagtcgaaaggaagccgggggactcgagatgttggcaaggcctcttggaggctcgtagaatttgcattctgggtgcgggaattcttgttggaggaggaaactctgcgttgtgggataggccttgggtccctgggaagtccatggaggaaatcaaggagagttttacttataatcgtacacatgcctttgtaaaggtcggtgatctctttgaggaaggaacgacaacttggaacagggatcttattgaagcttgttttcagaagagcatagctgacgctatactcaatatcactcctctggatggagagaatgacactctgttttggaaggcagtgagatcgggtaatttttctgtcaaaagtgtgtattgggtgagccaatgccataggttcaaggacactctctgaatgtggttagtcttgtggaaatttaatacccatccccgtctcaagcttctgatgtggaagatttggtctcacgctttaccggttaaaggtcgccttggtttcttggggcatcaggagagacattgtgttttctgtggtaccatgcctgaaacagtggaacatttgttctaccagtgcagctttgctaggggattatggttcaaatgcatatggggtttaagggtggacaccatgggttggaattcaattactgactttggtgagtggtggtccaaaataaaagatgaagatatgcatctacttattgtttgtttgtgcgaagttctttggtactggaggaatagcatagtgtttaatggaaaggttccggatgtagaaactatgtctagagatatctcccagcctttcagggaaatgaaatctaggggggattcgaaagagtttctttcctcatatctggaaatcggcaaatgttgcaacatgcaaacttctgagttattgaccatggattttggtaacgaagtgttttttctgaggactgatgcttctgttgtcaacactgttgcgggtttggcagtggttgataagtgtggtgttgagattggacagctttggtgtgccactgatctagcttccgtctgcagtgtcctggagggggaacttcttgctatccagcttgctcttcgcacggctctgaacaggaaccttatgaggatagtgattttatctgattccatgtctgctgtttaggctctttcgtcctgtttcctgccttttgggtggagggcgtaccctacttttgcttgttgtatgaaagtttgtcgcagttttaagtctgtttccttcattcacattcctcggtctgagaatattttggccaatgcttggctggttgggctaggtgtgctaagtgtgtgtctgttggtcttttaagggatgtggccccctttgtggctactaatgttttgtagtttccttttctcttttgttcaataaagcacacatgattaccagaaaaaaaaaatataaaatataaggaaaaaataatgtgcaattttttttttttatgcatgatatatcattttatcctcaatatacataacacaataagtacattagtaaatataaattaatgtgaggagtaagaaaatacttgatttccaaatgagcagcacaataccagttgacggatagaattcagcaacagtggccacaaattgtattgaaaaccagtcaaaaaatatgagaaaaagctgacaataaaataatatagcatatatactcattcaagaataatgatccccaataagaaagataaacaaagaatagatgctccatcccctttaaaatatctaataagtagttactttcatcaaaataagcaaaaaattattggtgatgctgataacgtccgctccaaactgcgttaccaggtctaaattaaaacaaaataaaagtaattttttttatcaaaaaaaattgataaaataccattatcttggtataaataaaataaaaatagaatattggtaaagaaaaaattattggagaacttgctcgcttgaaggttacccaccaatttaaggatatggatatgctcgacaatctttacaggttatcgaccaatttaagaaatgttaaatagtattattattataataggtttgaaactcggttgctaatccataggagatgggatgcgttagggaaaataataattacatgcttactggtgtagtttgatgtagtttacaaaaagttaggtaagtataaaataaagggaaaatatattcgggattttttgcatgatatttcattttatctttcatatatgtaacacaataattacattcgaatatttagatcaatattagtagaaaaataatacctcgtttcgaatcaagtagaacattaccaaatgacgttgaaaattcaaatacggtggctacaaattatgctgaaaattgcattgaacattataagagtggctggtaaaaaaatgtgtaagtggttagtgcagaaagaataacaacgtatgtgcacacttagaggtgataataaatttttattatcatagtaaaatatcttagaattgaaattataattataataaatattcccttaatgatcgacagaaattattccggtaacaaaggtggctctcttataagtatattttatcaaataaaaatcaagctaaaaggagatacaaataattatctttgttataaaattatgaatattattaataatatttatagaaatattatctttgttatcaaattatgaaattattatatttcacagggagtacaatttataataaccaatcaattactaagaaaaatgatatataagatatatatatatatatatatatatatatttatagatagtattctacaatttgaaggttgaactgttgtttagtcccattattcgatatatttataaagtcgtcatttaggtatttgtgaattgtgactaacagtagtaatatataacacttagggctcgtttggaacgccgtattaggtcgtattgcattgtattgtattatattgaattgtattttatacaatatttttatgtaa

SEQ ID NO: 44055 - DNA, 2584 bp, Cannabis sativa
agaacttgcattataatgctaatccaaatacaaattaaaaaagaattatcattttttctttttagtagctccaccaaatttacgatcaaatcacaaagaaaaattaataacagaaattcgaaccagaataaattaatattaacacataatgcataattgaactctctttcatagtttctctcccctcatgaagagatttggaaaagctcataaaaaaattattagtcaccgaaaagaaaagaatacacaaaatgtcaataaaaactataataaacaagtcatatagagagaaatactactaaacttaaataaaaaaaatcacaaaaataaatgttaaaaaaaacgaaagacttatcccatatgaatttatgtcgatacaataactaatcaaagattatcaaagataatagtgggagaccttcacaccaccgcaaacaccaacaccagtggcaatcaaagctagccatccttttcatttctggaagaaacaaaaactgttgcaccaagcatgattgaacaaattatatgatgacgacgtggaaaaacaccaggatgaggataatggttgagagatgtgattaagaaggtcggaaaggtgcgactcgactcgaccaccaaattaacgtcaaggaggttgtgctactgagacggctgtccgactcgatgccgatcgaaaaaattatctctgaacattccatagctttcatggactgattggggctctgtggtcaatcacaatagaggtttgggtttgagagagaagattcgcaataattaagtacaaattataaattcagataagagtttatttttgctgaatattcgatctaattgaaattaagaatcataaattaaattggaataagattttcttttttttttcgccgaatattcgaataagtagttaaagtaacttgctgaatattcgatttaattgaaaataagaatcacaaatttaatgggaataagatttttttttttaattttttttgctaaatattcgaataagtagttaaagtaacgatgttcaactcttccactaaaaaaccagaataaaatgttaaaccaagaattgtcgttagatagacacttttaatatataaagatatagtattataaataaattattttttttttagaaaagactattatattaatctgaaaaaacaaattacataacagtcattagatgtggtggaaattcctctaaccaaatacaatctgaattcgttattagcagacctataaacatgagagatatgtgctcgtgggaaattggataacagaaatgtaatatcattaagtacagtataaaaagcagatagacccttagtttgagattttaaaccatttacaaccattaatgaatccgtctcaataaaatcaacagtgagtctgagggacaatagcaatttgagactccatgccactgctaaagcctccatttcctcagtcttgatacaacctttcataggtttaaccattgcagcaaggacttcaccattagagtcacgaagtatagcaaccagtccaaacacaccaatggagacattaacagctgcatcagtattcagcttgagtctgcccgaaggaggagcaagccatttaggcttagttggaggcaccaaagtatgttggacaaaggtgtgaggctgtgattctggaccagttgcagcagcaatattcagagatagtgaaccagtagcagcagttgcgtttcgattagctgctggggaacctatactgagggcagtgagatggtgtttagattgagctttcctgtattcagctagataattgctagcaaattgcaatatttgcaatgcagattttggagttttggagtgtgtctctgcattccttgctgtccatatgcaccagagaatagtaatgaaaagttcgaccttattagattgcaattgagaagatacataaaccagaaaatctgagaaggagaaagtctttgacaaatgccaattgattgttgaatcccaattcctccagacttgtttagccctgcaccagaaaaaagcatggtttatggtctccaaactcagctgacaaaggggacactgaggagatgttgatatgtggcgatgttgataaataaattcttcttaatcctttaaaataaaataaaataaatatctaatttgatttgaatttaaaatttaaattcaaaagtaaatatctaataattgattaacaaatatcagttaaatcttttattttattattattttttaattaaatatattatccaataatatattcaattcaataataaaaagataattaattaatttaatttaaagtattttaatcaataaaataatcaaataaaattaacatgaacctttatatgtcacactacacatgtgggccatattttaaggtctaaaagtaattttttaagtttaccataaataagatttattatttattctgccaataaataataattgattaactctcattactctcttatttaacaaagatcaaaataaatattattttctctaaaataatatatttctctttaatattaggaaaaaaaacaggaatattctaaaaagggaaaaat

SEQ ID NO: 44056 - DNA, 1453 bp, Cannabis sativa
aaagaaaatttatccaaaataataaaatttacagctaggtcggctgatgatagtaaatgggggtatgtgaacatctttaaaggagcagttattagactgacaagaaaagttggtttggtggttgtctcctgagatttttactctgtagttcttcagctcaaaaaccatacacaacacttcacatttaatgtcactcttggtagactcattcttttctgtttttgttcataaacaaagcccaacaacaccttacattctttggattttgccctttttattttctgttcttttttaaatgtcaagttcttctagctacattctaaaatggggtactctcaagattcaatttttactgcagtatacctatgctgctgttatactgatacatgtactattattacttaactcagttgaatcaaaggtcctcattcattttgctcaagctcctccaccaagatcaaggcactcctatgcagtttttagatactcttttgagagtttggatggttcaaatgcatgccacaacaatacatgttctgtatactgtcaggtactatgtgaaaatattaagatggttcttgacttaaaagcttctttatagttctactctacattaatgccatttaacaatgtaggaagtttttaaggcatttataatggcaatttgaaactatagacttggaaattcatacatgtagtaatgtatgtaaacagattgatgaccaagttttgagtccatgtccacataaattgttagtactcaagaatttaactgtgaaccatcaccataaatttcttctcaatgttacaacctggaatggcaagagaaactcatcagcttattcttggttcattggtgagaacttatctttattacagtttcattttcaaaaaccagtaaatgttctttaagtcttttactgataaagtcttttactttgttattgctgtttatatctggtagatacaatacggccaactgcaacaatttccagtaagcaagactataccaatgctaaaagagtagccattgatatcaaattcagtgaagcttgcatgggaaggggtggcttcaagtgtttgacctcatcaaactgtgatgtaattgcaatatttaaaaaaacttcatagcaaactcgatgctttagttaatacaatatgttctcttcttcttataggtcatactcaaagggccagcctctataaacccgaaatcattgcgaattattaagccagctattcattacaagcttgacatagttttctccacaacgagcatacttggacgagtggtagttagaatggcagagaatatttgtacagatcatgcagggaatagctttacaagaacaaatggttcctctataaccattcactttggtaagccttagcattcttcttaggactcatttgttaccctatgttttctcgaagaacatgtttggtaccttgt

SEQ ID NO: 44057 - DNA, 3701 bp, Cannabis sativa
aatatccagcaccttggatgttccttgaaatcagctaacttggccatctaaattaatgtatgtgtatagaacaatttttctatcatttttgtaattacacttataaatatatatattgtttcatttggtttgaacatatgaacatcaaagggaacctccctgaattattggccaaaccatgaaatgcggtaagggcttttgatcatatgtacattcaagttccatttctcaacacaagttggaatcatttttttcagttcaggaagcaaaggcctttatattcttcatgcaccctctgactaaaacggatcgagtggtaaacgttttgcgaattaaatttattaaatccaattcactcatcaaatgtaagaagctcatctctttccttctgaagatgcccagcaaccttcaactgattgaatatatcatataaaacttcataaatcttatacatctccgaatgtgatgtatctcctgcaataaattcatgaactctgttgttgatttcaatggaacttccaccgggcatcttcttaacacctgtatctctcatgaccttccttatcatcccagattcatcccagctaccagaagcagcatatatattagacaaaagagtataatttccactattctggggctccaacatcataagttgctgcaatgcatgctctccaagttcagcatcaccatgtatattggaagcagcaagaagagatccccatattgctgcattcgtttgaaatggcattcccttaacaagttcacatgcctcttgaagataaccagcccgccccagtaaatcagtcatgcacccatagtgctcaactttcaattgaattccatatcttgaggccatgttgctgaagaaccagcgccccatttcaactaacccagcgtggctacaagcagaaagaatggcaataaaagttacttcattaggcttaactagagcactttccatttgagaaaacattccaattgtttctcttccaagaccatgaagagctagcccagacatcattgttgtccaagttacgacacttctctgtttcatactttgaaaaacatctagtgcctttcttatgttgcctgactttgcatacatgtcaatgagtgcattattaagatgaagctttccagaaaatccacgcttctgcatatagttatggatcctctcccccaacactactgaacccaaatgagcacaagcagaaattacagccaagattgtaacttcatcaggctccatattctcaagctgcattcgtctaaacaccatgacagcctcttttggcctcttcatcttagcaaacccggcaatcaccgaagtccacgaaatcaaatctctctcaggcattcgtttaaagaccttccatgcattatcaacatcagccaccttaacataacctgtgaccatggcattccagagcgccacatctctcatgctcattccatcaaacactttccgggcatccaaaacacattcacaaaaagaatacatccgaacgagtgaagtacccacacaaacatccgagtccaacccagttcctataacttgacaatgaatctgacgaccgacgtcaactgcagagagccgaatcacagccttcaaaacgcagggaacagaataagtgtctggtcgcaaaccggtggcaaaaatgttgttgtagagggatatggcgagtgaaggagagagagcattgatcatggtgttgtaaagataaatgttgggtttcggtttcttgtgattgaaaaccatgtaggcgtaggtggaatggccgagagaagagcaagcttgaatgaagtgggcaaagattacattgtcgttttgaagagcagtgagaaccataaaggcgtgagcttgacgaatgtgcttcagggaagagcagtggctgagaaaggagaccaaacgaaggttcatttggcggttgagacagttggggcgatcagcttctttggccttgctctcgcattgagttggctttattacgaccttagctttagctatgcatggtcctctacgagggcgcacactcatcagttaatatttagtgggatgtttcgggttgtgatggtgcgcatttttcaccaatttattgaatcacaccacatatacctcaaaattgcacaaactacaggtgttcatctacactggacaaattgcccacactacatcataccctacaaaactttaacagtgtgtttggtagaaggggatttcggctatgtttggcacgaagaaagtagagtaagaataatggtgaatttatagaagatgaagaggatagttacccttccttatgtcgtttggtatttggactaaggaggatgggagatgaaattatttattaaacttgctataatatccttattagtgtataaacatttgtaatttttttgaaggataattttagtatttggtttgtatattttatcttttactccaatctttctaataattggatgattgaatttttaaaatttagagagagaaagtctctctccatctctcctctcccttcctttcttcctcttactaaataaggaattctttctctcctaacaactctctccctccacccatctgtcttcctaccaaacatagtgttaagaaagaatggagctttatgcagggagagcacaatctcacttgtttggtaacacaatgaagggaaaagagaaacaatttggaaggaagagaaatcaaccctaggccaccatttctaatcagttcgcctttagcagtggagagattagtagtgatctctgcctgaagggcagtaagctgagtactatcatccaaatttcttactcttgtagcagtcgtgctaaaacgacttaagtacaccttaagcgtctttccatgttgttgctttatgttggtgagtgaggacactttgggtcgcctatcctttgcggcctggaactattttttgaagtccttagacagttgttccctagaagtgatggaatgatgagtaaatttattgaaccagctgcttgctgctccaactagtgaggtgggaaacaaaatacaacgtagattgtttgtaacattgctagctcgcattatggtgttgaaattattcaactgcgagatcggatcagtggtcccatcatatgacgagacgtgggggtttttaaatccctggggaaaaggagtattcatgatatctagatgatatggttcgagttcttcatctgagtcatatccagattattttccttgctccccgacttgatacctcctgaacatatcctccaactcatttattcgaaattggattggatccccttgctttggaccgagttgttggcgaagatcaggttttttctggttcaagtgttctcgcagatgttgttggttataattgctagtggacctcattctactcacggactgtgtcctacttatggacctcgtctagctcgtggacctcgtccttgagtgacttacagtcttactactcgtgcctgtgctttctcgatcattattgcgacgagtactttctcctcctcgcgttgattggttgtgggttctcgtgcgcctcgaggtaacactcgcctcttcacgccccgttcttctcccttgggtgtggttcgttgtatgccccctactggggtttgtacgtgtcccttccctattggtttcggaagaacgttggcggtgcctcgttggtgacccacgtgtcccaggt

SEQ ID NO: 44058 - DNA, 1059 bp, Cannabis sativa
caatagaaacatcaaggtgagatttattttcctctgacaaagaagaaatgaataattgagtttggttgcctctgcatcttttgagagtttgcctcagattttgaccatccgattgccttctggtaaaacgatttggtgacatattctcctcattccctggctgatcagtaccagaagtcacaattggttgcgtactgtttagcattttagaaggtattggggtatgtatttggttaagtttaactgtatggtatgagttggtatttggggggtaagttgcaaaagcaataggagcattatgaatgacagaaaatggagtaaagacccctgacagatcagtgatgatctcactggtttgaggcttactgatttgaggctgaggctttgttggagactttgctggtggacgattcagtgctggagactttgctggtgtaggatcgagcaaaggagtgacaggaacatttgcagcattggtgaaattagcaacagaaaaggcttgagttgaaatagcattgggcaaaagtggtcctcgggcagaagcattggagaaaatatggcctgtatcagtgatgtgattactatttggagaattgttgtgatggtcaggttcttcactatcatgggaggactctcctcgggtcagttgtctaggaaatggtatagcaccattctttaaacttggaattgcagaaacaagggagttttttgctaggtgagtgagcaatggccatgcatttccttttggaaagtctgtacggtaccgatcgtaacttgaaagtggtaaaggggatcctttcattgtaggcttgtattctagatctggttcaatcccattgtccagcttttcaagatatattagacacttatcaaatggatgtcccaactggccacactccatacaatattcgggtaatcgttcataacgaaattcaacccaaaatttttcttctacttgctgcagggtgatcattcttcctctcaataatggttttgttgtgtcaattttaattctaacacgcaagaaaggccccacccctcatttagtgaatcctcata

SEQ ID NO: 44059 - DNA, 2907 bp, Cannabis sativa
  modified_base (2126)..(2134): a, c, t, g, unknown or other
aaattaatcacaaccatttaatgctgatccaatggctaaaaaaaacgtaaccatgatggttacaataaaaatgtaaccattagaacctcctccatatatatatatatttatatatttttgcccatatatcttaaaggctgctttgttcgctttggagagggccttgcagaacaagtggatggaggactctattttgtctgattcagaagagaagttgtgctccgaattggtttcttttgaatgtttgtttcaattattagtacaattaattaagatttatatgatttcaattgtattaatttgtatttattttataaatttattattaatacaattaattaagatttatatggtttcaatgctatacataaattttatgtatagtgctacaaatatttaaaaatattcaaatatttagatatgttgaatattttatttatgtcattaagtttcataaaatttcgtaaaatattcataaaatattccgaaaatgaataaaatataaataaaacataaataattttgtggtttgatataaaaaaaaaatatgaaactgtaacaaatactcatatctagaattgtttttaatgatctttcgacgatcacactcggagcagtattgtctattatattaataacgaaattacttttagatagatcccaatacctaatatttaaataaaaatataattttaaacaattagagagtagctccaacatttttaattatataaatttgaatctcataattttcactctaataatgataaatttcataaaataattttagttaattattaactaatttaggaattcaacatataagtataacaaatttaatgcaactatgaattataaaatgagttgtacgaacttttttttttggaagaacgccatgttcattagaaagaaaaataaatggaaatcacaggttaaattcccctctccttgataggaaccaacaaactggcaagacaatctagtcttttttgctaaactcggcacagaattagacttacgattaataaagaaaaaaagaataataccgaaacttcttaattaaatctaaaaccatcaaggaaacgttcaaaagagaccgattcggagcacaacttctcttctgaatcagacaaaatagagtccatccacttgttctgcaaggccctctccaaagcgaacaaaccagcctttaattctgcttccaagattgaagcaggagaagaatttgttaaacaacaacccacgagtccttaggaggagtgatcataacagatgcagctcccataatcccctcgctccaagaggcatcaatgaacaatgctatttttgaacttaatctgctcaattcaaggccagaagtaggatccaaatttctgcctgcaccagaaaggaagagattgaccatctcctcaaaagaattatgcatctttctcaacataattcccacattaatctcatccccaaagatattcactctattcttcgcagaccaaactttagagaaaatacattccatggagataatgtcttttattatgcaattattaggagcataggaaagcaagttttctacaaattgaattaaagaggatgctggtatggattcgctcagaatcggtaattccccaaaaaaacacaaagccttgtccacactgcagtctttgaacatggtatggtggtgtgtatgtgatttttttcaattaaaaaaaaaaaaaaacgactgctttataaaaaaaattgttcagaaaaacaacaggaaagagagttgctttaaatatatggtgtgtatgtatacattgatggacttgtttttttttttgcggtataagtgcctaagtttaactcttagttgcaaataaatacttaatttaatttttagcggtaataatacctaagttatatttctggaactctgtagatacctaaccattaaatgttaagtcattatccacgtatcatttttttattggtatatttaaactatattttttaaaaaaaaaattaatgacttaaaccaatcagggattgccacatggcaatttacttaacacttaacatccgcgtacttacaaaacttctagaattataacttaagtattatcactgccaaaaattaaacttaagtnnnnnnnnncaactgagagttaaacttatatatttctgccgcaaattactcttgttgttttcattttttttttgttattgaaaaataaatatatttaaaaaaaaaaaacacatgtctaattttaaaaatgaaaaaaaatatatatattagaatgtgtcatagaaatcatattatttaatcataagaatatgttagcaggtgcaatttacgacatttgactaaactgaaatttgtgtataaataaaaaaaagtatatgatctgacttgtaaagatagtagcattaaaaagagcttcaaaagtagatttaatcttctacatgaagttgtctagcatagataaaattgttcttaaaaatataaaagagttgtaagtttctattttgaagggaaatcccttgtgggtaattggctcggtttgattaataaaaattatctttctacataaaaaaaaaaaattaatcaagtaaattaatttaaaagataattatggtaaaactatatatctaaacaaattagtagcaaaaatacttaagtaatcagttttattatatatagttaactattagtataaaaaaaattgatagcaaaatttgtaagtaaaattattttttaaaaataaataactatataaaaataattcaaattaactttaaataataataataataatttaattaaaaattaataattttttttaattaataatattattttattcttttaaaataaatatataagggtgcactcttaatgggtattacccatgaatgggtaaaattaga

SEQ ID NO: 44060 - DNA, 1053 bp, Cannabis sativa
  modified_base (747)..(763): a, c, t, g, unknown or other
gcacttgtaggtgacattgcaaagagcaattggcctatagtcattgacgctcatggggcaatctttttttggtaccaaaataatgtttgtgttattaatgaattgtgggagatccttatgtaagaaaaaataagctaccatctctaggaaatcactcttgatcgatcgtttgccaatgctggagataaaaccctgttggcatcccgtccggtcccggcgctttgccatggcccatggatcttaaacagtcttcaatttctttctcgtgtggaatgacaataagcttcatgttgtcgcagtcggtgatctgaacattgtgtaccaggccgaattctggaacactagtagtggggtttctggagaaggtatttctgaacttagagataaacatttcagcaatttcactcattttactgacccattccccattatccgcttttagtgtttggatgaaattcttcctgcgtcttatcaccgttgatgccataaaaaactttgtgcatttatccccgtcttttagccaggccacccgagatttctgtttccaaaaagtttcctccctcaggagggcttcattgaggtttgtacgagctactcctagagcttctgcctgtatctggtcattcatttcaatcctatttaaggcatttctggcttctataacctgctgtgcaatattcctgaaatgcaatcttatttgatatattactgtctcatatcaaataagattgcaattttggacccctnnnnnnnnnnnnnnnnnctgccctgccctccaactcaaataattgtttttgtctttattaaccaagtactatcaccacaagcacctacactatactacacttcaccaatatttaaaaagcacaaaaagcttgtgtactaatatcatcaccatatatatacttaatagaatatatatacacatatcatacttatgaaacatttcaaatacatagtttcccttgttatataagatcaatcaataatccatacactatttaccatatgtatctattgttatattatttataataatataatatatagatt

SEQ ID NO: 44061 - DNA, 1808 bp, Cannabis sativa
tttgtattattcttttttaatttcgaaaagaatcattttgaacagaaagtaaactaaagtgaaaattcacacgtgcaccatccctaataattagtgcttaccttcaaataatttcataccatgaaaagtaaaacacgcattaatttttaataaattattattttcaggtggaagactacccatgacatggtacccccaatcatacgtcgaaaaagtcccaatggataacatgaacatgcgacccgacccgaccactggctatccgggtcggacttatcgtttctacacgggtgaaaccatctatgctttcggggatggactaagctacacccaattccaccaccatttagtcaatgcaccaaagctggtcaacattcctttatcagagggtcacgcgtgtcgctcatctagatgcacctcactagacctcgatgattcttcttacaactgcgaaaatctcgcctttgacatcaatttaagggtcaaaaacatgggaaagaggagtgggttccaaacggtattcttgtactcaagcccaccttcgatccataactctcctaacaagcacttattgggctttgagaaggtttttgtacaggcccaatcagagtcggcagtgaaattcagtgttaatgtgtgcaaggacttgagcttggtagatgaagttgggactagaaaagttgctttagggcatcatttgcttcacattggggacttgaaacactcattgagtttgagggtttgaaaaaacaaaagcaaaaatggaaatagggggtttcaattagtttggtcccttgttttttattcttcttttatttgggggaaaactatatatatttattactcccctttggtgtcaacttttctagaggggaaaacaattgaattcaagttgaaagagctataaataagttgagagaattgtctagattatctcaatgatatttgatgtagccaattgtaattgttcaaaatcaaaagattttgaaattttaatgaagactagaaaaatttatgttttggcttgtgtatcttgttgtagttttgatgatggtagctctctatttattccaatttatgctgtgtagctagaaaaaaaaaagacgattaatcaaatattttctacacaattacgagtcaaatagctctactctaaattgaaatatgttgattcattaatttgtactattataatatagggtattgaaaattattaggtataccaaagagtaatactcaaatgtgttgctatttttttttagtgtagcgtaatagtaatttacaattaattaatagtttgtagcttaaagatcttaaatttaaactcatgacctcttccttttttctattactccctcacctctaagctagccttagtgaatttcaaatgtgttgctataataatttgagcaataactctatcactactaataaaacatattttaatttaatatttatgattttcaaacaaaaaaatccaataattataagaaatcattagctatggctaattaagactgcattgtgttgaacactttaatatacctaataaaaatattagacaattagagaaaacacacaattttattgattatgtagaacatagttatatattatagggtaattttatacactaaactctctgatttttttttttttttttggaatacctccttaagtttacttttatttataaatttgaaataccagttaagtttcacagttaaatgtcaactaaattaccattgtgtataccaatttttgaaagtgcggataatagtttattgaatcttggatcaatagcctat

SEQ ID NO: 44062 - DNA, 1460 bp, Cannabis sativa
gggggtaaatatcctatttattctttttaataaacctgttggttagcaacagattgcacaattaatataaaatcacgataacaaatttaatctaatagggtcttacaacacttttgtttaattttttaataataattcaatgacaatcattttaacactaatgttttaatttaattgacatgttgcaaagaaaatcaataatataggtggtgtagcagctactactcctactagctcacaacgctcagcctccgtctttgccacccactctagtactactccgacatcttcatcctcttctacaccaagagtgttattttggactttgtttgttatttgtttttggactttattagaccatttagtttgatttaacatttattgtttagttttggactttgatagtttgattatatgtaaattgttggactatggactatatgaactttggactttgattttttgaactatgaatttcagtttgttgtaattggactatatggattaacttttcgtaaaacttttaaattaaatatacacattaatttgttttgttgtttagagttaaaactctacctaaggacttaaaaggtagaagtagtatggataatttattttattttataattttttttgacatagtgattagaatcccttatgaatttacaatgcagacatccacaaccagtgcaggaacctccttgaactaggatatctcatcgtctaaccgaagggcatgctttgtcaaaccatgaactgctaaagtcagcaagcaataagggacaaaactgcccccaaaaattgagatagtataccccaagagctagacctttaattgaatagtacacgccaactcaataacatttcaagaatattctcaaaacatctacaaaaaaaataagataaaaatgaattaatcctctaacgatcatattaaaacctaaaaaataaattctcaatagttagaagataataactcctaaataaataaggtttaaataaacttatcaacaaaaattctataatagttgaccttcctcaaaattgacctacagattaataatattttattttataatttagatgttataaagattgtattgtaagatgccaaaatatcaagactttttaaagaaaaagaagctgctaattttggatactttacttaaaagaattttaaaaaatgatatttttttgaaaaaaagaaaacctgacccgacccatctgaacccgtactcccaactagatgggaacttttcgaaaactcaaaatctgcacccgaaaaattcgaaaacagtgcccaccctatgtgtagccctaataaaaaactataagatgcatttaggggaaaaaaagacgacattgtaagatgcacatcttggtaggggtgcacaaaatatgggtcaaaccattcaacccagtcaatgttgggttttatgccctaaataaacctcatttca

SEQ ID NO: 44063 - DNA, 2401 bp, Cannabis sativa
aaaattttgagtacttgcaattctaagtaagtactcacataactgttggtgattgttcttaatttgctcaaatactcgcattatttaatgttgtctaaattcttccgataacactaatattaaattttattttttattattaaattaaaattgtttttaataaacttataatatattagtaaaaatattgtatacttatttagttttatactgtaccaaacataatataatactaagaaaattaagtttaactttagcaaaaaattaaattaaattcaatctcctccaattcaatcatatctaatatatttcaagcgagtccaattatatgcaaaaatcgaggcctaatagtggctggctacagcctcttaagatccatattcaaattaaaggcaccaactaatttcttccacgatttttcatgaaaaacaaaatttcaaacttcaaatctcattaaaaacaaaagaggaagttatggatgcgaaagtctttatagaaaagacatggctggaatagtcaaattagtgatataaggcatggaaaaaggacttattaatctgtaattttgtattatcaattatcatccaattttctagtttgaccaatttcatacgaaagcaatcaacaggactagtggaacagtcaaaggtttcgtatttctacattctactaccccaaaatgtggcaccaaattaatgcatattctcattttacacgtttcatggtctctggaaaaagacacagatcaggtcaaatatataagatggtgtaccattgcttatttggctaaattatgtgcaatggtattgctttaattgcttgatctctcacaatgatttaaaccaaaactttcaccctatttatttttcaaaacatcatctaaaacaaagccaaaatgggcaactacagaatatttatttttcgaagcttcacatattggggtgaacctaaaataaagttgaagaggaaccattacatatttatattatgtcaagactttaaaattttaataaaattataacattagatataataaaatatatttaagtatattaaagtgattttaatgaaattttatattttcaccttacactttgttgctatataatttaattcccatcaataatattttaattttttttttgttaaacaaaaaaaattgaaggtgtagagtgttaaacttgtgtgatctccttaaattttaaagaaatatttactgctatatcaaacaatcttaattaatattatttgacttagaaaagtatttgtataaatgctcaaaaaataatttagacctaaatactaaatagatagaaattgggtgggtaatgagcgaagaatgcacctcccattcatgtcctcgctccctatttatgtccctcatccctgcacctgcctcgcttaatctctaatgagttttggattggaaaattcctattggatatggaaactcttgtgtatccataaagattataaaaatgatagtaataaaataacacaatgtaattcaaaatgaaaataaaaagagttttcgaatttgaaataatcattctatctaatttgtactttatattctttataaattgtaaagatcatataagctagaaacataatcaactaaatatgttgatgttaaatttgtaagtacgtactaacaaattaaataagatattgacaatcgaaattgataagtagaacattaattattataacagtaatatgaagatagttgacaatcatcaactttgtacccaataatttaatatgattatacgaataaatatttagaaaattatttggaatttatgtattgggattgggtatggggtgagtagtattacctctgatcccgccccaaaattgcttcgggtatataaaattatcccttacccctaccccataacccaccaaagtgggtatttctcgcccaattcggggtggatgcccatccccgcagatcaaaattctatctcctaatcactccaactaggctacacttagcttcactcctattggcataaccaatatactatcagtttccatcacgtcattgcaactccaataataaatactaaatttagtgttaaatcaacacaaaaataatagaattctaacactaaatcgaattctattccaatcacaatactaaaaattacactaaaactatattatttattattatattattttattaaattataaataaacacaaataatgatacatacacaaaaagtttaattataaatatgttatttaaatattaaaaattaataaaaaagatttggtgtagtcaggctcggccctagacataggcgggctaggcccgtgcctaggcataggcgggctaggcccgtgcctagggcccactctttttaagggcccatttgaaattttaagatc

SEQ ID NO: 44064 - DNA, 3009 bp, Cannabis sativa
  modified_base (2941)..(2955): a, c, t, g, unknown or other
ataagtgagattaagcttatttttgtcttaaaataaaaatcatgtctagttttatttaatatgtttttttttttctggaatttttatttttatttttatttttattcgtttgttcaattcttagaaaagatctattttcactttaactaagcaaaattagaagattgagatatcgattttccaaaaacccaaagattatcgaccaaacccttgaatttgataagtttactctttgccagtgatttagatcacacatcggagtttgttttgattgccatgcatgtacacgactaattattcatgttattcttttggtactatgtgcaaagaaaatataagaactatgcttcttacaattttaagatgtaagggagaaccaaaaagaaaaaaaaaaacagaaaatagaatataaagatctatagctatattttacattacattctaacattggtatcgtaattaaaaaccactcaaaagaaccacttatgaggacaagcgatgaaagagagtgccggaaataggaaacattaaaaactctcacgtcgctactcctctcatcgcctcattttgaatttcatgattcttacacttcaagatttatgactatttttggtaagtttaattattttctaaattatatcatttctaattttattcataaaagatttttatatatatataaatattgaaaataacattttcagtgtaacttctaattaaaggagaaaaaaaaaagaataaggtaatatttaagccatagttatgtatttgttttatatatgacttattgatgtatttataaggaactatagcatgatatgtaatatttatcataaataactaaatcaccgcattaaaaaacatctctaatttatttgcttagaattaagtaaagtaaaaccatatccagacagatgtgatgttgaacaaagtcatctcaatattaattaatacattaaatctcaataacactatttgccatctccagtaattgcatccttgagcttctggccagtctccttggccttgtctacggcggattcagccgcgtctttgagactttccttagcactctcgacgttctcggccagtttctcacctccttcttttgccttttccttcgctgactcggctgctcccatgatgttctcctttgcagcctccgcattctctccagctctagctgatacttctttggccttgtcacccagtgaagccgctgctccctcagccttctttttagtctcatcagcataccctttcgcactgtctgaaagatcttgtgctgtctctttggtcttttttatgtcttcctctgctcttttagtgatatcgtccgtgttgaaaccggcgtcttgcttggccgaggcaaagacttttccagacctcgaaccccttgactcttctgccgcatttcgaccctaaaaatttagatgaaagatagtttaaacaaaagacatgtatacaaacacacacacacacacacatgtatatatagacaactattcagaattttaatttaccttggagtatcttgatgaagaggtgtagcaaaccctagatacttttagagtagctagtgatggtttgaaggcaggagcttgtggtaaagctgttgagaggttgaggaagatgtttttggtgagaaacttggttgccattgttgttgatagggttttggatgaggaggagagattacagggtttctttttctttgttcggtttgtaataatcaattctttattttctgcctaggcttatacttatagcgagtttgatcgaagaaagatggcaaattaatttggttacacgtgtatagatgactacacgtgtcgagatctttattgatcgttttattggtggatggtgtagctagtcaacacatgtcagagcttttctatagtgttaatcagtttagccttcaattttttgcaatgactttacttggatatgaagataatattcataaacaaatataactgggagattcatgtaaattaagttaaattaattaataaattgataaccccatggcgtttgtagaatattctaaatgctacttacactattttgatatataaatattaccttgcactcttatacaaatttaaatttttatgtggacccaaattaatacactaaatttaagtgtatcaatattagtagaattgattaattttccttaaaatctaatattactcctttcatttgaatagacctttctctttctttctcccttttctctctctggttctcagactacgaacacccaatcgactcactcgacccaccacctacgtctcttttgctccaaaccagcttctccgactagtgggttttcaatgtcgccaaggtaatatttcgttcctttcgtgtgttttataatgtattcaatgtttttattaatgatttagggttaaaaatatattacattattgattgatttattaatatttaggattaacctctatgatatgtgagttttgggctaaatttaaggttggattggttgttttcagagttttgggcaaaagtatgattttaagccaggccctatgcattctactgttaaaaagtgatataagttgaagacgtaggtccgatatatagggcccgatttagtgtcagatggtctttttgatattcatatttttatgttagtcacgataggaccgatgtatggtccaatatagtgtctgatgatccatccaattttcatgtttttgtggtagggtttagggtttagggttcaatgtagtgtctgatatgatgtctgattttgttttgtgctaggcttgatgagaccgatgtagtgtccgatgtagtctaattttttttttaatgttaattaggcctaaaaggactaatttggggaccgttgtttggtctgatagaggtccgttgtcgagcacatttcacaacaccaaaaatgaataataannnnnnnnnnnnnnntaataataataataagaataatatgatgaacaagtgcgagtattcaatctagaa

SEQ ID NO: 44065 - DNA, 1768 bp, Cannabis sativa
ttttcttatgtcgaccgcctcactatttctggtacaggtactttcgacggtcgaggtcaaactgcttggggtaaaaaatgtgattggaatgagttttgtggtaaccttcccattgtaagaatattctccatacaccatttcaaatgccttcacatgtatacaaacttttttttttttgttttttaatatttgcaattatataataaacagaatttacggttcaactttgtgaccaactccgtaatccaagatgttacaagcaaagacagcaaacagtttcacgttaaccttattggctgcaagaacatgaccttccagtacttccacgttctcgcgcccgaaaagagcctcaacaccgacggaatccacattggaaaatcgacagacatcaagattgtcaacaccacaatcgaaactggtgatgactgcatttctattggggatggaagcaagcaaattacaatcactaatgtcacttgtggaccgggccacggtatcagcatcggtagtctaggaaagtacaaagatgaggagcccgtcaagggtgtttacgtgaagagttgcactttaaagaacacacagaatggagttcggataaagacttggcctgactcaaaacctggagcagcttcagacatgcatttcgaggacataacgatggagaacgtaggcaacccggtgttaattgaccaagagtattgcccctttaacggctgcaagagcaagcttccttctaatgttaagattagtaatgtaagctttaagaggataaggggaacttcttctacaccattagctataaaactggtgtgcagtggtgggatgccctgccaaaacgtcgtcgtttcagacattaatttgaagtacaacggtagtcaagggtcaatgtcttccgagtgcaaaaatgtgaagcctgtcgtgagcggaacactgaacccaccagtttgctctattagccattagttaaataattttaaataattacttttagcgtaaatgaagccccatatatgtaaaatatacatgtaaaggtggcgatatatgtaaggttttgactatatttgttacaatatattatctataaatttaatttttcttttctccatctatatatattaacagtaacaacttattagctaaaatttagttagaaaatcagttgaaaaaagctaaaaataaaaatcttaagaaaaattaagagcacttactcattaatgaactaaaatactgttaaaattaatattagacctctcttaacaaatggtaattttctaacccatttacaagtatttaaatgggtcttttaaacttaagctcttatggcactgaaatatagcttgtcctaaaagtaaggggaaaaagttcaaatgctaccatgatggtcagcgtgttagaggggtggtggaggagtgttggtcggatgtcgacttttattacctcaagtgagataaatggtgtctccaaaacttttacttatcatacctattgtacacttctcaagggtagtaattataatggctgaatacttagaatatagattagtaaacaattagcatcaattaataatattatgtgatgggccttattttcaagaaatagacagttgaattataatttcttaattcttaaatattttttaaatactagttgtattatatttgataaacatgaattttgatatttttatgatttatgcgtagtaacgctagaattgggacgtgttattgttacgaaaaatataaacaatacgcaagtgcacgtaatcaag

SEQ ID NO: 44066 - DNA, 3350 bp, Cannabis sativa
aggatgtgaacttagttgagagaacatgcacatacgacatgttccaactgttgaaaattccttgtccccatgaatgtcccgcgatgcttactcagaatgcagtttgtataccctgtcctccccctattacacaaaagagacgtggaagaatacttacaatgcaacaattaatcttgtcggcaaggaggatgaatgggtacttccagaacacatgcagaacatgagagtcggggtaccagtggagaagaaatttgtaggtcgtctaagaaagatcaatgcaggaagaatacagagtaaccgatatccatctaacagtcaaaaagtgaaagacctcgccattgatcaaactgtggcaccttgggacacaacaaagctacatgcaaggccagggtttgagcatcatttttgtattttaattgcatgcattattagtatagtttatgaaatctatattgtagttttgttgatatatatcgatgcctttatcgacataaaaacaacaagagtaataattttgtctctgtgtttgtttaacgacatttttcgatatatttcgatgattatcgacatagcaatatcaagaataaattttttttgtctgtgtatgttttaacgatattttttgatatatatcaatgactttatcgacatggcaacacaaagaataataattttgtttttgtgtatgtttaacgacattttctcgatatatatcgatgaccttatcgacatggcaacaacaacaataacaattttttagatttttataagggttatatttcacgacaatttgcgatatgtagcaacgtaaaatgcgacatagtggagcatgatgattctgaaaactattgatatattgcaacatttaacgattacagttacgaaattttgcgatttcagataacaaattaaacgtaagtaaagacaaaaaaaaaaaaaccattaaaattgaccactaaataatcataacataacaaattaaaattctttgccgtgtggatgagacttgcaatacttgcataaagatccagtcttcaccggtttaccattaaaatatcctaatctgcaacgacgacacccttcggggaaccttggtggttgagctggccatacatttgttttgtaaaattcttgttgaagttgtaggtacctccactcattcaccagctgttcattttcaaaacgtttgtagtcgtctagatatttttgcatttgaggagtaatttcgcgacaaggctccttcttgatctctttaagagttagaagttcatgtttgttctttctagtagacatttagaacttataagagaagaacactctagggttaaagaataagaaaaaatatgtaacttttgaagtacaaatttgcttttatagaccaaaatatttgttgggaaggtgggataataaacgtcaaaaattaaatagcaaataactaatgaatttttgcaacaattagcgacgtgtagcaaaaataagaagtatcttttcgcgatatttcaccatatttagcgacattgttattgacatatataagttgttcgatgggcaggataataaatgtcaaaaattaattaccattaaatgtcgaattgtacacatgtttgacatgcaatgtgcaatcagggataattcgcggcatttaacgacgtttacaaacattgttatcgacctataaaagttttttgataggcaggataataaatgttaaaaattaattaccattaaatgttgaattgtacacgtgttcgacatgcagtgtgaaatcagggataattcacgacatttaatgacatttggcgatatattatgcaattaagtactacaatagaaacacgatttgtttgtgacatcttcgtgatgttgtcacgacctttatatcgacgcatgtcgaatttgttatgtcgattttttcttgatattttctcgacatgttatcgatcaaaacacatttaatgaaattgaaatgtaaaatacagttttgacatatataaacaataacttgcgatgtataacgatggctgtacaattttaattatagagttaacaaaatacaaaaaaaaaaccctctaaaattttaataatttaccaagtcaggttttggtaaaataagtctacacaccaccgttctctgaacatcctcatgttatcatcattaattttctccaattttcgattcatcatgaggtgtttgatgtattcaatggcatataccctgcaatcaccactgaaaaataaaaaaacaatacatttagagaataaaaaaaattagtgataaggaaaatattaatatactatgttaatgaatattaccttcctttactttgggtaatcacctcagtttgcatgcgtttagcatgcattgctctcaatgggctactctctccttaatctacattgagaatgtaactgttgagattgtaatagctagttgtccttagcagatgtggaaatagttgagtccaaggtagcataatggcttgaaaattgcgtcgggggtacatgagatatcattatcttacacccaaatctgccaatactcaatgtctacctcaacaaccacccaatgtttttgtctttcgaagtgcaggacgaagtataagtagaattgaccctcccaacatggtaggtaacgactctccatacccttgtagtactccttcactgtttctggccattggaagatacttttgtcaccctagtgacacccccaaatccttgtgaggaattgtgggaatgttgtgtcaaaaaccacacatggctgagggtaagattctggaaaatgaaagcgtctcctcctgaacatgtgtgatatagcatctatatgctgcatgaaaataagaggaaaaatcatcaaatcaaatacatgacattgcaatcggcattgcgatatgtcgcgatttgtcgcaaattatatcacatttcatcgtaacataaatcgtgaattaagtcgcgaaaccatcgcgaaaatgtttataataaagcaaaccatgtttgttgcgacagtgtcgcaacatgtcaataaaaaaaaaacagagaacaaaaatagaaaaaaaaattataaaagaatacaataattaaatacttacatcatcgtccaaccaatcccccatcggcaaccattttgtgaagaactttacatccccttggccagtgcacattcctaggtcgggtattgtgaatatctccaatcaaccacctcttaaacgtacgtagcaatctacggtttgctggtctttccatatctacgttttttggaagaagtcgcctcttttttttttccttagtgtagtccttcaagtacgtaggcagcttttgttgggttttgtgccctaaataaaacccattac

SEQ ID NO: 44067 - DNA, 2790 bp, Cannabis sativa
gagtttccatgtcctctatctccatttcttcgaggacctctgtgaataaaatgttgattgagcttctagtttctactaacatttgttttgttctgacatgggcgacatccagcgtgattatcaaggcatcatcatgaggatttcttagttttgtggtttctcttttccaaaaggtaattatcacatccggactgtcattgtcgatgatagtcactggtcgaataaaatgaatgagtagacaagacccttataaatagtctgcttaaattagttcctccagagataacattcctagttttcttaatttatggcggaaaggtgtgactctgacttctcccctgttgagcatgcatagtttggctcgaagttaggttgtcttaaaaaatcctacctttaccagtttattaacctctttttttcagttgtctccattcgtatattgtgtgttcgtgttccccattgaaagcacagtatcatcccttatctcttttcattggatatgttgtcatctttgggagccatctcatttccttcatttctcttaagcgtcgaatgagttctgacaaggttatggtcattggcagtatctcctcctccactcgctttccaccctgtggtcgtccttgagttgtatcgttagttgcagcaacccttactattcctctatcgccaaactgaatagtgttgttctttcgaggtaggcaagttattagtggcctttctttgattttgtaatgaagagagtcttctaggattgaatttccccttagtacctctttcgtttggcaattctcttcgacctctaaagtcacatatccccatgccatggtgagtgctcgtgttaaggtcaactcaagttctagtgttctactatcaaagccttttcaattaagatccatggactagaccctgctagagggcctttgtggctactgatctaaacatttcaatatattatcataatctttgttgaacctagttataaatttctctaatagttcgtctggcaaattaggtacgtgtctagcttctctaatgtgacgcttattacaatgttgctttggaatttaaagatcgagtattgatatgtgttgattaagcctggaggcaaattatggaaccatcacaacactagacccctcaattctcgagtgaatatattacatttgaatgcttctaagtcttccaaagggatcaaggttattaacatcttctgcttaaactagcatatatattcaaagggaacaacaataccattgtactcacgaatttttggggccacgtaaatgaggttgtgcttccactcaaagaatatgaatactggagggtgaattcatggtcctttctattctagccaattcatagtttatctgtagttcatcttttgcttccaatgctaggagcttgttccatatcatttcatcttatttgaatctttgggttgaggataagtactgtttggtgtgatctgtacagttgtgcatctttaggatgtagtcatcaatgcctcttgctcaacactggtctccacatcaaaatggtttttttgcacatgttcttctgcgcgttgctcttctctagtgtggttgttttctcaccgtattgatccatttgttgccgattattcccattttggttttcgatagtgcattctcccgtaccttttggtggtcagtcctatcttcagacagcggagggcagtctacccttctaggattaccttcgtcaggtggttttcttcttcgatgttccttacgtgttctttttactgggctagtactccttaagctacaatttttcttcttgcgctttcaatctttctaagatttgttactagtttgaaatttcaacaattgcagtcaccgtttcactaccattcgcggcgagcaccatttttgtgtcatcctgatcattatcatttagttttttctagcactttcaataattttgaatattttctgtgtttgattaaccaagggtttggagaaacaagaagcctatatatcttcaaatgaaaataaaaggaatctctcacagacggaaccaaacttttttgacccaaaagtgttatatccttaatccctgtaaatggatatgagaattaacactctttggtctttctcaagaatagtagtttttgtatattttgggattctttcttttctttgtacataatggatttttctcctattttttcttggtcccttacgtcctaagacctttttaatttatatctccctcctttgcatgcatgcatagccatgttgccatgcattgttctctcttaatgacatatgtcattgatgttaattcttgctctcattagttcttcccataatttctcttttgtcttatctcttacttctgtatctcaaatttattctttaatttatatctcagcttaaatttgtgagttagtgatctaagtaaagacctcatcccgtccttaacttcttaattaatttcttgattgattcgcctgttaaccgagatatttatctcaagtactagccgaaatgtatcgttaccttggtcgacctaatatgtcaagtttgagtcaactatggatattctagatatcttggtttttggtcgctcatatgtacggtggtccgaacctgtggtttatgtcggtcgaatgggtgtgtcaagtccagagcaattataggtgttgtttatctcggttttactatgatgggactaatactttttgtcattttttttagatttatcttaatcttagttatcacccattgaaactcagcgtattttttttttgaaaatgaaata

SEQ ID NO: 44068 - DNA, 1548 bp, Cannabis sativa
  modified_base (1516)..(1516): a, c, t, g, unknown or other
atattattatatttatataaatttatcttttttatttatacattttattattttaaaataaatgcatcccatggagattctctaccccgtcgctgatggggaatacgcaagaggatggaggtaaggacgagaattcaaataactaatggggatgggaatatgggagcatgtcccgcctcatttccatccctagtagtgttatccatctcacttagatctctctttttctcgatctctcacctcaaaatttgctatttagttttttcttgcaagcaccaatagtagttatcgatctatgatttatttcaattatctatgattagatctaggctcaagggtggccaaatttgactttttttttaatttctatttctgttgagtcaatgcaaaactgatgaaaatgtgtaaaatttgatttttacactcatttatgttagttttgcattgatactacttttcaatagctttggttgggaagagacgcaacaactttcccctttctatctatattaatatacatcaattctaccaattaaccgatacaattgactgatatgctggagtaaaattgacaaaaatagtgatttttactatagtgaaaccatacaattacataaggatactctaaattgaatcgtcaacaccattcaaacggaaattgtccaaataaggagtcatacaaaattgacaagtgccaatgtggatgaggagattggctaagtgaaaaatcaccttattacacaccaacacaaaataacaacattgattaaaaaaactaaaaataaacatcacaaaaacaaaaagaaaagatatagtcgaaagccaatattcaatatgaaaaacgttgtgccctagctagccaatgaaccaagtcctcaaccaaccatccacctcataatatcaccatatagaacatgtttacattgctaagaaaatggtagtaacgatttttagtgcgcaatagaaattgctgtcacggtagcaatgtatataaccaaaaatatcatataaacaactttatatgtgcatcttttagtacaatatgataatcaataaacaatatataatatatacacacatgtatttatattaagaaatttcattaattatgcataaaaaaatcccctaatatatatcaaattaattatcctttgttatcttatactattttatgctaatattaattcccttataccaaaattacctctccgtttaattttttagaaatattagaaacaaactctctctctctctccggagttaccacgatggccaataagctcctcgtccaccatagaaaacatgaacatgttcatttcccataataatgggtaagtatttttcaaataatttcttaaaaatttagaaaagtatgtagttcatttcgagtatacgtgtggttattttttatatggctaattaggattttcgtctcctaaattttaacatgtactaaatcatgctccttgaattttttttgaccgttaaaattcctcttaaactattgagattgttngatttaaagatttttgtctaattccattcaat

SEQ ID NO: 44069 - DNA, 2545 bp, Cannabis sativa
tgcctagtaaactgaaattggtccactttgtagattatggtatatttaccgttgtgggcatttaaaagataataaaaatatgccaatagggtgcaggtagtttcacctcttctgtaaatgggcaaacggggatcagttatacacgattctagtcatcttaaagcaaggtgttgaagttttaattcatcttttgtaagatattgttgaaataggcaaactagatcgagaagctctgatgaatattgttgaaataggcacaagaaaggctgttaattttggtaggacacgctagtttttttttaaaaaaaaaaagtattaattttatgccttttttagtgtcttaaatattcggatgtgataagtctgaaagctgcaattataaatgaagatgcattttcttgtcattcaaccgaatgtgattttagttttttccctgtgtttggtgtccttggaatttgcagatggaagcttatcctgctctgatgctatttccagctgaaaagaagaatgctattccttatgaagggcagatgggagttgctgatgttatcaaatttattgctgatcatggaagtaactctcatcatcttatccttgagaaaggtaattgtttatgcatacggtacttcataaacaattcaaatagggtgaaaggtttcgcaaataaagacttaaactcaaatttgacaaattgaaatcagagtagacaaacatcctcataataatgtttcttactatgtgtcaagtacaaaaatttcatgttttctgattctattaggatgaacttttgagtcttatttgttttcaattctattttcatagggatcttatggtctgtacctaaaacagaggcaagaaatcaaaattctgctggcaaagtatcatcaaccgacatcaatcttgaaactgctgcttcaaatgacggactctatgaagttctattggtaaacaaggaacgagaaggtgtgactgaacacagtaagctcgagtctcacacaccaaaaggtttgcatggattagcttcgcaagtggtggttggttccatcctaattgctactgaaaaacttgacgacacagaaccatttggtacatcgagaatcctgattgtcaaggccgatcaaagtaaaggattccaaggtctgattatcaacaagcatatacgatgggatgctttaagtgatctggaagatgggctgcagatgttaacagatgcacctctgagctttgggggaccactcatagtgcgaggcatgcctctggttgctttaactcgtgcagctatggaagagaaacatcctcaagtgttaccgggtgtgtactatctcgatcaactagcgacgtataacaacattgaagatattaagtcagggaatcagtcaatcaccgactactggtttttcttggggtactcgagctgggattgggatcagctctttaatgagatcggtgaaggatcgtgggagacaagtgatgatgggattcgatggccttgacgagtttctttgttttcaagtaagtagatttagtctcaaaaggaaacaagattttgcaagatgaagaaagtatcccaaggattgatagagataataggtctgactcggtatgtatgtataaccattttgtacgtatgtaatgtgtacaatgctacaaagctccaagtgacaattgtgaagatttttcttataaaagattaccatcatggaggttggaggatatcctttcaattttgaagtttacgacacaattcgaaaacgatacaaattaaatggatttggatggcacatttaacttccgtatcaaatcttgatcaacacgcttaatttaaaaattatacgatatttttatatttttagacaatctttaatgcaagttgtataatttaagttaaatttagctcaaaatatatcaaagctatatttagtttattttttgtaattgtactctaatgtacaatgagaaaaatagctaaaaataagtttataaataattaatgtttattaaaaatatacaatgcaattatttattttatttcttgataattaactttttttttatgagattaaaaataaaaagcttttttgattaataaatgtattaataagtggcaaaataataattaaaaaatgtagaatttaagactcaataaataaaccactctgtgagttgagggatgaatttattaaacatttatttctgtctagtgatgtggcggtacacttgcggcgatactcgccttagggaatctaccctgtgtgtgatactggtattcgtgtttgggactgggtgaaattcatttgggatcttagaaatagggggattagagttgaggacatctttctttatgcttcgattgttgttgacactatatggagggtgcacaatgaaagggttcaccataattctccccctgatgtgctgaaatgtattgatcatatttgtatttcttttgcagagttacatgcttctctcttgcctaatcctgcgccgatcttgagggagcctggactccacctcctcaggattggataaaaatgaattgtgatgt

SEQ ID NO: 44070 - DNA, 1876 bp, Cannabis sativa
gagattttggactgtggttatccttctaaggtgagtagtttcaacattttattgcataaattttgtagagaatgtaaaattatgaaagcccaattactgtttgatgaaattaccaaacggggtttgcacccaactgttgttagcttcaatactttgatcaatggatactgtaaatcagggaatttagaggagggatttaagctgaagagagttatggaggatagtgatgtatctcctgatgtttttacttacagtgttttgattggtgggttgtgtaaagagagcaagttagatggtgcatgtgagttgtttgaagaaatgtctaagagtggtttggttccaaataatgtaacttttactaccttgattaatgggcactgcagaaatggaagaattgatttggctatggaggtttataagaagatgctgggcaaaggtgtcaagcctgatttgattatgtacaatgtgctcataaatggtttttgcaaagatggaaatgtgggtgaagctagaaagctcttacatgagatgaaaatgagaggtttgaagcctgataagatcacttacactacgataattgatgggtgtttcaaagagggtgatctagaaactgccgtggagattaggaaggaaatggtaaaggaaggaatcgagcttgataatgtagctttcaccgcccttatttcgggattatgcagagagggaagaatcatagatgcagaaattactctgagggagatgttgaatgctggcatgaaacctgatgatgctacatataccatggtcattgatgagttttgtaagttgggggatgtgaaaatgggattcaaattgctgaaggaaatgcagagaaatggccgtgtgccaggagttgtaacgtataatgttcttatgaatggtttgtgcaagaaaggtcagatgaaaaatgctcatatgctcttagatgctatgcttaatttggaagtggttcctgatgacataacatacaatattcttttacaagggcattgcaagcttcgaaatccagaggatgttgataaactacgaagtcagatggggcttgtttcagattatgcttcatatacttcacttgttggtaaaattaaataatcatttaaactgtaacttgggactcactaacaaaatcgaaggtggttccctttttgctttttctctctttgtatgatcaagtgctaaaagctgaagttcttttcattgtggagaactgttagtttaaattaggtatgggcttgagaacaagaaaacagaatgaacaattagttggtcttggctacacccttatactttctatttgtctagctctagacaggtagggaggtatcaattagctatttggtcactccaaaattatgggtctgactaaattcaaaagcaatcttcttttaaacttttcttgtttttttggtacaggtgcatatttcaaactcttttgctgggatgaaatttagctcccaaaaatagcatacccaaattatatgaaagcctatggaggctacaattacagaatttgcactttcagaaattttatttgcattaatatgtaaataaatcttatttcttattctggacaaattgtttgaattaaatatgtattgattatagtttactctagcttaataatgtatattatgtgtgaagatgagttctcaccggagtaagctatatgttatcttatattctactaattttttatatttgaaattttgtgagagataagctgtaaattatgttagtccggtctatattttttgttgtattttttaaaataggggttatgtcatcataaaatatatatatatatatatatatatgagttgtgtcatgtgaaactcgtttgcaacttcccactttctca

SEQ ID NO: 44071 - DNA, 1971 bp, Cannabis sativa
ccctttctcctcaggaaaaatctaattcaccaaagcttcatcagcagccacattagtagttgcttgatcatggtgttcatcattcttcttttctacaactttttcttaacttggtctagtttggtttttttgatccacacataccctttctctttagcacaggaactgatattatgacctagtacgccggaggtagcacatgaagttggcagacattcaaatttgactgactgctccatgagttggttcttttcattcacaaaactgacgctattaggaggcttctcagttataggcatatccacaaggaccctagcaaatcgaatcatcgacctgtccctagcaatttttcaatcataatgggattactaatggtacttacaagagcagttaaggtgttttcccccaatattacaaagtgaggccattgaggcggatccaaacaggtacagatttcactacgttcatcgaatcaatatcagtcgaccggtctaatgactaccagtttcttatcaaagtgcacaacccctgtctctaaaataatgtccctagtagcttcgtctctgaaactaactagagtaaagcttgaatgcattctcactatttgatcaattcccaagtttctccatatccatttggaaaaaccttcaaatacttgaaatggaagattcgccccaagaaccacacaaacaactgagcttttctagtgaaaagcctcagattcaacttcatccatatcaatttatgcaattaaacggtcacccggttttaggggttcagtaaattcaagtttggtcgagggagtccttacctgattagccttgaaattactccatgtctcctttgctgaagtttggaaatcagtaacctcagcctcctctgcccaagatttgaaaccaggctttgcatctggatcgatcagcaacccctggtcgactcccaaatcagaatgtgaatcttgaaactcctctattttactcaacacctcgacgttcagttggatcgaaagggctccttcacttgctccggcggcttcaactccagctccacaaaccctaaggtctgaatctcaagcttctgaaattccttctttctcctaccgatggagagagagagagagagagaaggaagtcacacgattttataatggatattgaatgcaactctttttggtggagtagcattaggcggtactaataaatattatctctaaaagtttagcacatttgggatatttattgtgttaggttagaatttcactctttttgagtttgaagcttcattataaattataatttataagaccatctcccattctaaaagtaagctatgttatcctctgtatgtattctgaaaaaaaaaaattgaaaaacttctttacaagctcatcgtatattccttcttgaacatacaaaaaaaaaaaagttgctatgcaaacttctcccaagaaaacatataagatagaataattaaaaatgttatgtgtatgaaaatggcactaataataatgttatacgaaaaataatttttattagaaggatgaaagtagagcattataaatgtagtactactgcacaccttgttaaataagtttccgataagtttgctctcaaacaactcgaccctgtcagttattttctgggtttttaagtccaaaaagacaacaatatagtctatctcactcaacaaaaatatatcaaagacttattaactagaaccaacatgctgacagccaagccacaatccactcaggtggatgccacgaccctatgcacacatgagcgccaatggtccatgcaaaagatcttttttgaccatgtttggctttgttttgtttttttttttctagttttcttgagtttaacttttggttttcatccaaacaaatcctatgtgcccatgcaagcctcaattttccatttcttgtggagtcgggggatgccacgcccctatgcacacatgggcgcctac

SEQ ID NO: 44072 - DNA, 1745 bp, Cannabis sativa
ccaagccccatcatcaccaccaacagcctcaccaccaaccgccacaccaccaacagccacaccccccaccgcaactcctcccaccgccaccccacccactgcttcaccacccaccgcctcacctccaccagcaccagttgcctcaccacctgccccaaccccagccccaaccccaaccgctgccccaactcccagctcggctgccccagcccccagctccgactcaccagcttcatctcctggtcccgacgcttcttcaccaccagctcccactccttccggctcaccagccggtgctccctctgctgactctccagcttccgactcacccaacgccgcttctacctgggctagccgagccgttctcgttggtaccgctcttgccggtacattcgttgctgttgctttggcttagaatggatttcttccacgtgagagatttattggcgtttagatctatgatgggattggacggttgagatctatttattttatttgtctatttttttttcggggttaattattattctctttttcattttttttttactttctctgttgtgtttgttcattctatttcttctacattatttgggcttgaatgatttgagtggagaggtggaattttgggatggggaagactacgctctatgattcatttgttttgctgtcgacacgtgtattgatttttatgtagatgagtctgatgtaaatctaataatagttgaataaaacagtttttcattctttttcttgtgatttatcaaataatatagcatatttagtgctaatgctaacttgataacaaatcataaaattatatatagaactatagcatatatttttacagaattccttctgataatgtaattctcattatctcttgaaaatagctaatcagttttaattgattaaagttttaataattattgttttttaatggtataaaaggtattagttttgtgactttgtgcattttatattattactgttgatggatgtaacataatacaatgtgtgtacagctcatgaaggtggcacttggcataatagagtagtaactttaaagataagattaacttttacaggatggctttccttaatttgtagagtatttgtttggtatcaaattgtgacacatattagtctaaatttgaaaagaatacaaatgaatagagagtagtaagtaagaagtctctattttcttccatttctatatagtgtgtttagtttgtcaaagaataaggaatatgactagttatctaaccttcatgttgtacatatacatagatatataattttgatacttacaggttgacattgaactaatatacagttgaaaagccaccactactattaattgctgcataaaatttgtgttcaagattgaagattcctaaggacctttgggctttgcttgtccccagctgtactttgcacaataaaaatgcaataattttatgtttttatttattggggttcttacttacatagtgaaatttttaatttttttaaaaaatattgtgtaagagtatttttaatggaggtgtaaataagtggtaaaaagttaaaatagagctcatttaataaaaagtgtgctctaatagtgtgaaaaagtgatgtaaatttggcacatagtaaattttgtactaaaattagcataacatttgctatgatgtaaaatttataccacaataaatatattattttattagtgtatttaactattacattaaattataaaa

SEQ ID NO: 44073 - DNA, 2046 bp, Cannabis sativa
  modified_base (43)..(50): a, c, t, g, unknown or other
taaaaactccaattatgtttaacagagtttaaaatctaatatnnnnnnnnagctatcctcattatttaaagcaacatatctagttttaacaaaagctttctaataccctccatttatgttcataattttgcagggtgttcattctgcaacaatacttagttgaatggaaataaaaatgtgatttgatagaacagataaaagattgtaaaatggggaaaagtatatgacaaaaagcttttatatatatacacttgcatgcacacatattgttcacaaacatttgaaccatttcggtcagatacaacagacttataccaataaattttagttcagttcagcagaagaaaaaatttcacttacaattgctttactttcttcatagaacaatatggtaaatccggtatcactatcatctgaaatcccattttgggatagcctgagtttactaactaatgaccctttcactaaacaaacacaacatcattattgcagattttggtatctaaattctgaaaactttcagctctcaggttggttattgaaaattttcttaattttgatttcaggcaaaattgaagaaaaatgtatcaaatgcttctcaaatgaagaattgcatcactgcttcacacttgcctgcacagtacaaactttccactgcatgaaactgatctcttcattgacatagctccactttgaggtgatcttccatttgaagaactactacttttaagtctctgcaacttctgattctcaccagctctcttttcactatctaatgaatccaatctattgttaaccacttccaattgtttatcagaattctcatctgtttcctcaacaaggactttcaaaagagagagattaatcttggaagccgaaaaagaatccaaagaaacagatcttctacttggttgtactctatccacttcttcatcagaattctcatctctctttctttcctcccctgttcctgtcctcaactcaccaatctcatcctcattttcaccactgaattcttcattatcgacagaaatatcgattcgggtttcttccacaggactagaatcaacatcactcggctctggggaaggcatcctggaagccgaacttgttacaatcggagcacgacacaaagggcaattcgtgtgtgatctaagccaagtatcaatacaagggacatgaaaagcatgactacacttgggtaaaagtctaagagtttcatcttcttgaaactcactcaaacaaaccgaacaatcactaccttcaacaaggccttcttcttttttatacttcaaaaccgtgatggaaccgataatggaaggaagtaaaccgacagtcctgatgtaccagatgggatggtcaactacaggtccatgatcctcatcaaaaaactcaagatgggtttcatcctgttgttgctcagactcattccttctacgattaaacctcatgtaaaagacatagccacaaacaactagaaaacttgctgcaacaagagctattgttacagacaaaaagattaaagctttgtgtgaatggtgtgaggagactggatcacttggtggaggcatatacagaagcttacactctttgggacatataatcgaacacccaggaaagcaaaattctggttcttttctatcacaagagggtttacataattgggtcagattaagtggtggctcatcaccaacaccagcagcatgtaattttctattaagagaagccatgttttgcaatataacccaattcaatatcaaattacagaaacagaaaccatggaaacccccaagagagagaaagatatgaaagaggtattacctggttgttgagcaagaaaaggacgtgaaacccaataaagggaaatgggttgagattggatgaaggggatttcttcaagaggtgatctttgaatgctgagcagaaatggagtatgttaagcctttcttttgactttttcaccgttggttgttgacttgtctattcttgttagctcttggcggctcatgactgccctctctcctacttatttattattttcatata

SEQ ID NO: 44074 - DNA, 2277 bp, Cannabis sativa
agagagagagagagaagaagaaaagatctatcaaaaattattgattacggcatctacattacaaagcagaagtttgaaaatttacatgacagaatgtcacaatatttacaaaaagaaaaaaaaaacgaataaaaaaattagacaaaggcaaactaaaaaaggagagaagaaaaacccaacaaaaggataagagaagaacaaactacatggtaaatggcaaaagaagatactaataatattaataacaatagtaaatgtatcagccaaatttagctgttagttgttgtgttactattatatgtggttttcacaataactgacaaaggaatgttaataacatgacctttatttccaaaaagtccaatccttccaaagctagctactgagttgttggctgtggcatttagtactattgtcaacacttgtttctgtccactgccaatgtaaaagtgagaaggagaaactttcgctgaaactccgaaaggagggctccagcccacactgtaagtttcattgtcagcgatgttaagcaccgatctcatgactgtccttgactcgtttagttttgctaatgtgattgagggcaggtttaaatcggggccattgatggtcgaattgtaaatccaacagtcttgacctgtgaagttcctaaccacgggagctgatccattgatgtcacatagaaatgacatataatcatcataacctacaaaaaagtgaaagcatgatggcaataatcactgacatagtaaactacacaaacccactcgataatgttgataaagtaatagcatttgatgatccgaaattcatgtctttgtcctccccactttcaggttgcaaagcctaaaaatccttccaaaactaaacccctccaaaaaaaaaaatcttatatttataataaagaggggagaaggaaaagatcacatagccaggttttctgtttaagttgattttaaaagcctagactgatcagaaaccaacccagccacacattgaacttctaacactgcctaacatttttagcctggagaacaatttaaaaccagccatgctgataaagcaaatatttgaacataaaaatctatctaatagctttggatacttgtcaactatcaggatttgttatgcaccaacaagtctatgagccgaactactttcaatgtgttcgataagtatcaacttactggaatcaaaaatcaggcctggattcaaagctgcagttgcattaacaaaaccactgcccatgtcaaaaggtgttgcaggagactgattttgatctggattggcataagcacgctgagccattattggcccaccatgcctatcatatagagaagctgttgtcgaaagggcggatgcaattgctgaaggactgaaacttggatacttctgcttaatcagggcagcaagcccagaaatgtgaggagcagccatgcttgtgccagacatcattgcaaagttctcacctagtgggtcaatgccaaaaaaattacaaaagctattactactatttaatattaaccatactattaagatttatataaatgaaaaacattcacaactggtgaaaaccagaaactcataccaaggaattcaactgaatcagctccagcagaactccaagcagcccatataaaatttccaggagctaccaagttgggtttcataatgtcagcatcatcaagtgagttgtcctctggatctggtcccctagcagagtaaaacattatctttggagcagaattactaaaatttgccgttagtccaccacaaagttttgcagtagccttaaattttactactttgttaccctctttctccaaagaggaattgtagtattggagtaaaacctgccagaaaaaccacacacaattagcatgcgagagtttatacaatatacatccacccaaagggagatccgtaccttggaatcttcaggagatggaattatgataccaggcatattcattggaactggattaagttgaaaaccaattacaaaaggatccatatagaacacaacacccaatgcacttaagtttttggctgtttcaagagcttgtttgattgtggaaattccaagcacaaatcgaattgaatagctacaaattaaaagatttccttggacaagatcaccgttgaagttacttgagtcttggcattcacccacatacatatcatcagttactgttgtgtcgttgtttaacgcatgaacagccgaaactagtgtgtacattgtatcattctcagttccagctgaataaaaacagataa

SEQ ID NO: 44075 - DNA, 3046 bp, Cannabis sativa
  modified_base (256)..(280): a, c, t, g, unknown or other
tccatattgagagagcgaggaagcccgaattctcatactgaagctatcgcaaggattgaagctaaacatcaatgggtagagttatttcgatctgtttattacatatacaacttcgatatatttatagtttatttcgcattagatatagtttattattattattattccgctaaaaataaacattgggtttatgccgcttacaaatttaaaattggagtacttatgacaccctttacccttattattattattattnnnnnnnnnnnnnnnnnnnnnnnnnttattattattattttacataaaaaagatctataatattacgccaccattttgaatttgtgaacagtattccgccaaatatggcatgcccgtgccgcatccctttctctctcttttttattttttcgttatttttctacttattcttgtacataaaataatttacattagtacttttttttaagtatttaacaataatgataataatttaccttttttaattagtattgtatcaaaccttacccttttcttctctaaaaaaacaaaagaaaccttactcgagaaagaaccaataattccactatacaaatgtaacacaccaatttaaacagttaatcaataaatgaaaacagtttaactgtcgtattgaattttaaaatgaaaaatgaaaatgctgcagatatcattttcacgaaggagaaaaaaaaagactaataatgaattagacatataattttaattttaatttagttggacttcaattgtgttatccactggcttacacaatattgaggttgagtcacattctcaagcttttgagtaagaaggatttttgtatggcaattatggtttccttttgagtgatattagtttcatttgtacaaatctctcttcatagtttatgtaagtccttttgacttgtttttgtcgttagataattatatttcattccaccccccaaaaaaaaacaacaataaagcccttagattagaacaaaagagcactaagaaaatcagaatcagaatcagtgtatactaaaactttgtgttaattgacacaaataataataataataaacaacaaaaaaaatcagttcaagagaggaaccgtacaaccttcccctactccaggatgtgcgtaaaaatcagagtccaaaccatcttcgatctcaccatcgtcaccacaatcgtacatagatccaaccagaacaagctgatcttccaaatacctctgcagaagccctactccttctccctcgcccggcccatacccgccgcagcatccctcctcgcatcgccggagccgatcatcctcctccaactcgtcggcaatcttcctccgattccggcggcggctgcagatgcggaggcagagttcggcggcacagaggaaggggaaactggcgcaaaggaaaggaagaaggatcggtgagcagagtaatagaaataggtagcggatcctacgactgtggagccaggaagagatagaagtggcggcggcagagacggaagctagcatgatcggcgacaataagagtatgtgagcggtcggatgagagagagatcgacggaggtcatcgctcggttggttatggtggtcttggatgattgatgatgatgagagctttggtttagaaagtctgtaaagaaagtagtgggcacatgagaaggggaattttataatatgaagaagaagaagagcatgtgagttttccaactttttttctaattataatttttttaataatataatggcgggggacagagagtttgttgtgattttctttttgggtggaaaactctagtaggtgacttagatcatatcctaggtggattcattgattaatggtacaccattattattagagtaacaaattgactaaatgacttctcttcttttttcttttttgatactatttcacaaaaatgattattccaaaaatcaataaatcaattaaacaaataacttttttccccaataactactattatattatgtttttccaccactaaaatcaaactcaaagtgttgttaaggataagtggcacaatatttttctttttgcttatcttttctatttagatttttatgagtatgaccaaaggactattaaatttgttttatctgaacaagttttagttaatagtaggagggttattgggaaatttgtataattgcactaaattagaaaaagtttaacaaatattacacgctaattacaacttatcactataaacaacaaaaaacaaagcagcaatgtaagagatgttaaaataatatgaaaataacaaaaataaaatagaaaagaatcaatttaaattcatacttatccacttgttcagaaagtacttcagcattaacaatagggaaaggtgtaacaggattcacagttgctggtaaaactactttctataatgtcatttctaaagtcttagctaataggcataagttgatcctttccaagatcaattctccttttcagagtgcttttatttctaggagagttatttttgataatatctttttggctaatgagtttattcatgccattaacaatcgaagagtttgcaagagagggtgggcaactctaaagcttgatatgacgaaagcttttgatacagttgactggcaacatagtcataaacttgcaatcctcgtttcaagaatataattattgcatgagcacatgggatttcatcttgctggaactgattacattcacatgttttgtccagtaaattgacaaggaattttcctttttctagcacattcacttggtggagtattgttgtgactagtgtaacctgttattttaaacagaaaaaaataatttataaccggttattttatactactattgaatatttttaatatatactgtctatatatatgtttagtgttttacctcatattttcttgcttgaataaagttgtctctaagtattttttttctgtcactgttgaaacttttgtgaatgtttcatgtgcttcattgtcatttgtccaaacccatttttgtaccaaacttcgaagactctctatcatt

SEQ ID NO: 44076 - DNA, 3178 bp, Cannabis sativa
  modified_base (2828)..(2829): a, c, t, g, unknown or other
  modified_base (2876)..(2893): a, c, t, g, unknown or other
aggaattatctatgtaaggtgatttggatttacatatctctgttggatttctcggatgcattatgcggagaagctgcggcttgctgtttggttgtctcgtcggctgtggaattagggtataagtatgttattgtggagagtgattcgagactagtgatcaatgcgctcaataggagagtgttccattgggcccttgataactatgcctccttttgtattaagtcctctcccttttttttagttgtaacttttctaatgttagcagaaattgtaattttgttgcccataatgtggctaagtgggctttcacccaccaattgtacggttccattttgatctcctctataccggaggagctactttgtaatgaccgtgatgtctaacaatttccttgtttaatgcatgaatacgcttatttaaaaaaaaaaaaaatctgaaaaaatgataattaattagatattaaaactaaacataactaacataaatgattaaataatgtcacaaattaattggaaaaatatataaattcataggaataatatgtaaaacaaaatttaaaaaagcttctctaattttaacataaaaattagggtactgttgtatgtattatattattgagatgggatgccaccatgcatggaatgggccatttggcccatagcagagagagagagagaggggggtcacttcagttcacgttccctaatctcatcaccatcaactgacccacacctcactgagcaccacactcttttcttcaacgtgctcacactcacactcactctctcactctcacatctctctctctctcttttgtttctttcaattcaacccctcctttatttattgcctctccccagtccccactttgtcccatgtttcattggctcacctttgtgtttctttcttcccttttcttttctatatattgccccttacacatacattatcattccttggaattccatgttattctttccaaaaaagcaaggacattaatctccaaatttacaattccaaagaactgggacgaccaactgaatattattactacattaatctagattttacagttgtacattcgttttttaaaaattaacaagattgatcaattgagtaatactgcttattttttctaattatttaattatttataaagaaatcctctctaatttcaactaaaattttatatatcactaaaaataactagtgaagaaatgtatattcgttaataatttattattttctttggaactagtagaatttggggtttcattattagcaatgaaaaatgccctcgctattctatcatttattttcacaccaaatcctactgcattgcatttttagtggacgtagttataattgtttccgctatggatgtctttgattatagaactcattgttgtgttaactcatttgtatggaggtactggtaaattcagtgctatgccggagtttggttggaggtaaatagaaataaaattttttttgtaattccattctttgtttggttttatattaaaatattaaaatgtcattttaattggaatgatgtttctactattttggtaaaatgattattctttgattaatacatgattagaagaaataaataatttttttatcaatttttttttatatattttaaattttattttattttatttctattctcattcctatttatatgttttgttgttcctagcttaaggtcactttaattatttgtaattaatgagataaatatactcatgtgagataacagttgaaagagaaatcaatgtaagaagattcaaaaaaaaaatgaggtttatattagcacccaaaaaaatagaattaaacttaatttatttaatataaattacagcaaaaatacttaatattttgtattaaatttttttagtagtcataatactaccatgccgtcaaaatgctgcactttcatacgaaattttcttatggtaaatatacattttcatacctattttttttttttttttaaaaaaaaattacatattttaaagttgtatatttaatcattatcatctaacattcagtatatttaccaaaaaaaaaaaaaaagaattgtaacattttaatatttaattattttttgaagagtttaatattaaatttttgtaggtacaaatattcctcctcaaagttgtattgagtgttggtactactagtttgtgtgttattttttgaagagagttgtatggagaccgttttgagtgaattattaacatgaattaatacacgtgtctatcgacagttaaagtgatcataaattggtgtctgatccatgaaaaggacaagtctcaataaaatgtatttgtattggcagttaagtcatacatagctctaccagtaccacattaattcatccattgatttacaaccacaactttcatggtccgttagtttgcaaatgacaaacacatcaactgtttgttttgtatgaaatatgtatcaccacactcctattttcttttcccctcctccatacttgtacttatgggttttttttatttttatatttcataacagtttttttttacagaattctatattgaaattcttattataactagcgctgcaacctaaatcgtaacaaaaaatcgtataacaacccacataaaaactaccaaagaaaccactttagaaactcaaaccgtaaattaaaaaaacagtataccctatatactatttttataatttttttttcaaatttacggtttgggtttctaaagtggttgcaattagcgttgcaataggggttactatacgattttttgttgcgatttaagttgcagcgctagttnnaataggagtttctatgtagaattcagtaaaaatgcaaaaaaaaaaannnnnnnnnnnnnnnnnntataaaaataaaaaaaccctaataaattataataatatcttcttaaaataattataataataataataatcttatagtatctttttgtcacaaaaatcgtaactatatatgtaagaatctttttctttattatgaaaaaaataattaaatataggagattaattgccatgtataattatactagtaaaaagttacgtgcgaggcacgtacactaaattttatgctaggtattttttattatattaaaaggtaatacacttaaaaatgtttatctcatcttggttc

SEQ ID NO: 44077 - DNA, 1288 bp, Cannabis sativa
attcatattaggatgttaatgaagcatacttgttagtaaatctagatccttgtaaaataattccaacagagagatgagaagagtctacttaccacttaaaatctatgcaatgttggcctaataatgtcatgtcagcgagtttatttggatgcttgcttttctaaagactcttggacgatgcctcttgaagatgatggccaaagtgaaactgtcattctgtctagaacaatttcggaagatgaaaactcctctgatggagagaattccattcaaaatgactcagactattcaaggagaatacctgtgtttcttgatcaaaatgatgaagaagttacttctattaaaaatgtgtcggagatagttggggaatcagcaggtcactaatgctcatgtcctgtagttccaacctgctatcttgtgtttcatattacttttgctatactaatgacttgtcttttcctctctgcagactatgagttttctagctaccatggcgacttgttcgaagagaaagatctccacaccaaaggagattgagcctttagatagggaggctgtatagggtatccttgttgcttcttctactcatgcaaagaagaagtctaggaaaagaagtaaaggagttgaggtccctccacctatccaagattctagcaaagggaagtccaaagttgttgagggtgattagggatctcccgcatctctaattgagatttctctagatgaggctgataatgccccgaaacctagttcggatttagtggagcaactacgtgagcaaaccgcatggcttttctaattgagattccttgattggatccaaggttgagaacattccgttcaggatgttagttacttccaagcctccacacgtcattgcccaatgatgcttcactgatatctttggggtaacaatcttttcttgtcatctcttgagctgactttattatatttaccatcacctgccttacattctttggttttaggcttgtgttggcctacaccatggacaatgaaaacaagaacgttgtcgagcttgctgagaaacttttagttgcggagaagcatgccaccattacaaagaaccaggtggttgacttggaagaagccatcaatgacttagagagtagtgtatccaatcttcaaggagtgtctgacaatgccaaagctcaagagaataacttgaagaaagatctagctattgctcaaaaaaagactgttgaggttgaagactctttctgttagtcacttgatgagaggactctaagcattgctcagttagaggact

SEQ ID NO: 44078 - DNA, 1292 bp, Cannabis sativa
gatggtagcttgaaatgtatcatactattgcctcctttatagagtgagaagctatctatccaaactttgaatgttaatttttagatagagcaaattatcagaatttctgtgttggtgtttcgtaagttcgtattgaaataattgacagctctaagtagtctttctttagaatgattgttgttctgttatgctagtcaaaactctccatgttggagtgataaacagactataaaaatgccgaagaactacctctctctctctctctctctctctctctccccaaaagagttgtaagtttgagattaagctgtgtgggtcctggcatgttgttgtctgactccctctctgccccaacttacttaatactaagcaagcataccaaggactctgatgattctttggtcggcactcttttactttgtttaccctgccggtgagtctcattttacgtccctaggatcatattaaaagccaaagtgcagtaggtgttcttattcctctttcaattgacaaatctgtagtgtaagcaggaccctcctttcatcatcctttttgtttttccttaattatagaaaaatgatcaaggctaacctccgagctcctctctccaactcgagtaagagaagtgggaattgttcacaacctatcctttccttcgttccttcactttatggggttgagctcctttgtggttcatggccgtgcttcgtgtattattcacaagctcaccggtcaccccaatcactggttttatgtttgaaatcagttcttttgtttggaaaatttgggtagtagattctacttttggtttgggttggattatgtttcttagataaattagggggtctccattactctcacctagttgaaattttctcaagtggcagctgcttttcttcctaattgattaggtttcttgggaatttgtagtcttggttttttccaacattattattttctggattttttttttcttaacttgtttttaaaaaatgttgtagattgtaaaaataaaagtaaatataaacaattataaggggaattttcaataatatttgtttctatgtttcatttataattttacaatgttaagtttttatttataaaatacacttttaaaattttaaaattacaaaaataaatacatataggattttttttatatggagcctactatatttatttatcggtgggggcatcccagagtcaatatctgggagacattaagtaaaagtagttttagaagagtgtgacacactgaaacataatctcttttttcctatttttttttt

SEQ ID NO: 44079 - DNA, 4708 bp, Cannabis sativa
  modified_base (3569)..(3571): a, c, t, g, unknown or other
gccaatcaagtggctcacattttaactaattaaactgtgttattcaaagttagtgctatgtggattggagtttcacccccttgtgttcatcaagctttttggtttgatgagcctttttctttgtattgaatgaatttcatttcataaataaataactaaaactaaatattttgtacaaaaatgtgcaaagttaaaaccatattaggccatttagtattttttaccccgaatttctaccactatgtaccaaattttacctctaagttattttttttggttggtttatgtttggaagttgaatttttgtgaaaaaaaaaaataaaaaggtagggaaaattcagacaaaaaaataaaaactttcatatttagcatgaaaaaaaattgtaaaaaaaaacacttagagcttgtttggctgtgttttcagtttttagtttttagaattgtgttttcaaaattgagaatagaaaacagttttttgttattttaaaaatttaatggtgcttggcagaagttttttaaaactacttttaaatttaccataccgtgacatgaatccatcagggtttgggtttggttccgtgacttggattcgagtatgtgagcaaaaatataaaatataatatgttagactaaaaaaattgtttttgaaaattgaaacaatattttaatattttctattatttagttttttaaaactcagtttttaaaaaactttttaaaaatttttgccaaacaaccttattagtattttataaactattttctattttttaaaactaacaagtattttcactcaaaaaaaaaaaaaaaactaaaaacagtttttaaattatgaaatcccttaattcaacaaaattttctatattaaacttcaaaaattgatttattattttattgtccacatttttttattatatttttcctaccttttattttctttactaaaattcaatttcctcgctaacaaaaaagtaagataacttatttcaaggataagttttttatatatagttataacagttctgtgctaaaaatcctacataactttttatatattgaagatgtgtatttatatagattattatatgaattagatttagaggtaaactataattttttttttcatattcacaaattattgacaaaaaaatcaaagttcttcgtttttttaaaacaaaaatttatctacaaataatttcaaatttgttcgtaatttattatcattaataaaatgtattttactttagtaaataaataaatattatatttaatgtgattaatctatatgttcgaatccctttttttcattgaaaaaaatttatatatataaaaatattaataatacaaacctttcatctgttggaagaaatcgtaagttccatgaacgatgacatgtccatcattatagatatcccactctattgtcttagcacccgagatggtaacgtaaccattgacgaaggctttcgttacttgagcatcaattccaagtaggaccagtcctgagacaaaggagaaggaggctactgctttagaccccgctcagggtctattttaaaaaaaattaaaatatagttaataataaaataaaaaataatactaataatattaaatatatgttgagctcaaataatttgattagagtaatatctaaaaggtactctcagaaagcgaccctgtttcgaaagctttcctatcagcttttgcaggtacaatttggttttcgaggcgatgtagggctcaaaacgcaccgcttcatctaagggaacaaatagagtaacagttgtactagatggtaaatctattttgattgtggatgaagaaaaagcagtcgacatcgtttttgagatattgttttggagaattgtggtaattatgttatttgcataattggggtgaggctgcgttaagagctttggctattctgttaaaccctacaactccaacattagtgcttttcatatataatcgatataattttttgttaattatttaataaaccaaattaacttattttatgaatcttcggaataatgttaacagaatatatacaatcttaccgtattttacgattgcaataatcttaatttatcatttaatatttaaatttgaaatgtttcttttgattcttgacttttatcttattatgatagtataattattaataaaatatattcaaatttttacaattaattgaatggattttcttttgtgacaaagctgaattatttgaaattatatattattatatcctttcatttaatatcaaaagatattatattatattgtgagtttttaggaagcattgatattttttttcgtttttaaaatttcaaaaacaaattaactgatttattttaaaatcaagattcgataatattattatttgcttttttttgttttagaatcacctcatttattatttgttaattttttttttagtgttttggtagtttctcccgtaagtattatgtagattgagatttgaattacgatttaagttactatatggttgctataaaatgcaaaaaaataaataaaaatattttgaaatgtaaaataaaaaaatcaccatttgtttttagataaaaattatttgcttaaatgtataagggctcttttatcgctgggaaaatgttagcgaagagttctatgcatgttcatgagcttatacttaattataaggaagaaaaaaaagaaatgttagcacatttttatgtgtcaatatcgttattagtccaacttctttttcatctctctgattatctctattttagttaacgcagatttttgttaactaagtatataaatcttttacataataaatatactagagaattaatgataacaataaatgaacactagatatttttacgtagttttgtagttaaaatctacataatccacgagtccacattattatgaatgataatctaaatatagagtataattgtctcaataaatataatatgtgtagccttttttcttaaatttgccatctttttatcttggattttgctttatttataggtgtatagggtgacaatctacatactccatggtttggtaaagtatgctctacggttagacgatgagctatcctggttcgaggaggtcccaactccggtggcggacgttttaaattcatgagtgattctaatcactttgtcaaaaaaaaaatatatctttaagaatattattgtatttttctcatttaaaatttacatgcttacaattttggattcttatgctgaataaattaactacaaacgaaagaattgctatacaggtttgacatatgtgaagaggctagtatgtgaggaggatactgaaactcaaaaccatctatttttcctctgtctagggaaatactggctatagtggtcgacaagagcaacttcagctgacgacctcttaaaatggataagaaaaagtagtaagatatcaaaaataaggaaaaaaagtttatgcaatgataatagcaatagctatttaccatatctggacctaggactcatactttccggggcccaaaataaaaaaataaaaaaaattattaggcttttatnnnagtaaaatttaagtgtattataaacaacaaataattatatatagcttagttggttggggtaaaaataatatctaaggtatggtttcaaatcccataacacttttcttttatacttttttttttatatattttttagagccctaaaatttaattcgtgttgggctcgtagactgggcctgcttaccagaaatgatgcagtgtgaaaccaccaggttcatcttcgaatagtcaaaatattataacagatattaaaagtaggctggcagtaatgaataagggaaagattacatcaatattaaatagagattgaattactaaattgtaatagagaaagaatttcagtcactatattaatcactgattcataaaaaaaaaaaaaattatatttaaagatttaagtaggactaacagataaaataatataaggttttaagtcggaaaaaaattataaagtattgaataattattatttatatattaaaattataatagagtaatatttatcatacttattaaaaatccacgtagagcttgaaataattttttgtaagagaaaattagtacattctgattaaaaaaaatatcaaatagaatataatttaaaattcagctcaaataatttcgtaaaagaaaatataagtcaacttattaattattggaattcttcttcctttctttgggggcaattgtagaattaaaaaataaaattcaaacagaaccattttcaaatttaaatcaattaaacttttaacagaaattatatatcccacctccgaatttgttactagatatttatgatatttaaattgatttcatctaatcatattccaaatatcacataagtaaaagtctcaccgtctatttttatacaagaaagactctcaaatacaaataattgcttaatgaaaaaaaaaaacaattaattatgggtaattattcaatgaaatgtttgttaattttgttagtgattcttctccaatattatcaacaaattaatggagctggactgttttggatatgggtgcaacgatacaatgctgaatgtggggttctttatatgaggaccagtaatgttagagttgtgggtttcaacaaaatagcagaagctctccaatcagcctcacgcaattaccaaaa

SEQ ID NO: 44080 - DNA, 2638 bp, Cannabis sativa
atctagtttaatcatcataaaccccttctttcctttttttcttctcatggaatggactatctccctggcaacagcagtgttgtctgctataaacctgccctggacgaaggctgattgggccggggaaataatggtcggcaagatgggcttcaaacgaagagccaggatttttgaaatgcacttatacgtcacattgcacagggctataggtctataatcattcacacatgtaggacaatctttttttgggattagaacaacattagtattgttaatgaattgtggaagctcagcatacctgaagaagtgggttaccatctgcacgaagtccttttttatcacctcccagtgttgtgtataaaatgcaaccgacattccatccggtcccggggctttgtcattccccatagatcttaggcacagcaagatgtccgattctgagggttcagaggtaagttgcaaattgatgttttcgtcaatgagagggttgctgagtaaagattgtccttcaggattagcttgtgctcgtcgagtgaagatgctattgaattttgatgagaataaatcagcaatgactctcgaatccgtgacccattccccattatccgctttcactgtttgaatgtaattccttctgcgccggatggttgttgaggccatgaagaatttcgtgcttctatccccatgtttaagccaagctacacgggatttttgtctccagaaaatctcttctctagtaagggcttcattaagattctgcctggcatcatgcaaagtctcttcttgtatcaaatcattgctttctatcttttggagggccgactttgcttcttcaacttgaagccgaatgtgccgaaactgggtcttgttccatttggataggtgatccttcgtcttcttcagtttacggtatagattaatcattgggttggaatgaagttcctccctccatgcattccgcactacccaaaagcatcttgggtctcttccccacatcatttcgtacttaaattgtgatcgtgagcatctcactcccccttccgtgtttagtagaatcggtttgtgatccgatgtactaactgtaagaatctcaactatggcattagggaataaaatccgccagtccgtcgttgcaagggctctatccaggcgagcccgttttactgatgcacttccttgaagcctcgacgccttttggaaccaagtaaatcgtcctccctggcatcctaagtcaataagccccgttctattcaccatccttctaaggtcaaacgagtaccttgctgagttattcttgtttgcgtaattgatacattcatagtccgctaacgtgccatttaggtccccaaagaggacaattggtgtgctacttttggagattacatctccaattcgggtccagaaagtttccttccccatgggagtgggagggccatatattcccaagaaggtccatttaacacctggggggtcagactcaatcgttccattaatcacatttttatctgcctccaggatattacacaggacccctgatttccaacaaatacctattccccccgagagcccaataggaggaacataaatggagtgaataaagtggagcttgttcatcaatttttcaaacttttccatcactaaccttgtttcagaaagtaaaatcatatcgggatttgaacgacggagcacctccgccaattgtcgaattgccgcggcattcccgagccctcgacaattccaagctaggatcttcatggggtcgatggagacttttccgggcaagtctccgtagccccaaactgaaaaacctgtttggcatttgtgttggcagcttctttcttctccacgctcctttttttaagttgtcgatcttcatcattcaattctgtgatttcgcacgtcgactgcctttccttcgacttctccaccagaacaaaatgattgtctagatcaatggttagatcaattccttttgcattccataggttgcggtagtgactgttatttctttgaatggaagacccctttttacttcttttgaagcttgttgaattaacccgaatttgctcttgggacttaggaattctaacattcttcgcggatgaagttgcttggtctgggtcagtcccctttcttggtcttcctctctttcttttctgaactttgtcttcattagttcctggtgagaatgttctcaacgtttcttctttctcagcctcttggttgtggttgtttagtacattcttaattggagttacaacagcttcagatgggctttcattgtttggtggaataatacctggaaccatatagaatccatcaacagcctttctcttcttaggcccacattcagtttcaaagcatttaaagtcttcaatattgagtattggattaaacaaagtgggctctctatggaacttatctattgttgtggaccccaacattggttcaagagctctagcccaacaaagtcttgatggccattctaaaggttgggcctgcggcccaagaagggaattgatgtattgaccaatttcaaatttcccttttaaagtgaaattttctctgtcttccacgcctctgtattgtgaatgggtggaaggggtatgcggctcagaggttgaattaagttgcagag

SEQ ID NO: 44081 - DNA, 3477 bp, Cannabis sativa
agttctaatggatcaagaagctggtcaagaaggaagtacagttatcctgtggcgaaacaacttagccaatgttctgcgctcgcaatcctgaaaaataatggagaaagatgattggattataatttgtttcggaagcaagcaatgatcaagaatggatattgtattttaacatatgaaaaatcctcacatttcctaatacctctcaaaatctaccagaaagaattataatgtatcctttggttctattcatctcgtagttgtctttgcaattctcaagaatttttacagaattttttatgaagaggaagatgaaatgggagaattttaagtattgggtttctatattgatcttcaacaacaaagagtttaaggcctactttgtgtttgtgatcttacaatcttgtttaattgtatgtatatattttatatattcaggaaaatgagaagataccttgaacatattgaagttgaatggtttatcaggattcattctcttcaatttcaggtaagtatatgcaaaacttagttgatcacgggaggtgaatcgatcaacttcattaaaccaaaggcaagaaaatagatttgacattggcgtatgagctcgaactatgaatgaaccttcaggaacatctgtaaaataaccagcacacaaaattaggaacacaaactaagatgaaatgagttggaaaaattcagggatatgttcaagagacttacagctcggaagaagtttatttgggtcagaaggatcgaactttgttaggccatcagactggtaaaaattaaactgttcgtctatggctgtatgattgtacttattcaaacgcttattttgaagtacttcttcccatacacaatgtcgatcataatggtttgaaatggcatattctgactttgttcgccataagaagcgctcaagaattagcattggatcaatgtgaagtcgcatcttactgtcgagccatattgaataccttgaaaggacattgtttaaagagaaaaaaaaggggtaagagactcaatcgaaggcccaatgaaacaaatgttcttcctgtaactaaatatactgaaactagttgtggtaaattaccttgcggaagggaagagtctgtgtgacaaaagcttgggaacttttccagttcttctcatgtccttgtatggtaaatttctgataacaactaatctccataacccaatctttcctccatcatcaggaacatttccttccatagacaattttgacaaagtttgttcatccacaaacataacaaaacaaacattgtccttggaatatccacttatctatggaacatgcacacaaaaggaagtcatatgaaccatgttttgataagaaagtagcataaacacataatcccacaacactcaaaccaaattaactgttatgggaacaagtatgtttctgtcattgagtatattgatatgaaacatatattcttgtcatcacttatgatgattgtggaaaacaaaaccaaactagggaagagaagatttacttgcttgctagtaggtctcctcaaaaagtcagagttgccaaaaatgcatgatgaaacaacaatcttacatgtgttcatgtatgccttgtccttttcatttatctcaaatccaatgcttgcgtaccctggtggtcctttgacaaagccacaatgaagagtctgattctttgcatagaaggattgttgtctttcctcaagagtctggtgtcctccaaatctcagatcaaaaacattgttcgaagaagatttttggtctcgatcaatgtattttaatgaaaactgtgtaaaattcgtgaggtcgctgggttcaacaagataatcaactgatttagcaaatccaatttcacaaggaaaatctgaaaagcaaaattacaaccaaaagaataagtaaaattcttaagccatgatagtgtacaaaacatgtagtcaagtttgtataattgggcacagaaagtaaagtgctaccaaaagaaattttaaaaactatagatgtagattcataaagcataatatagttgatacaagaaaactcatacaaccacttggctagaactcacccccgaaagctaccctaagagaggagggcgcccgagtatgttatatactaccatctcatacttagtcactgtgtgatcctaacaatacaccccctttagaggggatgtccatggtggcaactctacggtgcccactatgggctcccttctgcaatgtcggtcctacttgagggtgcatatgactctaatcccaattgatataaccactaagatagaactcactctcaaaaactagcctaaggtgttcaagtagttatatactctcatacttagtaaatgtgggatcctaacaaaaacagacaagaacaattcttacgctgtctaccacgtttgctccttggcggcggcggtggcggcggtggtggtggtctaccagtctcagattcccaaacgtctgggtgagcttgttgtagtattaaaggactttcttcaaatttttttataaggaatatgattagattaacattgatgaagaaatgtcattaaaaaaacaaacttttagaactatataattccacattgcaatgcccatttcttgaaatggatattctaactaacaaagatcaaactttaacaatatgcatacaaaagggtgatagaatcttaccatgaaaggggatcttgtttaggttggagaaaaccagaaaacaaatgagaaatgtggctccaaacaagaaggtccaggtggataatttgtgtctgggaaagggaatacggccaaatctttttcctcttcgaacaaaacgaatggcattgtcattggaaagacctcttttctccaagtaacgataacaattcattgcttggtggtacacaagtaataggcttacatggctatgtttgttgtgatagaattacaaatccaggttaggttttagcagtgaaccgtgaacgaactcttccggtgtgagcctgagatctgcggctgcccctgcgccggagctctgaggagtgtggagagagaaagaagaagaggattcgtggtgaaattactaatttgtttttgtaagaaataattttgttaataaatttaagggtaatatagtaattttataacaacttaattttccatcttttgttttttatttttaggttctaatttttatgtatctttttttttttttttttttttaataaacttcgtattatattaaagcaaaatagttagatcttatggtcattatatataaagttcgccggtatggaagatggatcgatcatactagaaacatacttgggaaaaactcacttagccacattatagacaacaaaattacataatcttgaaataaacataaaattacaactaatcaaacgatttgagagacttttacatttaagcacatagttaccaataccccctacgaaagtagttcccttcagtttgttgataactgtctcaaaat

SEQ ID NO: 44082 - DNA, 2240 bp, Cannabis sativa
  modified_base (60)..(63): a, c, t, g, unknown or other
aaaaatcaaatataatgtaaaaactcatttaaaatcaaacataaaaaaaaataataaatnnnntacccaatatatatatatatattatatatttatctctgaataaagagcagctaacatgttcttcataaacaagggttaaaacacttaatattcttattacagatgtaaagtaacttaaaactggatgagcagagaaaaaggagtctaattattgcagtgtttaactagctagctagtccccgttaacaaagcaaaaactctgatatagtataaagttcaccatgattattacacccttaatcaggtcctttaatataattaataattaaaattactagttttttaattcaaactactgcagtggagtggagttgtggaccccaaaggaagggcaaaatgtccaacatcaggtggacagttatatcagtaccccaatgatcagtacctaatgtgaattaaaagttaaaactaatttgttaatatttaattacaatctcccattcccacatgaccttgcctcaccattttgcaagctaagcactcactcatatgtatgtgtctatctttctatttatacatataataatacatttggataatttctttctcttataatatatcatcacattttcccctatctccaactatttttacagactaattttttcatattaattgatttatttcaagtaaataatcgttcagtagccgactcatatattataaagtgtggcttaaattcccattatttatgtatttatagaatacatcactgaaattcatgcacgttgtgttaggtgctgcctccttcttaagttaatttccttgttttcactaatatcccccggctaattgggtcctcggtgtgcataaaaaggttccctcgaattaatcacagccatataatctaccattgcctacgtacccggctatttttctcttatctttcttgggtagaaaaaaaaatatataactacaaccacatatatatttatttttttattaattactgatataacccattttccatttcatctattttcttctcattattattaaaatattgatattgtccatgatttattttatttttattcttattctttaattttttctaattctaataaacaataatacagggtaatgaattcaaagcatattttcccgttcacgtgcagcaagtatggagtgatcatcatcatcatgtatttgatgaacaaaaactaattagatagtcaatggtggtttactttcaaacaaagcaagactagcacttattgccttaccgaaacaaaaacaaaaaataatagaaaaaagataacgaacggatttgattgagataacaataaaccatattcatgtgcaaatgtcaaccacttgaagaagcaaatgcaactcgggcacatgcttccatggcccatttggtttcataaatgtggtgcatttttacaagatatgagttaaataactccactgtcaatttatatttaattaattcatcatatttaagttacccatatttataatacgccaatgtgaaaagggagaaaaaaaataactgttttattagtttaaccaaaaaaaaaaaatcaaaatttgaaaaagatcagcaatatgagaaggaaaaagttgaaaattgaaaacttctcttcaagataaaattgattctcaatttgccatgttcggcaaaagaagaaggggaaaaattaaaattacattacaaatcctacccccaatttcgctcttagcgcttcctttctttcttttttttttttttacctcataattctatcaaattatacttaaaaattaaagaaaccaaaaaaaaaaaaaagcaactacaaattcattatttttatgttgttttgggaccaaaattagcaaataaactagagataagtccatgttaaaatgaatttagagctcccactaagtttcctacactggcatgcactagatcatatgccgaaaatcgggtccgttgtgatgatggatcaaataatcatcgccaccgttggatacgccaaaaatagaactttgactaagaaaatgctgatgctgtgctctatggaaatccttttgccttcggagctccaaaaccttcctgtgcgagttagagtgtttagctgacacgaatgtcggacttgcagcgggtcggtattcgggtacgagtcgacccgacttgtaacggacaccgcaagcattgcatagagtttttgggcccaaaggcccagtcc

SEQ ID NO: 44083 - DNA, 2603 bp, Cannabis sativa
  modified_base (2571)..(2572): a, c, t, g, unknown or other
acgtgtacaactcattacaaaaaacattatgcactattaatatactacccctattcgtcgaccgacattttgatcactccatatgatcttgcattcatgagtctaaaaccgaaagagtgttgatggtaacagtccacgttttccccagtgcttactccaagtataccgcagtacctttcatagaaaccaatcctatctttaaccctgtcatcttcaccatggccgcactccagacctccgttgattatgttagtgatgacaccatagcccggaagtcgattagctgccacgtcagccggtgtcggtatccactcgccaacaataacgtcgtgacaagatggcttattatactgtggagtcatccaaaaccatatagctgtcttgaatgaaacaactgcgtctgttgcaactagatctgggttgcttaatagttccaatccaagtgcttgaccagcgggtccgtagttgtaattactggttatatatcatcacaaatgaacaagtgttaaaaaaggtatgacatgtgcattatatattcatgtgaaaagcactgatcatattattaattctcccagcagatagtagacaatggtcacttactaactgatttgaatgggtccacgaccatagtattttttgccaggaacacaaggccattctgtgctaggtacgcaataagaaccaggctgacctacttcgctgataaagcaatatccccaagcatatggtcctccttctgcggttggccatcctcctgtatatatacaattcgtaaagagacataatcagcaaattgaaaaaaagctacatatatttctttaagaacataaggaacacaagggtcagtaatgaaaatggttacctgtggtctcgtgagaagtttgggcaaggaatgccgcgagttctctcttacgagtttctagagtaccagtagtaccaaagcttggaaaatttctagcggctgttatgaaggcatcgtaggcgtagaagccattgcttttgcatcgagggtcatttctataggtaagcatctcctcgaatattgatggagtaatgatgttgctaatatcttcgggagacgccggaggtggtggtgtgaagggaggaggtggcggagacggtggtgatggtggcgggggtggagaaggagttgggcattggctttggcacttatcaggggcacaatagtcgtcggtttgaccacagtatccgtagttactacagcaaaagccctcagcacaaagagcaccgccagcatcttttccacattctcctgctgctactgcgtaggagctaacatttactagaagaaacaatgcagtaataatactacacaagcacaagtaatagtgtttcattgttgtattttgcttatattattactagtctacttctactaggtttactttcataagatatatcaattctgaatgatatagttgttatatatatagttaaattatctgaagttaactattctacctaactttttctccccatattatagtacacattaatcacgtttcttaaactcaaaatgctttagtttattaatattatcatagtttacttacattacattgcgtgtacatgaaaactatactaatttaaagttcatgagtaataaatatccagttatcacgtgatgcaatttcttgggccatggaactagccgggtagtgcatttgctggggttctcaattttagcacatatatatcttcaaaacaaattaaaagttgctttctctagctggtctatatatataataataatcctttttgttttttgaagctttattgctgttatacctattacgcaaggatgttaatcaaataaatttgtattatttggctcatactctattaaatcattcttaaatgcagattttatatgctgtatcaaacctaatcctataattctttacttcgaaaccatattccaattcacaaatatatatatgccgattgaattagttactttacattgaactttttgtttttcatatataattatttaatgagtgtttttgaaacgagatattaattaagaaagattaagcaaaaacaatagattagagaataagagaacacaactttttacgtggagccttactccatgaaacatttttatatgcctttagctttagctgtacaatttctatagctctaacatatatattcaggtcgtgaaccctacataaaagataaaatgtcttatttataggcagtcatgcttatgggtccggcggatccgggccacactcgggtttattgtaacaaaaaatctactgataggctaattaaaatatattaatcatgcattcttttgagctattgcgttaggtaagtgaggcccaactcttaaaagcaatctgtcgtacgatattgtactgctgatagcgacagacatggacgtgcactatcattggaaaaaaaaaaaaggaatgtcaaagtaatgtggctccctaatataggtgaccccctttttgccttgtgtctggtagaggagaaaaggtcaccagatttatggggattgtgtcagaggcatgccatgtaaagcccgcttagttnntttggaaattagcagttatttatgttaatca

SEQ ID NO: 44084 - DNA, 1814 bp, Cannabis sativa
ctttaacaatttctttagccaaaacaatgaaaccaaacatatcctattttgattacaaaatctgaaaaatgttgtaagcaaacatatcaggtttaatgtgaaagaatatagaatcctatttaataagtaacactttgtcaaaattattccaatcaaatccccaggagacttggtgatataggaagcacagtagttagtcatccaaggaaaatagaaaacaaaaatgaaaaggtaaagattgctttgacctataacataaatattttggtttaatgaggcaaaggaatatgagaagttcaaccatattgattcttggtgtgcatatacttggttgtataaaagctaataattagtatcatatcatacaaaccacactttttttctactagctccagtttgctttgctgtattgaacaaatcattgaagagatttggtagtaaaatattgctgtcaatactaaagtgtatcaattaacatgggtcctatctttgctgtgctgtggctgtcttttgtagattatgaataaataatgtattgagtgattagttaataatggaaatgactgcaatctgcaagacctatgagcttctcttccttgtaggggaattttgttaagaggattagcttaaccctcttgaggcttacatcattttgttgaacttcatcactagttgggttgtggtccaactgttattttttttaacatttgtatgtttctgcagtatattcgttttactttcaaaagctctttggagttttctgtccaaagaataggctctaattgatgtatcattagttgagtatttgagaatactctcattcttttagttccttgtatgtaactcatctcttatttatcttttagtgctatgatccaagccttacaagtcaaaaaagcaaaactagattgtgaccaaaaatgtgtttcatcatgttccaacagtatcaactatcaataattctggaaaaacttggcttcttttttcccatctttttcactaccacagtgtatactaattcctaaccatgtaaaagaactaagaaaaaaaagaaaatcatggagaaaatcttactctggaaccctccaaaatagactctggctttgtaatttttataggcaccactttatttatttatactcaaaattgaataatttcttgtataggcatgaaacaatttggtagggctgcctagcaataaatgttctttggtgtatttaactgtgttttgtggagtagagctgcttttttagataagaaaagtagggttgttgtaatattgaaaacgtctattaaaattggctctgtgtacatataaaattccccaccacaataataagcagttaattatacaatttaattgaaccatgcattccttactttgcaggtccttatttagggttttaatttaggaatcaacattcttattaggcaccaatagtatctaatgtattttataagtggcgtcttatgattagttagtgatattttttaaaaatgttaggcaaacaattatgccttttagcaattctctttaggaatggactggttagaccatctttgatgcaatgtctatatattatgctaaattcagtcgaaaaaaccaacaaatgcatttgttacagtataacattttacaatgcaaattataataaaaagtaaattattaataaattaaatatttaaaaaataattaataataatattataaataaaaaatgtgtattaaaattttatcattaatgattaatgacaaaactataattaaacaatgtgtatttattgaatacaaatttgacacaatactatatttt

SEQ ID NO: 44085 - DNA, 2259 bp, Cannabis sativa
attataaggctttttgattaggaacatgtttatcatatattatatattttaatataaagtagtgagttactgttcgtaacatattataaaaatagaatgttttcacgtgtcatatgtataatataaaaatgtttgtatatatatgtatatatggttgaggaagccaagcattgaaggtgacagagacaacatgcaaggctgaccaaagaatatgtgaggaagtgacttttggattttagaaagaattaaatttgtgtggagaaaaagggtttttattttgtgggatatgaagctaggctcatgtatcaaggccaataataataatcataaggatttatctaaatatatattattatttttgggttgtagtaaagtcactttactgtgtgaataaattgttgggtatgtatatatacatatataaatatggtactaaaaaaaccgtatagtattttcagcctaagaaaaacagcatttatggattggtgggttgtgtagcctgtgacagtggcctcaataatgttcaggttttttttttctttctttatttctttaggccaagaatgtagtggtagtagtagtaggcgggtcccaaaaccaaaccaaaattttacttcattatctaaagtataaataaagatgagtttttttggggtattcaatccagattaagatatatatatatataaaagataacttgtttgaaaattgaaaatgaagagaaaagaaaagatgatgaggtggcaatgggtgttgcggtggagccattttgaccttgatccgtacatctatgggggtgtaggggttcagcactagagcagtgtatgcaggaaactagcagcagtagcagcgtcatctattgctttgattttctctctcttattagagatattaaataatattacactaaatattattccaatctagttaaatgttcatctcaatctcaactcagttcaatctgttgttttccactatcaccaccataaccatttactactctcttctcttgtggtttaaatacgtgttttatgttcagtccatatattttgagaaatgctaaagatactagtgatgtctagtatttttttatgtgttaatatcactattgattacataatagtttttaggaagtatcggtagccaatcacaacgtgacatgtaaagaagatactaggcattactgatgcctaataacaatgctcatatatttttatgttatttaaaataatcgtgctggactaattaatataaacttttttcttatatgtaagtttgaatttgtgttctattttttttttttacaattaatatgaaataactatatatatatttttattgtttatattatttttatataattttttaataatattttacggattattatataaaattaaaatttaaatatttattaataaatactcaaatttcaaattatatattcatatatagttttaattttatattttttttaataattttaatcataaaattataagaccatcttttatgaatggtattaactttttattaaatttggctcaaaaaaaaaaaaaaaaaagttgatattatatttggttaaaattttataattgtgtttcaatgtattattatgagataaagttatttttcataggaaattgtaaaaaaaaaaaatctataaatgcattaaattttgattggcaatgtataaaaatcttattaaatatataaataaattgtaaaagattataaaaggcattaataagtgataaaagagtaaataaaaaaataatatttattgtggtatagaatttagtttatattatattttatgtcaaatttagcataatttttagtacgtcccaaatttagaatacattatacatcactattaaagtttatgaatatgagctaaacaaatatatttacagttttacactatctttataacattccactaaagattctcttttgtgttatacttaagttttttttttttttatcattttattaatttactttttatcaatacatattattattattataaggttttttaacgtagtatgcttttgagatagtctattcgtgcttacatattgtgcctttcaggtttgttgtgtcatatcgtacttaagcccatatttttcgtgtcgtattgtgctaatttatagtattgtatcgggtatgctagcctatatttttcagatttagctgtactcatttaaaaataaaattgatgtcattgcattttgtggatttaaagggagttca

SEQ ID NO: 44086 - DNA, 1586 bp, Cannabis sativa
tttttttttttttttttcaggttcaactcgataaatgcctaagattgaagaaccttttggttgtttttttttctcttttgtaaaaatatttctatatatttgggtttgtttgatttgtaggtatattgcggttttcaaatttaaatatttaatttgtatttagatttggatttttcttttacattgtatgtgttaattttgcaccaatgcaagtttttagaatcgactgttgaaaattaacacaaaaactatcacattttgcatcaacaaagcaacataaaaggtgtatatgtcaattggaaaacaaagcaaattaagatttttctaatgcctaaatattttcaacacacatgcttttacatttagtcatacacatgttacgtataaatattcatactcatactattttttttttttttagactcgcaatgatattcttatattagaaagttttaactaattgaaatatatcttacaataaattgaatctcataaatcctacacaacttaaatatgagaagttgtcgaggaagatatatttttttggtcagctagctagcttcataagtttgaaaaaaaaaatgacactaaagcttaacttgatgtgacaattagtattagcaaaatgaataaaaaacagagagaaaaagaagagaatagagttttctcattaattcaaaataaaagaactatactttatatatcaactgagttgattagatgttagtaacacaaaattgttaaattagaaaatgtacataacagattctaactaactaatatagctcacaattctaaataactttgttttataattttgatactctccctcaagatggagcatgaatgtctaagagtcccatcttgtctttgaacagtttgaactgagctagaaacaatgattttgttagtacgtctacaatctggtctttggtagaaacatgtacagtttttataattccttcttgaatcttttcacgcacaatgtgacaatcaatttcaatatgtttcgtccactcatggtacattggatttgctgcaatatgttgtccagccttattgtcacattgtagaactgctgacctcttatgatcaattttgtgctcctttaagatggataaaagtcacactatttcacatatggtatttgccatgggtcggtattctgccttagcagaagaccttgatatggtatgctatttttttttcttttccaagacactatagaatttccaagaaaaacacaaaaaccactagtagaccttcaagtatcagggcataccgcccaatcagaatctgcataagcttctagcttgattttagatgttgatgaaagcatgataccctatcctggaatagccttgacatactacaacactctttgagctgctgtcatgtgacttactttagaaatagctaaaaattgactaagcttatttatagaaaaagatatgtcgggtctagttatggttaggtattaaagcttaccaaccattttcctgtatagtgtagagttagccaatccttctttattgtcttgagacaatttgaggttggcctccataagggtgcttactggtttactc

SEQ ID NO: 44087 - DNA, 1996 bp, Cannabis sativa
taatctattaacctctcttgagcgatgatagatttaacttaaattaactaacacgatatctctattcaatgttaatcaaataagcactcataaagcaatatgattctatctgagatgggcggggaatgacttcttgtactttgttttaaatcttcgaaaatgccaatattggataatggttgaggtcgacatcgagttgtggaaaataatagtgtacgactatgattctaccatttacaataaaagtgagttgaatgccatcatgaagtcctaggggaaatgttgccttctttgttgcatgcatatgatgagttcctacttaacaatcaaatgctggcagtagatatgaatgactgcagccagacccaaagaatccattacacccgagctagccacgatattgtcctaaaggcaaaattaaggtaaatatcttaattaaaatctctattcttttgtacttattactcatatttttttttttaatgtagtagtgattgtggtatttacaccattgagtatgtgcaatatttgatgatgcaacatcccctagttgatgtccgcaataggaacaagaggacgtttcaggaaagtggtgtgtggatcttttttaccagattcttagttgatacattgatagatatgtgtatttattattctcccatatatattttgaaagagctagggtatttgattggtaatattttgacaatacttgatgtaattgtaattaaattagttttggcaacatagagcgaaatatcaattttaacaagttgtataagttaatattcctgataaaattaaatatgaagaccattgttgaaatctcaaaaaatttaaatgaaaaatcgaaaaaatattaatattgcattgatctattatcgataatacaaatagtgctataaaactaaaaaatgagtttttagtatatattaacaagatagcgacagatcgtcgatgtttttttaataatttcactgagtaattatcaaaccatcgagaaaatatcgataaaatctaaagctacaagaaacacaaatgtttctcacgtaatatcgacaagctatcgatataatattgataaaatatcgataaaaaggtaattgaaaaatattgagttactattatagatggtatatcgatatattatgtattgtttattaacactctgacttgggattaaatttttaaagatatcgacaggatatccacacattgttgatgttttgtcgataattttactttttgaagctacttgccaaaccatcaacaaaatatcgatataatgtcgaaaaaaatctaaagatacaagaaacacaaatgcgggcctttgcatcaacaacatatcgataaaacatcaagaaggcaaaaataacaaattttttaacatatacaaaaaccacctgctaactacccacttttaatgtagaaatcacaaaaaatgagtagttttgaagaataaatatagttcaaaatacatattattgcagctaataatagacaaagcctcaaatacgaactttacatattgctttgttgtggcccagaccgccacagttaacgtagttttgaggtagcatcactcttttatcactagacaagaaacatttctcctaaaattttccagaactgttcttccttggacgacctattagtttcttctccacacaggtaccccaacctcatgttcttgatgtgttttgggagaacccaatcatgctcgtcaccagcgagattgattgtatcatcgtaagtcttcctccatgtatttttcaaataataagaagagcataacatgtacacactcgtattcattttcaataccgcaacacatgcatgagtgcaagggattttcaacaacataaacacgctacatgtgcatatcctttcaactaagttcacattaccgcctcttttaccattttacttaatacagaccactaatttatcccagggattggcatcccaaactaatggtatgatttgggacttctgg

SEQ ID NO: 44088 - DNA, 1061 bp, Cannabis sativa
catttccttttataattcttttctagatttacaagaaaacattctcaataattatactcaattatataaatattagaacaaattattaaataaccattagagcaatacacatacatatatatatatatatatacctttgtatcacaggcctcatccagaacttgagaaggcaggtacatcattagctgatcaccttcatcggcaaaatcaacaacagtagccgccatgggaaggaaatcttcaaagtattgtgaaacttaattttttatagagagagagagagaatgaatgaatgaagggtattaagtttacgaactacaaattctaaactgctacacaactaataaatagtgaacttggagggacaaggtagaggagagagggagagtcacacacctcagcaactgctcttctagcagcgcgtgaattcagcttcctacaaacgacgtcgttttttgttaatacttcgctctctcagagtattttgtcaccattattttttaacaaggtatattttggtattattgtgcgttgtaattgcctttaatttccttcctactataattacgtgggaatcccacgacactagtagtgggtgatggttttcctttacttgtgagcttaattcccattttgaccttttaaaactttctttaaaaacaatattattttttcctaaaaaataaatgattagtacttcaacaattttgctaatatttttttctttctaacagtgcgcaatgaatcaaatcaattatttagagaattcactccctatctcccctactaatttatgtcctcattctcgctccacttctaataatagagtaggggaatacccatcggttatggagaacatatttggtatccattagggatgtaaacggggcgggacgggtgcggggattgctcccccaccccatacccgccccaatacccgtttaaattaaaacgggggcggggcggatattacccgacgagggaaggattcccaaccattacatatatatttttgaaaaaaaaataatatcttaaagagaattaaaaaaaataatcataaa

SEQ ID NO: 44089 - DNA, 1103 bp, Cannabis sativa
caccaaaatggagtcaaaaccatgggacataggcagcccctcaatgaagtccatcgatatatcttcccaaacctgctctggaatgggtaaaggttgtaataacccggcaggggactgagccacatatttgtactgctggcagacaccacattcagcgacgtaccgctgaacatccttccgcattcctggccaataaagatctgcagccacacgttggaaggttttgaacactccagagtgtcctcctaccgaactaccatggtactcttgtaagagtaggggaatgaaaggtgaggaagagggcaacaccaatcgtccccgaaaccgcaaaaccccctgtaccatggcgtatcccccaccatcttgtcccttgtcgagttccctcaaaaccttggaaagaaatgggtccgattgcacttggctttggagatccggaatggagatgacacttggtacggatatggcagccaaggttttgtccatttgaacccgtgaaagagcatccgctgccttgttttctatccccgggcgatactggatctcaaagtcataccccagcaacttagttaaccatttttgatgctcctccgccaccaacctttgctcaagaaggtacttgagacttcgctggtccgttcgcacaataaatcgacgtcccaacaaataagggcgccatttttgtatagccaacacaatggccattaactcccgttcgtagactgatttggcttgcgttcgtggggataaggcttggctgaaataggcaatcggtcgcttgttctgcatcaagacagcccccaaacccacaccagaagcatcagtttcaacaatgaaaggactagagaaatcgggtaaggccaagaccggcaccgagcacatggcctccttaagttgggtaaaggcttgttgggctgccgaattccaattgaaggcatctttcttgagttggtcagtcaacggacgggcaatggagccgtaatggcgcacaaacttcctgtaataccctgttaaccccagaaatcctcttaactctttgatcgtcttcggaatcggccattgtgacatggcagccacctttgccggatcggcagaaactccctgag

SEQ ID NO: 44090 - DNA, 1051 bp, Cannabis sativa
ggcggtggtggaggaggaagtggtggtggtggaggtggcggaggtgggggaagtggcggtggtggcggcggcggtggtggaggaggacaaggtggtgggtggggttggggaggaggtggaaataatgatggacattgttggatttggggatgccaccaacggaaatcaatgggcctgcccaaagccaatccatagggcactaatatatacataaatatacatgtgcacgttgcatgggccatgaacgtaggacgtacgttctcgacaaatttcattatattttgaaatacacaaaaaaatatatattgcataaatatattttatgagatatacttctctaaattcactattatatattttttgccttattatcaattgtttgttactatttcagtttttcctttagactttatgtctcaatgcatttgagtaaaatttttgctattatatatctagaataaaatgatgagtgtgtggattattatgtacttaatcgtatgtttattttttgtatgacatttatatatattgggttaataaaattatagatcttataataaatttttagaccgagttttaataataaaggtaaattccaacatgttttaatcgttagtagattgaaatatagattaattatatcatcaccagttttcactatttattgggatttttttcaaaaggagtttctattgggattgaatatttgatcatcttcaaatatatagatgatttgaatatttgaataagtatatatatttagatgattttcatataacataccacaggaaggaaattatataacacaacaaacaagaaaaagcagaaacaagatggagagtatactgtgggcttaattagagatacgaattggacacaaggcccaacagacaagttcatgacctgatccaacatttctaattctgtaacccaatatgcaaaagatgggctacttaatcaaacttgttagtataccacaactaaaatgataaaaatgattttttttagaattttaagttattacgtacaattaggatcaattttttttttt

SEQ ID NO: 44091 - DNA, 3121 bp, Cannabis sativa
ggattttgttgttgtattttcattttgctgttcttggtcgtaatggtgtagatgaatcagtcaaattacagcctgtttctgttgataacattgattcatctgttgttgttactcatgtaactagtggcagtaatcttaaatttcccattcctccaaaacctactagaagtgtagctagtcctcgaaaaatggctaaccctcctccaaaagtggttacccaagttcatgaaaaggaggcttttcctttcatgaaagcaatgagaaccattgataacaagagtgatccttgtggtgggaggtacatatatgttcatgaacttccttcgaggtttaatgaggatatgttgaaggagtgtaggagtttaagtctttggactaatatgtgtaagttcactactaatgctggacttggtcctccattagagaatgttgagggtgttttttcggatacaggttggtatgcaacaaaccaatttgctgttgatgtcatattcaataacaggatgaagcaatatgaatgcttgacaagagattcatctattgctgctgctgtttttgtacccttttatgctggtttcgatattgctcggtatttgtggggatacaatatttcgacaagggatgcagcttcacttgatttggttgattggcttatgaagaggccggagtgggatgtcatgggtggcaaggatcattttcttgttgctggtagaataacttgggattttagaagattgtctgaggaagaatcggattggggtaacaagcttcttttcttaccagctgcaaagaatatgtctatgcttgttgttgaatcaagtccatggaatgctaatgactttggcattccatatcccacatacttccatccagcaaaagacgaagacgtattcgtctggcaggaccgaatgagaaagctagagcgaaagtggctcttctctttcgctggtgctccacgtcctgacaatcccaaatccatcagaggccagattattgatcaatgcaaaaggtccaaagttgggaaactgttggaatgtgattttggagagagcaagtgtcatttaccaagcagtataatgcagatgtttcagagctctcttttctgcttacaaccgcaaggcgattcctacactcgaagatctgctttcgattcaatgttagccggttgcattcccgtcttctttcatccgggttcagcatacacacaatacacatggcatctccctaaaaactatacaaagtattcggttttcatcccagaagacgatattcgaaagaggaatatcagcatagaggaaaggcttcttcaaatcccaccagaacaggtcaagatcatgagggagaatgttataagccttatcccaacacttgtatatgcagatcctcgctcaaaattggagaccctcaaagatgcctttgatgtttctgtacaagcaattatagacaaagttactaacttgaggagagacatcattgagggtcatacagatgaaaacttcattgaagagaacagttggaagtatgctttgttggaagaaggacaacgtgaagtgggaccccatgaatgggatcctttcttctccaaaccaaagggtgaaaacagtgaatccactgataaatccgcagaggttgcaaaaaaatcatggaagaatgagcagaggaatcaagcatgaaactgaggtaaactatatacacaacagaagtagcaacagtaacagtttataaagtaatgctcttagtatatgcaaacaacagttttagaagtaatgagaaatctttcttcttagttttactgtcttttgttatgacctgagatctttgttaaaacccaaaacatagattaaaattttagtttcatataccatatattattatcattattattttttttctcttattaattattgcataatatgtattctattctgttcaggcattctttttgatgtattgtagtgttgaattttcatcttccatttactggaaataaagtttgatatgatgagcttttcaattttcttttctttttttgttatatgatggattttggaaggtaagaagaatactaataataattccctctcttaaaagaaaaagaataatatatttaattaagtttgttgtagatttgatcactgcccatcttgtatatatggccaattcctattggagaatcaacatgtactaattaattaattaattaagcttaaactcactaaatcacatgcatgcattcattcattgcctgaaagctgtatttgagtaacatgttttattatttatttaattttggaggggacgagttgttgttgttgtgatactacttgttttttttttctcttgagtcaagagaatggaaatctcaaatcttgtcttgcttctgattaataataataataataataataataatattgtccttaaatatggaatagtgttagatgtgtttacagaaaaacgaccaggcaaaatatgtattttgtgggtgttttttgttttgttttattatcttgatagttcattcatacccataaaaagcttcttgtcatttgtgcttgttgtcgtttcagaattttatttttgtgttgatagttttcttcgatggtgtagtttatcttagcatatgatatataatataactgatgttgttgattctgaaaatgtcggtgatttccaaattttatgtcgtttgtttttcaattctaatttttttagtcatatcataataaaataaagtgataatagaaacacaagttttttttttttttaaaaaaaataaaattccaacttaaattggttttattagttacacacttttcttagaaggttttaagttcgactcccccaatctcataaacaaaaaaaaaaaattgacagagagaagttcataaaaagcattctatagaatgtttaacaaaatatataaatattaaaaaaaaatattagtggtggaactcaacacctcattacactggtgaataacttggcctctgattaagattcaaccagctaaggacctctttgatctccaaggcctctgccagctccggccgaatactaccctcccaacgccgagtactagtagagtagacactttatgagatgaagagtctttaaccac

SEQ ID NO: 44092 - DNA, 2717 bp, Cannabis sativa
gtaactacggaaaaactgttttcattaccagtttcattattccgcatttaattaatcaattaattaaataatcaaactgggaatattaaaatacggaatttcaaacatgtttatttacatatttatatatttaatatatagattctattaaatcctgaacatatagttattcacaattatagtgacgtcatcatagtgaaaaataattgtgattatatacttcaaacttatttagtctcgatatttctcagtgtaccagatttacacttatgtgataatcagcgatgtgatctacttacactgtggaaagtgatgcctttttcaaggcattagtaaagtagacttgtatcgaatgtatagatttatattggactgtaccgatattaaatatagaataaatattataaacttaccgttatatctattctgagtcaatatcacttaatttatcatagattattttgatctgaattctattataattagttttaagctaattgtgctattcgagttctttgacttgttcgttaccaatttactataaggagtagcccatacttacatattagaaacagtagtataattagatgggagtattaatcatggatatgaatatttataacttctatgaatgttagaagtgaattgatgattttcttttaatttgattaaagatattgattaagatctcatttcaataattatattagtttattgtaatattatttatgaaaaaaactaagtgttcaaggataataaaatacattaaaagataaaatggtaattttgtttttaatattatgagggctgctcttgtaaattaaccttcatgaatcataataaaatttcaaattttagatttcaaatggattttattttatttttgtggtctttagatatggggcatgattttgtaatattggtaggtatatgacaatgttagaatgaaatattgtgttgtcgaattaattattaataggtaaggtctattattctcgttcgatacatataaatttttaaaagctatgtatatcacatcacatgatatacattttttttctattattttgtcaagttataataataataatttttcttgtggcaatagatggtgatctatttatttatagagaaatctgaaaaagatcactagtagcatcatcatctaatatgtaatattgttattattaaaattaagtattggatctcatataattaaatttaataactattatagaatattgtcaaccaatcgtaaaacaccacatttaaatagtactaaacaccactaatacgttatagcaatgttcttatttatagtacgtcagtgtaagacataaaattaatcctagagggtaaataaacattttcaaaaagtaaaaataagaagaaagagctaatcctataatattgaatgtcttaaagagaaacacattgtttcaataaaagaaagcagaacaggaaactcaaaggcagaagagtagagctctacataagaagaaatgtggagcaaaacttagaaaggaagagaaggtgtgatgagcagcagatgagaattagcgcatgtggaaaaatcagaacatgaaagaagaatgaatcaagcattctttttcgcctataaatagaagaccctgtcattcaaaacaggtgacaatgaatttttgatcacactagactagccgaaactatgttggaatacaccctcaaattcgtaagtgaattcaaagagcagacaacccaaacccgactggagtgaattgagaggaaattgtgtaaatcgattaagtatgctatttgactagattgaacttggtataaagaattcaaagtcttaataatatttattgttgagctaagtttcaatatcaatagttgacgtcgtctgtgggaacctcttgaacgaaaaagttgaagctaaggatacaaacttgtatggtactaaattaggtatgtagtggaagaattgtatatctaattatcattgtaccatagttccaatgatctttagatatatatatatatctattaaatcaaaatataaagtacatgaaagaaataaatacctcttgatgactatcagggtatcctcaaaatctctcgtaagttggatctaataaatcctcacactgtagtcttccaaatcgatccaccacacgcaaggagtagtgtgggctactaggacaaagtgtataatttgttcttcttgaattcccaacacatgaggaagaacaatttgagagaagaaaataatttttcttttctgctctagtattttgaaaataactgtgtagaaaaagcatcatctgatttctcaaatcgggcttctatttatagtagttaattctcactgaattaaataatattcaattatttaaataaatatctataaccgaatttggttactgatatttctgatgaggaaatctctcaaccacttgagagaatatctcaactactttgaaaaaatatctcaaccaacttgtaaatatctttaatcactttttaaatttaaatattatataattaaattaattaattaattaacagacaaaataaataggcacatcctactatagggtgcgtataccttttcttaattaagacaatgatggtgtcttttattctaacaacttttgtcttaataatttttatcttgacaatttttatcttaataatttttgtcttgacaaattttgtcttaacaacttttgtctttt

SEQ ID NO: 44093 - DNA, 1530 bp, Cannabis sativa
tttgagttgacataattttacaagtaccaagttaacactaacaccataacatgtctcaacaaacaaagtaactctttgcatcatcacatacctttcctgtaagtgttaacttagcacaagtgggattctcaggatctatcttaccacaagttccaacagtatgttcactaacagtaagtgaagcccttggatctttcaaagcatctcttgcagttggatcaagagctgtcaagtagaaatatgggacacctttgcctttaccaggtaccccatcactaaatgaaaccacattcctggatagtattatttaacacaataatgtcagggttaatatattttggttgggaaaattgggtttttaactaatgatgaagtttacaataaacaggcaaaataagctgaacaagaagaacatataagagaataaggaaaaccttacccaaaaggtgctcctttcaagtcacttgaaatggtactacaaaattaaaacaattaactgtaagttacaaagatttagagcttatttccaacaaagataataaggcaattgggaagtattaatcaaactatgaacaactaagaataaataaccattcttaagcaaagcagagtagaataacaaaaattcattccagaattaaatgatgccccaaaagaagaaaaaaaaaatgggtttttgatcagcaacaaaacaaaattatataatgaatcgaaagcccagaattccaacgaggcagagaatacaagagagacgacccatataaagtaaaagagaaagagagggaaattgacatactttaagacaccccaggaattttgagcgaccaaccaacgagcagtagcagcagcatcattagggtctggtttcttgttcagtgataaaagccgtccctgtacacaatcttggacagccaagaaaactgaaaccaaacacagcaaatacagaaagggaacacctttgcctattgtcatgttgtttataccaatcatatattattttagttcgttttctctttatatataatgaaagagccaaggttgagtggagtatttatttctgtattcaataatatgctaatcgataatgcataaatatatatcctaaaggataatatatatcttttaattttaagaaaaaaaataatttacaacataaatattaaatttagtatcttcaatggaaacaatatttataattgttaaaatacatatatcattctaaaatatttattttttactattaattaaattttttatttttactttgatatctaccaaatcattttctgactgttaaaaattggaatatttacatgaatatgagaaaaataaaattaatttatataaatatgataagaaaacttaataaaaaaaatatggtatttaaaataaaacattaacatatatgagatatgccactttaaattaccacataaaaaatattaaaattcgctaataaaataaaataaataaaactacagtgattgccggagttgtcaacaatgctggaaaaaggcatcgtagtttgat

SEQ ID NO: 44094 - DNA, 4346 bp, Cannabis sativa
tttggatattcttctaataagttttattctttgggcacgctctcgtggactagtagcaatttggattgctgataccacatataaattttgtgtgttatttatttcatatttatatttatcttcaaatataaattgtttaaacatatcatgtttctatttaaatatttttgtgtctgtgtaaatatttatgtaactgaataacaattaatattttaattatttaagtttgtaatcataaataatagaattttaaattgcacacatcttgtcctcataatgatgaataaaataatttttttcatttaaatttttatataaaggatcaaagaaatgagttagtcttagaattttcattttatagtttttttttttggcaaagcatacaaaaatgtaattttttcttttttgaaaaaaatattttatgggaaaaattaaaaaatatggaaaaaactatttagggttaatctttaagataaccaaagagtaaccagttacttccttagaataaataattaccttgtgctgtttttttttctaatttttttttttaatttttcctttaaaatctatattttttcaaaatcatatatttgcacaatttgtataaataccctataataaaataggtaattatacatatattttgccagggatttaaaaagaaaaaagttcatttttcaagtaagatgaatatttgatagggttctaacaacttttgttgttttcttgtacttatttttgagaaaaataaaataaaaaaggtaatgacttaatgagtaaaacaaccattgagttaagaaagaaccaacggtcaagtaaacttggcgggaaggttaactgttttttcatttatttattaatatttatatttgaacaaaaaataaaaataaaaaataggatagttaagtgtgaatgtgaactgatttaagttttaatggaagtaaatgtgggccactcttatttggaattttggggtaagcctctcacaagcaatctcttaatactactttcggtgttatttttggactcttttttctctcaaattctataaataactttccatttcccaccatttctactctactctactctctctcaccttcttcttcttcttcatttttcatatttataaccaattctggatgattctgccttctgggtattttaataggttccaattttggaagttctaagtagagattgataaaaaaaaaagttcactttttggaggtttgactgttgactttaagcaatatctgtttctgggtattgctcaaaatttgatttttctttttagtgttttgtttgttttgggatataatattttgtggggtgtgggggtgatttaaaacaaaacttgtactgcatttgtttttttaaagacaatgattgatctgttgtacacaaggaacatactatggaaatcttactcaattcttggtaagaaatcaactgtttctaaaagcttttacttttggattttccaaatcttcaatagatacagcttaggtacttagctaaaacaaacagtccaaacaagtcatacaataatctttccaagtttgctttcttctcaatttgcttaaattctattatacataagaaaatctgttagttaattagttagtgagacataatatgaccaatatgggaggagcatcacttcctcctggttttagatttcatccaactgatgaagaattggtgggatattacctcaaaagaaaagtggaaggactcgaaatcgagcttgaagttattccggtcatcgatttgtacaagtttgatccttgggaattgcctggtacttaactaaattttcaatcttttaagtttttattgaagctaaactaagtgcattgttttttagtactactcatgtttcatatgttttttgagtacttttctttttatctcatcttttgggacagaatgtgtttcaaatgtccttccttttctttaatggggccatggttttttttactacaagaactgtaaaagcaaaagttttagaaatctgatgtgtaaagctatctttctatacttgtagagaaatcattccttccaaaaagagatatggaatggttcttcttctgtccaagggacagaaaatacccgaatggttcaagaacaaaccgagctactaaagctggctactggaaagccactgggaaagacaggaaagttgtgtgtcaatctggtagtgtaactgcataccgaaagacccttgttttctactgtggacgcgctcctttaggagaccgaacagattggatcatgcacgaatatcgcctttcagatgattttactcaaggcgcgcctagttttcatgtaaaaattcctctattttcattttgttttaacttgtttagctcagaaaactgatggaaataggctgcagggtggctatgcattgtgtcgagttgtgaaaaagaatgagaatggacagaagctcaatgattggcttggagaaccgaaaggtaagaagattggaagtagctcaagtaatggtgggcttattttgaatgagcctttgggaataaactctggtgaagcttcatctcatgcgagtcgatactcgagtcctataatgtctccaaatgaagtgactcctgtatcagattttgagccatctgtgacacaaaccaaccctgcaagcttttgggtctcaccagacttaattttggattcatcaaaggtactaattagtctttttttcagtgaaagaactaagacatttttaagtactcaattgtcttaatttcggtttattacaggactatccacaacttcaagcagctataccagattactttggacaatatgagtgtccaagctcatcaatgacaccatggcaatcatatcatgaacacactgagatttcacctagttcatcatactcgaatttgaatggtggaattgaactttctgatacaagttacatggatttttatggaaatgaagttatggaatatgaaggttatggccagaccaactcaatgagttatatgcaaccattctaataagcaaaaaaaaagatgtcattttgactcttttccaatgcagagtgtcaaaattagcttcaatttgcagaaagtctatggctgcaacaacaccatttgatcattttagcattaaccaactgggaagatcatgtactgattcgtagagaaatcgcccgagacaacgcattttaaagttggttcttggtagtagtagagaaaaataatgagtataaactccttcaaatctattaagctgaagtagttttatgacttttgcttgcttttctttgttcgaattaagctgcttacgtatcctttttgttctttatttcggttttgtgtttttttcactttgtaccaggtgaaatcacttttatcaatttcatctgtagttggtttttggagtaaaaaactaaatgatgaataaatttgtcttctttgcattaaagcttcaaactttttgcatataaattcttatttcaatgaagaccaaactaaacatattctctcttttatgtaattttgggaattcaatcatttttttatcattctttttggtggggtcttgtagttgttgagcagctattattaactcaactttttgtagaactctaaccaaagattcttactgtggtaatgtgaagtgtgaactgaaaatcagtagttaatttttctttttgatctttttaatgaccaaagtagagttgttatcttcaatcactgttaatggtcaaaaaaaatgttcaaagattatctcagactgaaatatattcccttcatgattaaaagtttttaaggataaaattcacatttttagtgttgataataagttatttggtacaagtttaaaattattttcatgtgtttggggggtcactggttttggtagatatatcaaagaatcacacttaatatgagtatcttaaacatgagattaggataggaaagagggtcttgtcaaggtttacatagccaatatttatctttctatagccaaataaaagaaatgaataattagactttttgacccttaattttttttatacaattaacttgtatctcttttcatcatattctatttaatttatcattaaacgaataacacaatagatgatggtcgatagataaatacaaagtatatgcctttcattttattttttacattaaaaaaataaaaattattattattataaagaaacggcctttattctaacgtaaaaatagtaaaaaaaatatttaatttgtaactatttatcaattattatccactactttactcatttcgcgataaaattaaataaaatataattgaaaaactatgttattataaaaattatattt

SEQ ID NO: 44095 - DNA, 2511 bp, Cannabis sativa
  modified_base (91)..(98): a, c, t, g, unknown or other
acaagaaaaaaaatttaattatttttttatcaattatttttatacattttaaattttattccattcctattcccattcccattcctattcnnnnnnnntcattcctcccaaccaaatgccttaatatcctaagtttaaattcttttggagatgaaagaaataaaataagggtggataaatagtataatggtggttacattgtaaagacatttcaacgtttttagaaatataattgtaatggtggttccattacaatcacaattacaattacgcctaaccaaacatgacatagatttataatatgtttgggagagcagagttttctctttcttttttttgaacaaagagttgtttcaatttctacgaatatacttaaaatgtcttcatgttaatttttcagccacctgcctttcccaaggaaacacctgtatcaataaaatcttatatagaagagacatatctcttgccaaggctggactctgaattattttcaccggaaaaggctggaaggcagtgggattttgactggtttgacagggcaaagatacagttggagccatctttgccgcgcaaggttataattcccacatgggtgttgccctttagacgtccaaagcaagaaagatgggaaccgggctcagtgcaggtatggacgagcgtagtttagaccttgtgtttagacaaatatacaataagtgttgttatttggcaccttaaagacacacaggaagtggtaccttatgaatgaatagatacaatttttcaatgttacttattaaattaaaatatgtgggtccgattgcttaaaaaaaatttgttagtctaatattaaattacaccaataacgatataactatttatggtgttgagtatggttggtgccccttagcggtacttttggttaataccttcttctttggaacatgaattctctgatgaacttatttgaaaattaaaatcagctagggctctgttgtttatttttatctgtagtttgttttatggattatttcattttaggtggatgtatcagaattaacagtagaagctcaagaatctggttcattgccccgcatgaatggtcctgcaaaggattttctaagaggaagcattaataaccgcccttttcgtccaggtggtttggatgattcccaatccttagaaagggttctacctgatggtgcttccaatggtgaatgggttcatgaacttctaaatggtggcccttctcagactactcctccgggctttaagcaaggattagaccttggtgaacttaaggttaattttctttttgtgtgtagattaagaagcagtatactatctattttgtcatatactataccatcacagaaagtgtaacagtgctgacctagtgatgtttgaacatttttgaaggcttatccttgtgcatggaatgttagcaaggatcaaactctgacaaataatacagaacaaaaccaggtcagctatgtatcttgttcatatattagatctatatttctatagtagatcatgctagttttatagaatatagttgctctactcatctcaagttttgtcttctttcttatgtattgctgccatttgcagactgaattatctgtacagtttgatgacttattcaaaaaggcttgggaagaggatatcactgaatttgtagaagatggtacaaatgctatgccatttcacttgtttcacatgtgcactttttttgtttctcttcataaactattaattcatgaaaaagattcacagatgagctttgctgcttgaaataataatactaaggtggcttattttttatgagcgcaggccttcttggccttatttggcatattgcaagaacttgaattgcaacttagttatttctttgaggttgcatgtttatttttttgaatacaaatcatagacactcttaattacaaggtttaggtatgaaaaaaagaagtgatttgtttaagcaatatgagatttcagatttgaattggatttgagctttttattctgggtgaaggattttggaatggtacctgatatggcaggacaaaattcttgtttgatttagttgagcttttttcatacttcaaattgctttacctattgttgtagtggtctgtgaacttgggtttggtattagttggtttatcaatctgcatttaaactagttctgtttttctgttgctcgttttactctttattttagataatctagtgcttaatataattttcatttgccaggaacggagtctattcattcagaagctgaagcagagcctgtaaaatctgatgctgaggctgagtctgctaagcccaaagctaaagcagaaagggatatgcccataaacgcttctaatactgaattatctgcactggatgcgattttatcagtcaaagcagaagaatcaacagcaatattggacaattgcgaggctggtggggagcacccaaaagaggtaacaattagcattgagagctgctataagaaaacttccatatctatttatttca

SEQ ID NO: 44096 - DNA, 1300 bp, Cannabis sativa
cattatgaaagccctgcagccctagctagctacctagctttactcagaaattattattattattattatgtttctttttggctggaatctgtctggaactggtggtgatttcagttaaataatgtgttgttgtgtgtgctgtgatttagtagtttatttaattaattattggataatattattttatactgctacacgtttaaaatgataataaagaatatgtctctgtggattgtacttgttatggtttatgttataaccaaaaaactattttaatgagcttctgcaatgtgccaagagaattgaaatacaactcactattaaagcatatcaccatctttcatttaaagatataaaaagatcctaattttcttgtgcagtgattatcgcgattatttttatttagtactagtagtgtccaatattttctataagtaatataataccaaaaaaattaaaaagaattcttctagcaaactaattttattttcaaattaatttcatttactatttctcattacataagagtataaatattgtcatacacaagacatgtaacaatcatatttttttaatttattttaaaaaatatcacattttttttaaataagtgtctaattttttttccaactaaatctataagggaacaactttataagaggaaaaaagtgagtcctaacaaaagaaaccaaattgcaaatatgaatatgagctaaaaactggtttatcatcacaccaaatcaaacatcctcctcaccaatttggtgagcaataaagcgattaattacatcaataaataactaagagcaatcatcctttagggtactctattaacattgcaaactaataagccaaaaattaattaaatattaatatattgtaaagtactaataaaatcccacgaaatgattttttttttttttttggttactacgttaaaaggaattatttcatattcaaccaaaaagaaaagagtcaaaattataattacaaaaatatggattattatttttacattattgtgtttttttttttttgttttgtttttttttctttttcatattatgctgttttcacgtggttatgcaaaattttaattaaattaataaaaattgtaaatatatatatatatataaacttaattgtataaaattttcaaaaaaaaaaaaaacttaactgtataaatgttaaaaattaacccacaaggttactttgtgtaaaaaaatggcaaaaagagaatttaagagtatgtttggtattgttttctattttttgttttcaaaaaattgtttttagaaat

SEQ ID NO: 44097 - DNA, 2667 bp, Cannabis sativa
  modified_base (1931)..(1942): a, c, t, g, unknown or other
  modified_base (2638)..(2641): a, c, t, g, unknown or other
tcataagtattgtgggtagcgtgcttaattatttagggcgttacaatttgggtctaagccaaacaccattaaatttttaaaatgataaaaaaaaatattttctgttctcattttgaaaacacaattctgaaaactgaaaactaaaaactaaaaacacaaccaaatagcctctaggtatcccagttgtctagtttgacaacgatagtactatttaaataccagtataggtatcaagaatgttttattagattgcatctagaatgtttatccggtgtagtgatgtttatggtttgcctcatgagactattgtttgttcattatgaattgttgttataattatgataataagtatgggcttactcttgttttaacttggattgattatctatctcatttatgttgttaattacttttcttgttaagtctcgcgattcacgggtactttgaggtgtaggtaagggcaagagaaaattaggccagtcatgagattactgtcttctcttacaaatgtacatattaacttatccgattatgggattgagttattttgggttgtacctaatgtgtattttcaactagtgtatataaccctttttgtaaaacttttctaatagcaaattcccgaaataaatttttagcgatgtcatcatgttcattactatggttttattttagtaaagtatatactattatcacgaatttgattaaatagttaatctactattagtaaattatatttcaaaaacaacacgtgatgtctttagaaattagggcgttacatttatataaattcctttatttaaattaatactcaaattcattaatttttttattgaaaatatctaaactatcaacacccgagattggagctacaaaattaatttgccttttttttttattcaaattagctattgattttttggctcctaaactaggaggcttcaaccgatcaatcaccggagtcgaagtttctcaccttggcttccagaaccaccacgaagaatttcaaatcgagaccacttgacatatgccaagtttcgaaaaacactggtggctttaatgaaatctccatacttcgaacgataaccacgagccacattaggaggaagaagagtacattcataaataggatggcctataatgccacaacaataacaaagctccggaagcctttcatatttcaaaggaattttttattttggttcaaccttaatcaaatcaatttgtcaacagtttcggaagaggcttgataatgtctacgcctatatgaacacgaataaattaacccaaataatctcccgatgaattagtatcaatctcaattaagttctctatccatattttaagtcatacaagtaggaatcatatgaaattaagcccaaaatttaactcaatcaaaattgagtttagtataattggaacttctaaagccaataccggttagtactttttaacaatttctacataaatgttagattttatgaatttattatattggttaactaaactttaaggtcaagaattagattggccacaaactaattataaaggctatgtgttaatttatttggctgacactttttcaagaaatggtactatttattaataaccattagacatgggcatgtgtgatgtctaagttggcttaattaatagttagcattatttgtatcacatgaaacatttaatgatgtaagagtataattaatgaagtgattagcacatttagatatcctcataataagaattgtgctatatcctccaatgtacaattataaacaattagagcatcactaatggtagtattgattttaaaaatttacacataatttaaaagtataatattttattttatttatcacattatttttgtcattcttatttctaaaaacactccaatatacaacactctttaaaaatactataattannnnnnnnnnnnttattatttaatatatatcttaattttcagctataataactttttagtttcaatttttattaaaaaaaatgaatagcattaatgctacaacatagcatccatgcacattttctaaaatgacatcattttctctctaaaggtatatcatctcaatattttaccacataatatgtctacctcactaagcattttctaaagttttaccattgaagatgctataaagcttagatttaaaatttaatgtttaattaatattttattaaaaatataaaaacaataactctatcattaattttattgtataaaataataaaataaaaatataaattatccataatttaatatagttaaataaattaataaaatattaaatgacataaaaataaataaaaaatagtgtatttatgataatgtaaattttgtatcataaatgttgtgctaaatttgacataatatttattaagtgtaaaatttacacattttttaacacaccattatagtatttgtttttgttaagtgaactatattttaattttgtatctttattagctagagatgctctaataagacatgtgagatcatctccaattgatggtgtagattttgtgctaaattcggcttaaaaaatcaatcaatattatatctgactcaaatttacaattgtactctaatacactaaggtggcgtttggttggnnnnaatgaaatggaatggaatggaaataa

SEQ ID NO: 44098 - DNA, 1020 bp, Cannabis sativa
tataccatttcagtggcaatcctctgtattcaaaccaaatggtgtcaacaccaggaggaagtgtactactgaagtggggtttaatttgagaagccaacaaaggaaggtatcctagccgaggagccaaaatctgaaacaagaaaagaagctgatatagttcaaaaagaaaaagttttgcgtgacaccattgatattctacttagttactaatgaacatacaatacaagtacatgagaaattcattgatttagaagaactaaactacgaaagttaaagcccaccaaaccagggataaaaaccaaagttacaccaagataatttcaaggcaaagcatttgcaaaatatgtcaaaatcaaaataaaaaattaattaaaaaagaaaacccagattaatgtcattgtgtgttaaataaaactaaatgaaaaatgtttttgctttacaaaatcacgttttacatgaaaaaacaggtatcacaaatagaaagtaaccctacccaggaagaggaaaatgcaataaaaccatccaaacctggaatcataaatatgaaaattgtatggttttatggttgagataataaaaaaggtaacatactagggctggaggaggagaaggaacagtggtgacttcggattcgtgaagatgaatctgaagtgggatcgctccttgccaaacaaactttcttgcttcccaattagtcatcctccctcttactcccacagatcattcacacaaacacacacacttttactctctctctctctcgtagaggtggtgatgagcacagttgaattgaatttggttttggttttggaacgacaaaattaatgggaagaagcaaacacagactccgagccaaaggagccaattttaatttaagggtatttttatttttctaccccaaaacagtttttttattattattatttttacgaaattttacccaaaaactcctaaattataaccctttaatttattgtgaaaatttgcatacaatacacaatacacaaaaaaaaaaaaaaa

SEQ ID NO: 44099 - DNA, 2968 bp, Cannabis sativa
  modified_base (27)..(29): a, c, t, g, unknown or other
actaatcagattgtaaagagttttatnnngggcataaaacccaacaaggtgtggtcggagcacggtgcttccagtctaaactctgacaccacacaggtgaaaccgagagagagaatgggaaagaaagagaaagagaatgagatgaattctatgttttagaggctctaggctttgggaaaacttaaaatatacgatttccaactttctttacaaaaacatagcataaaaaaacccacccgtaatcccaaaacattatttatttataccatataaaattaactcttataattttccctactaatttgtagttttttcatttatgcccacaatccaatcacatgcgcactatcattgcagcctccttccccaacaaaaacgctttgtgatcattgatcactcttgttctttgaattttctcggagaaaatctcaaggatgagatctccgagaaaattgaagtctacctctaaatccgattccaattgtatggagttggttctccatactatttcggcgaatgtcgagcacccggttccgttgaccgttttcgacccgaaatcccatgggcagataagcttgagactgtccccaagttttagtccaagttcagtagagaccgtgttcagaaaaggggctcgtaatgtagataaggtgttccatttggcgacttcaactagcgtgagacgatctcctaggctctcttcgggctcaaatgagttgaaatcgagcaatgtggctccaagattaggttcgcaactactgttggagtcttcaaatagccggagaaggtccccaacgctagatccgagtccgtcagaggtcaaaaagagcaatgtgggtaagctactgggtaagaggggatctgcaaagtgtgagatggaattattagacgaagtggctgtgagaaggtctccaaggttttcaccacctgcggtggctgtggctgatagtgacattactaaaagtaaatcgaaatcttctaatgccatggtacgctctctatcttttctttcttttttttttcttgcaaattttcactattcagaatgcatgaaatagtttagtgaagtttttttttttttttcagcataaagtagtagcttaattattttcaaagtaaaggagaagaaaaaaaaaagttcactacattaatgctagtttgacagcttcaaacaaattgtcttttttgctgaatctttaaacaaattgtcattaatggaagtaattactccataaaagttttgagagagtggaaatgtatcatttttgaagcggtccatttagctgggctacatttgacatttatgttgcttttttgtgcaagtgaaattcaacttttttgtattatgttgccagagtgttgaaatacagagcaacagtaaattttgatttttcattatagaattggctactgggttttcttctgccatgggcagctattttgatgtagaatatggtataatatttaacttctttattttgtgggaactgggaagtcctttccttttaacttactctacatgtaaaagagaaaagtagaacagtttctagtttcatttcacatttctgggctgtggtcgacactcttaccaatctagaaaccgctgaaggaaaaaaaaacatatatatatgcatggcataattcaatggcaggattacacagtgcataagacactacaacgattaaagctgacttagaaaattccataaacacagtctctcactcatttctaatcccaaaaaaccatatccaatagaaaatttatgaggttgaacaagtgacttcgtttgaaactaggctcccgcctcacccgacaatatttggagaagtccgatgttgactaggatggctgccccaatagcagatggtcacttgttgtgggtatttgttggaaaaaacaacaatgaaattatagtaattactatgtaggtatctaaaagtgactcgaatctccgacactatgggagcaaacctcatgcttgaccatttaagctacttttttttttgtagggtgagcagtgactttgaatcataaagatttcataatattattctctcttctttttttttttttttgcaaagatgagatttcataataatttagtagacactttatggagattaaaagaaggtagctatcaaacactacatttccaagagttaattgtcgtggatgtgctctctttgggttgtaaaattttaagacaataaaatgtaattgttggagtcctcacttcgcagaagattagggatggcaggggccatatatggtggaagcggggtcatttctcgtcctgccatgcccatgtgcatcccttgattgctcatctctaacataacttttaactgttaacacatttacactaaaatatgtttggggtctgaaacatatttttaagagaactttctttttatgtaaaaaagtaggaaagttacttactgctatcaaaatttatataagatttttagttgtcgattttcaaacacattttgatataacaaattacaaggaaaacttatggcacacttaggctagataattaggtatcctggatggaaaaattcctccacctatttgtaattgtgtcctatgcaatcttataatggtagtcttttttggaagaaaacatatataaatttcatgggatatttctttattttggcatgtcaaattgagattattttgtgggtaatgttagcttttgaagctactagagaaaacaagtaacactatggaaacattgtgaagagatgctggattgtgaaagaaggggttcaaggttaggacagctatataaatactcaaagtgtggcaggttgtgttggagttcggattgggtctatgatacactcttgtagtgtatctgctctcacagcagtaacaaataggaatcaaaagaaatcgaagacagttatagaggatatcagggtatggagcaaagatacctttgccaaaatcatttgatga

SEQ ID NO: 44100 - DNA, 4522 bp, Cannabis sativa
  modified_base (126)..(140): a, c, t, g, unknown or other
  modified_base (773)..(779): a, c, t, g, unknown or other
ctcatatattgaactatataataatataattcctcaatcattcataattatctaattagggttttgctaatccctttcttaacttaggatattacaattactccactataaatatggaattgaacnnnnnnnnnnnnnnnaattatatttactgagtttaactgtaatgtccattaatataatcaattccagtgatagcccttcatgtgttcgttcgtcattagttttagttaaattactgtctaattacttctttctcccttagaaccattaattcacttgtggaggtataatttagatcccatctaattttgtacacaatattccagttctagatttaacacttaaagggaaccaggatttgatttgttagaaaagttaggattccatattgtaaatcatgtttctagccatccacattattagattcctaaaatagaagtcgtaagaattatcttctctgagaaactttaacgagtgaatcaaagaaactaataacatgaataggagttcatgataactcaggatttaggccgatctactattgatcatcgttacgatatgaatttggtctttataataaatgacatgttaataaatacaactttattcatatataatgtctattatatacatcaccttcactttcatgtcatactacatccgtaatccgaaccaagattacgtgcaccaaaaaataggcatcagtgaaccgtactagcaaccgttgattaaagattaccaaactttaatatgttgctgactgttttatnnnnnnntaagtggtcttagttctctgtacagctacaagtcacatcctcatgtatgaataaggaattttttcgatatttaatataaattattcaataataatattaataacttaacattcaagcatatatcaaatgtttaattctgaataatcaaaaatatccttacaagcttttcagaacataaaccctaacaactttctcccaaagtaaggctttgacaagtcttctcctaaagacccttctcttgttcaatggagttcttcaactcttttctaggtttttacaaaagaaactctctcctcacaaagataaaaatatgaaaaatgaaactagaagaggtaaaaatatttggctgctctctaagtcttatttatagaacatagaaatcttaaaaatagccacaaacacgttttcaaagctatacaagaatttcctaaaaaaatacctaatttgcaacatcaagattgaattttgctatagcagatcaggaccaaacaggaaacttttcaaaaaggaccaagattacaatttggtcttcaatatcttctaaataaagattatttgattttttatatacatagcaaagccaaaattaacatttagaaaaagaaaaagttaacttcttaaaaatagacaactttttataaagagactacctacttttgtaaaagagttgcctaaacaaaaaattccagttgtaaataaaactttccttaaagaaaaagagcaatcaatgtcacgaaattaagccaaaaaaacaccatataattcacaaataaattaaataatattttgacaaataaattgccaaaaatgacctaacaatcttctcatttgacactttagataatcaaaatattttttaattttcaaatacctgcaaaataaagttagtaatatcacagaaataaactcttcctgaaaagcacaccattgacacaaaacacaatgctaactttaataaaagtttaacacataaaccaaactcaactttctctgaaaaaaaaaatatccagagttgaacacacaaaccaaaaattaaaaattactactctctctttttgtttatctcgagggtcaaataactcaaagatgaactcgaagtgtcgaataactttcaaagaaactgtccctcatagaaaaaacacttttattttttaaaattatttttttaatgaggtcacacgaaaataagaggggaaataataaaaaatgaaacaaatgggcaattgaacaagatttctcacaacatatgaaataagtgctgaaatagaaaaaaaaaaccatggtcaataatctcataaaccacaattaataagagattatttataaaatacaaatcaacacttatcaaaagaaagataattgacaaattttcctagcccataagtcaagtcacgcgactcccccccctcctttttttaatattattttttttcaaataaaaaagagacaaagaaactaaaatattttatacaaaaatcaagtaattctagtgcatgcatctttccaagtttcataaaaaggacaaataaccatgttatgctttcaaagaggataaaaatttagtatctcaaatacaaaccatacttaccagatattatgaaaaaataaacaagttacatgaaatattatgtgaatcaatttttttaatttaaaaggagaagacttataaaattgtacaaacttataaaatattatgatttttattttttgcatttttcaatttgatcccgcaattagatgttgtcaaacaatactgaatgtagcccttttctatgaaagtccatcatcttcataattcctaattacaaagttccagcttactcgaaagatgatttttacacttcatatatgtagctctattctagcaaggggtctgataagaaactgaaataaaaattgctcaactctgtattaatactttaatttatcccaatccctcatatgaatattttaacccaacctaaaaagtataaagagtacaagacatgcaatggtcagggaatattaatggtcgccttaaatgcaatgtacgaaatcgaggcatattaatgatggccatcatcgttttgctactggagattccacatgctccctcaagccgcgtgatgcgaacaaaccaagaaattgacgagacatgtgctccactcatggaatatggaaggtccacaaccttccacgaccttctgccttgaaattttaaagggcctaaaccgatcatggccccgcataccacaatagatctggatggtagttgcaagcctccatgactctcaaaccccgaaggcttggaagaacattctgtaaaaatttggcaagaacattcttgtgtgaaatactccatagccaaagagctcaataatattgactagtgaactaaaatttattaacgctctaatcatgtaaaaatctttatcttcctattattccttaaatattttttacttagtttaatctgttagtgtttcggtttctaaaaatctcggtaaacaataataataattatttttttatttactttacatcttgtatattggagtgcacttgtaaatagttgatcaaatataacacacatttaaaaatgagtaattggcggtaaaaccctctcaacttttaatttacttgcaaataaccatccaaccttatattttggtgggaaaaccctccaaagtgctaaccgttagcaaattgaaggtgccatccatttatctcagttaactgctgacatggactgcctacgtgtacatcatgtacacatggcatatttatattggtccacttaatataattatttaaaaaattataaaaaaataattttcaattaatgaataataaaaaataatttattttttcttttctttttttttcgtgttcttcattcataatttttttttttcagtttttatattacttcattcttcatcttcttcatactaccccatcatcaatcaccattaaaaccaccatccaccacccatctgaatcatatatacataaaaaaaaaaaaatctaaacttttcacaaaaatcaaacccaaatatcacaaatctaaaacacaactatcaacatcgaaaaacccagaacaaaatccaccatgtttatataaaatccaaaacctagaacaaaatctaataatacataacagaatcaaaataatccaaatcaaaaattctaaatctaattctaaccatatataatatttaacccaaaacaaaacattcaatctcaagaaaacaaaaaccaaattaaagaaaaagagacatccaaagaaatccacactcaacctccatagctgccccaatcgacctcagttttgcccaaattccagccacctattgttcatttttttctcgcccaaaactccatccctacccattccatctcggttgacccacttcccgatgagcttcacccccaccaccctatctcgcctgagccacggtaccccttcaactccgtttagctctctggatctccaccactttctctcgcctaaaacgtcatcatgcccagccattcgcataacactcccctcatctctctcactctctttcattcctctcgcccacctatggacacaacaatagccaccatttcatttttcccatctcgcttgaaataccaccgtctgagtaatagtgttgaatgttgggatcttttcagatctggaggaagaaagagacttgaggagagagggtaggaaacaaatcgttgagagggagagagaaagtaagggaaaataaaaa

SEQ ID NO: 44101 - DNA, 3988 bp, Cannabis sativa
tatatatatatgagaatctttagtaagctttagatacactgtaaattgtaattggggtgaaaaaaacactataagctgttttacatgaaactatgaagtttcacttaacccaattgaggatatctcgttattacataatgctagctaccttttttttttttttaacctataaagcgccaactttccgagctggaacttattttaaacttcaaccatctgaataaggccacgtagcatatagtgacaggtgtctttcctacttcccaacagtaaaagtcaaccatgtcctaccatctcaactaaagccctctcatattgacaaatgtcccctaaaacaaaaaaaaattaaaaaattgtttttaaataaagaaattgttctttcatatataaataaataaattgttgctttatatttatctagtgatagcctgcaaggctaaaactcctttgaagggaagccaaaattcaaagtccttgaaaatcaggtgctgcaattcatcaaccatccatctaacaaaagagacatttagtcaaacaatattttattcttaattaatcagactggagatttgcccataaaaaaaaaaagaaagtcaacgttacactgagatagcttgcttgccttactttacattttcacctttaccaatatgtctttgttcttttcacaacttaattatgaaaagaaaaaaacaatctagaagtatatgaacatctacttataatttttattcttcttaattatatatttaagaattataattaatataacattagaataagaagacaatatggacaccaatgttgaggagtttcaactggtttttaattaagtctaattaattagtaatatttatttattaataacatttgtataagtacacgtagtcctcaactaagtctaaaataaatgaatgaaacttttttattgagccatttgtatcgattattatgtatataaaaaaatatatatatttaatctgtctccctgttggtatctatacaaacatatcatttttctcccctttcacattatatattgttatgtttatcatgacgaatgcttacatcgatagcatatttcctctattttttttttatttaattttcaaaagaaagaaagagatatgagaaaaaagggagaaaagagttgattcgtataacaacgtccctatgcatttttgtggatatatgttatcaatatatatttccgttgtacagaccttggccatggaaatttatacatatatgtaatagttcgtcaccattaatctatatatgtgtatatatatatatatattataattatatataattattattgtatcaactaatttatttcttaatcgtatccatatatatatatataatatccttacgtagcctaccgattaaatagcaattacttgtcacatatagagagtttgcttgagcatgcttacatagttagtttactctaaagtcatggaaatctctcatgttgactattcctatatataattaaaatgaaataagtagttacatatagatgttattatgtcgataatatatatatgaggcgtctgaaactccaacaatccgttgtttttaatcaattatttaatattctcatgcatcattttatagtattataataattaatggagctcagttcaatatataactaatactttagggtacttttaataaaaattatacgtgacgatcgacttattatctgtggatggaaatgaagccatacaacacaacatatattattctattcacttcatgcaaaatgtttgttaacacgtaaacatacagtatatataattcaacttaaattatacatatccaccaataatatcatatttgtacgtagttgtatacatacatgtatagaaataatatataattaaatttaatgtgtataattgtactaagtccattgcacatatagcagccatgatatattaattaatatatgtttaataatgatggccacgtgttgaagaattacgtgagattaatgcatgggaatgttacacgtagggataggtttgtttgtcgagtcatactttgctggtgttttgatcaaattaatggttctctcttggtcacagtacttccagccttattaatatgcatggtgaatcaatttgatgacatattactaagatatggatattatataataaatatatttatatctatgaagtcatacaaattaaaacgcggtgacagatatatataaatatataatatataccatgcatgcatgaatatatgtgcgcatatcatcacagggttattaataatggtgcaatttttaatgcctccctcaacatgatattgtgatcatgtgaaactgtacatataaggatcaccgagagtgttgcccatacaaatattattggatatgtttttatatatatatatatatatttatattacatttaacagccatcaagctttaatcttataataaaattttagtaattattcagcaaaaaaaaaaaaaaaattaattagatatacactaatttatgggactaaatctataaaacagaagaaacatgttttaatataatttaaaagaaagataaatacagatcactcctcaatcctcaggaatatcatacactttgattaatattataaaggaaattaaaacagctgcactttcattaattagtagcattatttactgctctgtttcatccgcaaatttttgtgtaaatcgtatgtatcgtacggattttggttcctcgatcttccttcaattatactaacatacggaaattttattttgtatctttaaaaaaatatcccacattaaaatttactcttaactaatttatacaaaataatttttttgtttatatattttcttcattttatcgttggctaattaaaagaaactgaactaaacacacatactctccctctgtctctctcccttagtgaacggccggaccttattactgaaaaaaattaatcatacacattcacctcaataatgggtaggtgttcaattttttttttattaaatatttaaattagtatgtagtttatttttgataaatcttgtcttgtttgtattggtgttgttttgctcttttttttttttatcgaaatgacaagatttagttttctcgccaaactataatctttaattgattatttatgctttttcaatgatatcttctcgataattacggtaaaaaagtaaggattgacaatttttgacactttttcgatagtatatatatcaatactatttcgatccagaagaaaatatataacaaaattaatcacacaagccaaatcatcgacaaactatcgatatactatggataaccatcaataatcaattaaaataccaaataaaaaaatatatcagcctgcgatcgataaactatcgataataccgatggtttatcgatagtatatcaatggtttatcgatggcagactgacattattttttacttggtattttaattgattatcgatggcttatcgatatatcgatggcttgtcgatgattctaccttgtgtgattaattttgttatttttgctgtgttttgtcctaggttgaaatattatcaatatatcatcgaaaaattattaaaaattgtcatcccttgcctttttaccgtaattatcgagaagatatatatcgatatataatcgaaaaagcattgataatttgttaaaaaaatccaatttagtgagaaaatcaaatctcgccatttcaattaaaaaaaaaaaactaccaaaacaacaccaatgcaaataacaaccacacaaatctatcgaaaataaattacatactaatttaaatatttaagaaattctttagacaatacctacccattattaagatgaatgtttatgatttttttcaatgtgaggtccaatcatctactgagatagatcaagagatatggagtagagagattgaaaaagaatgagctgagagagagagagagagagagagagagag

SEQ ID NO: 44102 - DNA, 1962 bp, Cannabis sativa
  modified_base (81)..(83): a, c, t, g, unknown or other
cttctttctttctcagccttccctgttcagtgcttcaatccaacacaatctagagagagaaagcaagagagagagagagannnagagagagagagagaagagaggaatgataccgccgcaatggtcatctccgtgcggtaaccaatgcactcagaaatacgcagctctaactcaaattccatgtgtgtatatactcattctctatgccactcttcttcaatttcatctctttaatatataaatttcagttttcaaagtttgggaaatttggggctttctttttttttttgttcttgtttgtaattggagtatgaaatgaacataattttgagctttgcaactaagtttcagttttattcaataatggtaatattaattgaaacttaagctaataaattattgatggtgtttaaggaatttagctagaatgtgataaaaatgcttactttaacatatttttaacttgtgaatttttacttagtcccaaagattttatgaagtatgagctaagattaatactttggtttagatcattttttccccttttgtatttggggtactgaaaattagagtattagcagaataatctttatgaaatatgatctaaagtcaatcttcaacataacctttaccatattttatcagcaaaataaccttgtatgatcgtaaaaacgattataaattacattgtgtgactataacctgccattataatctcaaaacgactatagatttacaatgtgcgactatcatgatcgtatagagtaaatttgagattaatttacaaattttagtatttctcattgttatttttggcaaatttcacttgttattgacttagggttcttgatttttttgttctacaattttgtttaattagagattaattaagtattaatgctttattacattttattttatgaaaataaatcatagactttatatattggaattttatattattggaattttttcctctcaatttagtttttggatattttttgcatcaacgatctgatcgattatgaataattggttattcaactgttgaaattgaaataggggaatttccctgaaagttataacaattactataatgatacatgtttagattttgatcagattttggcaatttgaatacataataattgttcattttaaacatatttacttatttttgtttttgtttttgtaattttgatattgtaagactgaatggcttatgatagggcgagtgttctgcaaaaaagggtgtgatgctgatggagattgttttcaagaatgtaagtgaattcttcattgtagttatcttttgtagtttatgcttgaatgaacacttcttctccatcatttggtattgacttatgtgtgtataaatatacaatattttgatacaaatcaaaatttaacatactattcaattcaatacaagacgggttaatatggcataccaagcgaactctaacaggataactttgtagaaatgttatgggaatggcatcttgaagacatttttttagctttgttgtacttttatggtgaatgtttgtttcaaatggaatttgggtgttttcccattttctatattgcaattgtgagtgataatgataatatattgcaatttggaaacatgaaaatgttaaactagcaaccattaatctatcgttgcaaaatgaccatattggttcttttatgatcgcatagtgtattttttggtcgcctagcgtggttattttgctaataaaattttttataatgattatttttacaaaacaactcttgcatttcagtggaatgaagtctctcatagttttataaagctttagctcattttgttttattgcaaggttatggttcttatacaaacatattctctggctttgattcttcccccaccttctggtgaaaaatggagaatcttttcctacaaagcttgcattggctctctctctctctctctct

SEQ ID NO: 44103 - DNA, 1589 bp, Cannabis sativa
  modified_base (1545)..(1545): a, c, t, g, unknown or other
gaatattgttattgggtaccagtattatttagcacaattagatatatcatcttacaattggttaacgacactatttaaaaaattattatattaaaatatatgaaactcgaatacttagttagacatgtaataatattaacatataggaaaatattaagcactgctaccattgataccttttagtatttctctaaaattcattaattaaataaataaatggaaatgaaagttgttttgaagtaataactttgtggtgatgatgttattagacagagaatcatttaaaaagactcatattataataagattatataaattagtatattaattgtttgtgtttcttggtaattgatagtaattgacatgtatatattatctatatacatatgcatatttttgtaaatatgatcttgttgattgattacatgagggcttaaattagtatcatggagatgagaatagcaaccatacaaaaatgtcaactcttcaaagtgatgatcataaggcttcatttatataatttgttaatttattaaagtagtatttccaaaaatactttatatgcactaaattattttactatttgttgtaatttggtgacacaataaaagtcatattcaagtgcaatgttggtaggtcatttggaaaagtaggattaagattttataaattttattatatgatgtgattatgttattaaaaagtatttatgtataaataaaaatagaaatttccaataattttatcatttgcaatctcttatctattgagaagtattatatatttatatatatatattcacattattttttttttcaaaaaaacaactttatatctaatttttaatctctcactatatattagtggcaaatgacattttctttttttattgttatttttcttgactcaatataatattatcctatgctacccactaactaaaccctatgtttggttaaagagaattgggtaaaaagaagcttgcatattatgatattaaattataacattttattaactttgaatttaatgctatattcataattaattaagaaacaaaaattgacaactaatcctcaacaaatcacaaaaatggtgattctattataatttatttgtttatccatttcatttttaatcttctaattaattaactatttacaaatacattaactttagatgataaatcatatataatacctataatcattaagaagttcataattttaatatacatattttgatattcattataattgatgaataaagagtgctttaattttttattaattttttttatatataaataacattttgaattgttatgaagaatggggtcaccagaggaaagaggaaaaaaaaagcaatgaaaaaaggaaaatgcaacattatattttttatgcatgcattgaataaaaggaatggaattgggcctaatttccttggcccataatcttatatgaagctcttgaagtctgaaaatatgacagcttaataataaggattgggaaacttacaaaaatactgaaatttgggttaattttnacaaaaatactatcacacggaaattttcaaaaatactatgtttt

SEQ ID NO: 44104 - DNA, 1796 bp, Cannabis sativa
aacatggtatctacaaaccaaaggcctaccttgcaactagacacaaattacccgaatccttactccctagagaacctacctctctcaaaaatgctctcaacaaccctgtttggaatgctgctatgaacacaaaaataaaagctctcaaagacaatggcacttggacacttgttccttatgagccacacatgcacctcattgggaacaagtgagttcacagaataaaacttaatgcagatggctctattgacaggtacaaatcacgacttgtggcaaaaggttatttacaggctgctgggatagactgtgaggagactttcagccctgttgtgaagcctgtcacagtgagattagttttgactcttgctgtgtcatttaattgggaagtaaggcaacttgatgtatcgaatgcctttcttaatggtatgcttcaagagacagtctatatggctcagcctcaaggctttgtggacagctcaaaaccaactcatgtatgtctcttacacaaggcaatctatggattaaaacaagctccgagagcttggaatgacaaacttaaatctacactgctggcttggggtttcaaagcctccaaatcctattgctctttgtttgtgtatggttctggtgacaatctcttgattctattggtatatgtggatgatatccttgtcacgggtcccaatacatccctcattaccaaacttattacagatctaaactcaagtttccaaatgaaagatcttggccagcttcattactttctcggtgtggaaatatgcagggataccaatggtatgtttttatctcaatcaaaatacatttctgatttgttagtaaaggttcatcttgaaggagcaaaaccttgcaccagtcctaccagtactgcccataaactgtccttatctgagggtgttccttttgaagacaagacactttatagaagcactttaggggctttacagtaccttactcttacacggcctgatgtagcttacatcatcaacaaattatcccagtttattcatgctcccacatcagttcattgggaggcttgcaaaagggtacttaggtacttaaaaggcacgatcacagagggattacacttaaaaccagtcaccagaatgtccattacagcatactccgatgctgattgggccagttgcatagatgatagacggtcgacaagagggtatgcagtgttccttggtcctaatctcatctcctggtctgccaaaaagcaacaagtcgttgctagatcatctacagaatctgaatttcgagccttagccaacgctgctgccgaagttaagtggattacttctctgtcatcagaattgcagctcaagtttgtcgatatacctgttatctgggttgataatcaaggggcagcttcccttgctgcaaatcctatttttcatgccagatgcaaacatattgaaatagaccaacacttcgtccgtgatcaaatcttacaacatgaggtttctgtgcgatttgttcaatcggtcgatcaagtagctgatgttcttactaagtctttgcctaaagacaggtttctgtatcttaaaaacaaactcaaagttgttcacaccccttttcgtttgaggggggatgataactaataataattagttaattacttagctttagttaggtaattagttagttaaaaagcagtttgttagttggtctgtactttgttttttttttgtaacagattctttaactgaatctttctttttgtacaatctttggctataaataaaatgctgatgctaaaggataatgctaat

SEQ ID NO: 44105 - DNA, 1415 bp, Cannabis sativa
gagagagagagagagagaaatctgctatgctatccagctgtgtccaaagaattaaccactgaattcaaagttccaaaacaactgtgtttttctctttcaatcattatgtcatacaacttaagttctatttcacttgtggtggaaactggaaatcccaccaactattctgattggtgaactccaaaactcccaccaattcaccaatcacaatactccaaacggtgaattttcacatgatatgatgaaaagagaggttccagggcaaaaaaccagtaaaccccagatgaaaattcagttcaatttcaagtcaatacaatacaaaccagatcatagtgcaggggaatttaaaaaaaaaaaaaaacagtaacaattttgaaactttacgctgaaaaacaaaaaacccatcacagaaaataggagaaagatgctaaagaaagtttaaagaaaacaccttttgattgagaaaaagcattttgatcgagcccacaaagcatcaagtccacagttcatggccaattcatcaaaaaaaataagacctttgcttgcgttaatagttttaccttgttaggcaagaatccaaggctccattacaataaaaaaaaagttttcttctcttcactggcaacctttagtacaaaacttttacttttcatggtgattgaattcttcttcttcaggacttttatttttggagcccaagggtgctttgtgcattaaattatgaaatctaacactctgacactcttttcaaaggtgtgaacacgaaacaaagaactcgctcatttgatcacatattttaactacacacaataatcataataataataataataatagatttcaaaaaataaataaataaataataaagaattgagtattatacattattttatttattaaattaaaatatataaaatttaatattaaaatacatcaataataatataatacctttttggccatctccaattcaaactctattgtctgccttagcacactgactattttttttacaatttaaaaagaacttacaatactcatgtatttattgaaaaatcaaatattttatgttgtgtatggggctcattctctcacaagcaacatcaaaaaaattagtattggagatgtccttacagtactttatattttaaaatgtttaacactatactaatatgttctcgtataattttttaataatcttttataaaaattaaaatatataatttattaattatttttgagaaattatatattgaggtgcactacttctattaaaactacataacaataagtttttttacaatattaagataaaatgttatctcataattaattagtaattttttatattatttattaaattaaaatatataatttttatatatatattatatagtgaggtgcactaattctat

SEQ ID NO: 44106 - DNA, 1582 bp, Cannabis sativa
acatagcaaacaatagatggattccaaaaagcaatctcatcttcaatatcttccatattgatcttaatcttggttcgacatttattctcaaaagaattcactaggtttttctttactgattcagacttaagaacaggggggatagatgcattaccttcctttatcgatttagcacacttttgatttgcttttaagaagaaagcaaaatctgagcatactacctcctgttgtttgatggatttcagtgatgatctgggtgtcacaggagcttgaagaacatatattagcccaggatcatctaaatcctcacttccaactcggtcttcttcatcggaaaactccatgggttcaactcccaaaatttcgtccatcctcttcgtcttcttcacatctgcagttgacgacgaacctctcttcttcggttttttggcttccagtttcgtccttgacttaccccgcccctgagatggcccttttcgaggacgcccatgacctgccatggcaccgactgtagatcggagtctgggaatcctagcagagcaatgagaaacaaagtatcgtctttccttatttggattaatttatatttttttattaagaaaaaaattattaatcaacagagacaaatacaaacaacttaactcaggaaagccaacctggaccaactggccaacaacaaaaccaaaactattacataacctaactatgtatagtcatctttctattatttacatttgttttaagtgaatttgattatttttactttattatttattacttttaagaatttatcaattttttaataatatttctatcatttttaagaattaatataaatttgttaattttaaaattaatgttttctttaaaaggaggtaaaatttggtgttaatcaaagttcaaaaataaaaaaataaataaattaattttaatagtaagacaaatgcaatttaacaaaataaataaataaataattctgtaaccgttacattttgagagaaatttttaacgagttatagtatatttgaagggaagcaatctatatagtagtgttataagttttgaggcaaataatttttgtttgaacaataaagggatattattaattatatatacataacagaagtaaaattattgcatatatatataacgctattttttttatttaagtatttatattacaacaatatataatttgaaattcgaatccaaaaaaacagaccagtggttatgtgacgctaatcaagaaaacaaattcggtgctaatccgtatgatttgttatcaacagccaaccaacctgatgtaaattaattggctttaattagtcatatataaaatagataaatattacattttgcatgtgttgtgatttagtcagcgtatatacatagaattacttaatttactttttatgtataagatttacagtaataataattatttacagaattaaaatatataatagctatatataaactaattatataattaacaatatgtgaatctaataatgttccaaaatataatagttattctctgtggttggtacgtacatgctacatatatgctaatattaattaa

SEQ ID NO: 44107 - DNA, 1758 bp, Cannabis sativa
ttatctttaagaaaaattacgcccttatcactttaaatcccaatatactagctaatgaagctagatgaaacgatatgatagtttcactgtaatgggaaggggtcaactattgatctagctagtaatgaatcatgtgaagtgaaccctagatttaatattatgttgaacttttcaatattatattattgacgttttcaagggcaactaactgtaatttacacttcttctctataaattatatttattaatttatatgttttattagttgatgttgtcacttattatcaactaatggaatacattagtcttcttagaccaaacaaatttaataggcaagtggaacaaaaactattagaatacattatatatattaattaaagcagtagaaatatcccttattatgattaattatttatttattttataattaaaaatatacaaatttaaattaaataaaaattaattttagagataaatatataaaaaattatttaatatgtagcttaatattatattcttacgtatttttgaattaatacataacgactttataagttgtcatttaaaagtattaccatatgcatataatattaattttttaagaattattaaaagatattattagtacttgatactttcatcaatgttatactattattgttgtaattaaatattttttttttcaaaattgttgtaattatatattaagttttatataacttaaaaaaaataattttttaaaaaatataattaactaattataaagtgtcactttaatattaagcatcactagtaatatttaatgataataatttttcattagaccatgggtaattacaacctatgagttcgtgcaaatatctcttttatttatttatttattttgtaaaaatatttctgtaattctaataattaattatttagaggtaacgttaattaaaaaaaaataataataataattagagataaggagtgagttagaagaatgagagagtgagcctcttacctgtcaaacaagaactttagtgagtttaatataccaagatatgttgactctgaaaagtacggaagctcaaatttattaataaactatttaatctgatcttctgataccaatttaatgtctcaattaacaaataaacaaaaaaaaaaacatgagataatgtttccaaaaaaagaaaaataataaacaaatgagatacgttacgttgttttcaaaatgatgtaatataaaaaaacatagagacttttatatgagttgagaattttttttgaaatgggggttgagaatttattattcaacagtgatataaatgtcatttttgtttaagttaaatagaaatatagtaccatggatttttttaataaataaattaattaaaaagctataatttattagatataaaataatttgtacaatatttttttttgagatttgtattattaagattgaaaaaaaatgaaagttattaaaattgttgcttatattattaaaatatataaatgtatacaaaaaaaatcaaaatttaaaattttatatatttttataatttaattatcataaacaacatgcaattacacatttacacccaaatttattttcaagtttttattaatataaataaagcattgtaaaatgatggtaaaaaaaatgagttttgactttagaaatcaattaatgcttactagtttcgataatacagtttatattctttcatttatgatagcttagtattttctctctctcaaaaaaaaaaa

SEQ ID NO: 44108 - DNA, 2416 bp, Cannabis sativa
cgatttcttcttgacatcatttgatctgaaaaacatccaaagaggagattagaaaaactaaattaagaacaatgaacgaggaccaagtaaccagatattaaagcataaaaagtaaaagcaagcaaagctaagttgagagcttgaactttcatgtgatcacaaacggggaagtgaaaaagtacatatatggaagaaaaaaaaaacgattctttttacaccaatcccaaacctctttaactcaaacacattttaggcctgtctcccatagagaaattaagtataggtatatataggtacaaaattaaaaggccaaacataaaatttccacaaatccaactagttttatcaaaacaggcttgaagaaaaacgtgtagagaaacaacaaagctgaagatagatacagaacccaaggaagatttttatacaataaacaggactcagcagttacatttcactacactacataatttccaaatccggcaagatatcaatgccaaaaattgaaagaggaaaaaagtaaagagaacacaactgaagcctcctctatcgtcaggatctagcataaaaaaaatgagacatctaacatatttccaaataatccaaaacaagaggagatcgaatagcacaccaaacaaaaatagggcaacttgatattatgaatttcataaaaggaaccgaactttcttaacccaacaaaatgcatcaaaaacccatatgagatctaccattctataagcgaaaaaaccaaaccatcaagaaaagtcactttttgaaacgaaatgaacaacatttttctcttttagaggctgagagaggaagaaacttacataatagctatggagaatttaagatttgggtacagacaaaaattataacaagatgagctgggttcagaggtttcgtgtgtatatatacatatatatatatagactatagatgtgtacgcatatatcttggggtttgatatggctgttaagctcaatctctgtgctttaatatttatatagtgaacgagaccaagaccaaccagctctcaagctttggacaacaacaattatctgcacccaattgcttaaccgtggttcccaaccatggttagcctccaccctttccggacttactcacaactctaaaccatggttaactaactatggtgctaggcagcaagtagtaggctttaaacactttcttgtcttcttgctttcaattttttaagctttgttgaaatagttacacgtgtccacactacgtgtacactattacatttctagtagattttttctttttattttttttttgaagtggcatttttaatagaattaaggaattttatttatacccgtaaaattataactacacattataaaatatatattttaaatttatacttatttttttaatttttgtccccttcttatattcttaaaaaatgtacttataaaatatatttaaatgttaagacaaaaaattttaaataaaaaattatattaaattttaaattttttggaaaaattatacataattaaaaaaaatgtaaaaataaagtaaaattaaaaaatataaaaataaaataaaactaactattaatattaaataaaagtaatgtgaattttttttttaaataagtattaaaagtgatttataaaaattaatttaacttaattatttttaatattaaggtgcacttataattttatgaggtacaaataaaatttcattaaaatttaattttatacattttatttttaaaataattatatgattgctagttcctttctcgaaaaggaaaagtaaaagaaaatattaagtgatagggttgttcattaaaattggaaaactacagtttaaattcagatcgcgacaatctgaactactgtagactgtaatcggggaaactgtttttagtggtctggctgatcgtttaccgcgtaatggttcgattgcggttcgtaataaatagttaacggttaaactagaccggaccgtttataataaataattaatttatatatatattatatatgactatatgtataattttaaacttttttgtgtgtcaagttttttattgcatgaattttagatttttatgttatgtttgacttttgagaatgtttttatacatttatatgttatagatctattacttatcatgttaaatatatattttgaaaaataaaattaaaaatttaataaaaatatgaataattataaattccacttaaatcgtggtttcgaaccaaaccaaaccgtttttaatagtttggtttttgagaaatttattgatctggtttggtttccaatattggtttggttcaaaaaatatgaaaatccggaccaaacaaatccatgaacacccttactaagtactgattttttcctcattttttttgcaatttggataattctccgaatc

SEQ ID NO: 44109 - DNA, 3029 bp, Cannabis sativa
tggtgtcattacattagattttacatactcacggttagaactcatttagtaggtcgtatgtgaaatttattgtattaaattacaatagacattgtatttggataaaatattattatattaattattaagtgtaataaattccttttttttaaaaaaaaaaaagactaacaaatttatacaatttgaattgtattatttaataggcattgaatagtttgttttagcttgtatcataatatttaataagggtcggtgattagggacccggttcagactcggacctgaccatagacctgaactcgaacccagaaccggacctagacctggacccaaaccttggacttggacctggccccgaccctgaacctgcacctcgaatccagccccggaccctaaactcggctctagaccctagactcggccccgaacctagaccttgaagatagaccttgaacctagactcggcctcggacccggccccagacctagatcctggattcggacctcaacttaggcccgaccctagaccctgaacctagacccaaatatggagcctagcctcgtgacccaacactagcctaagacctcggaacttggattttggacccgcatcttaaccccagccccaaattcggacattggacactggccctgaacctgaaccttaaactcctaaatcctgacccaaaccccattggggatggggtctggatctagggccggggccaaaattgaggtcggatttattgtaaacaacctatcaatacaaatcaataccaaacacatagtgtatattgtattaaatagtactaatataatacaatacaatctaacacaatattatacaatacaatctgacacaatattatacaatacaaattctttattttttcccttagctcacatacaaatttgtggtgatttggtaaccgttcttattttctctttgaaaactccaactcttacatgatagaaaagaagtactatattcttatcatatcatatccatcaacaacaataataaaattgtcataatgttcaataaaactcctaaaaagaggagaaaacaagtaccaatcagaaacaaaacaagctcgaaaataattaaatggccattaatatatttatataattactatttatatatagttgtgcacacaaatgatctaattaattaagcttcaatagtacttataagtggtgagcccaatctaggaactgggaggcatattagctcatggagccttgggccagtgaaacctggcgcctcttccatattaagaacacctagatcattcacagcccttggatctccaccttgagaatcaggaaccgtcagatcaaaacattggattatattggctagtaaagcaggcaacatctgtgtggccaaattcactccagggcacatcctcctcccagctccaaatggcaaaagttgaaagttattacctttcacatctattgggcccatttttagtccaccaccctcgttggactccactaagaatctttcgggcctaaagtccattgggctttcccatgtctttgggtctcttgccatggcccaattgttcacaaaaagcatggcattttcaggaataatgtactctcctatttggcattgtttaacacatttcctttcaagcaaaggcaatggtggatgtagccttagggtttcctttataatagcttgaatgtatgggagatttggactgtccgattcgcttacaagacgcgtctttccgaccactcgatcgatctcttgtcgggcttttccgagcacctttggattgttgataagctcggccaaagcccattcggttgtaattgctgttgtgtctgtgcctgcagtgaagtaatcctacaagtaacaaaataatactagcttatcaaattattcaattttgtttggtgtctatagtgactatttaaagtcaaattgtacttgttattatgtttaaatatatgaaaatttagttaatagatcaaaaaaattaaaaaaattacaaaaatacatcaacatggaaaaaaaattatttgtacgatttgaattattttatctttttagtaaaaataataaattgttcattttattattttataatttatttataattgtattataattataaagtatatttttattatgttataatttatttatagctgtcgtgaaattaagtattaacttgtgtttataattccctaaaaaaaaggcaaataataatgtgatttttctactcttgctctttttccttctagatagatgaggctgcatttaaaagaaacaattggtcccctacaatagttacttaaatatttgggatatataaggctatactctaaattagaggctctattgttcttttttccttttttaaaaaaattaattagaccttcaatatctctagaccttcactttactagtgctttaaagtttcagttacaaatttttgtcaaagaaatctctatcaatgagcatttatgtatcacaactaacactgtctatagtacaataattaatttgtctttttttttttggtagaaaaacttcaaggtagtaaatcacttaactagttcaaaaatctgggttattttttctaatttttaataatcttttttatcaaaaaattgtaattaatataatatttgatatattaaaagtaatttaataatatgaatgtgagtctattctcaaaattacttagtattggattaatataatactatattgttatgggcataatttgatgatgatttatatattttttaatttaataataattataaaaactactaattaatcatttacatgacatctcatgtgtaataaatttgaattaatttgtctgtagtggctagatctagatcaatgctagtaaataataaatacctcaaagatgctatattggtcacttttttttttttttgttgaagagatattggtcactttagtaatttacttttatatataaattgataaaaggaattattagtaatgtagcagctcacttttttgtgagtgc

SEQ ID NO: 44110 - DNA, 2898 bp, Cannabis sativa
  modified_base (535)..(539): a, c, t, g, unknown or other
aatcttctattgataacaaatcaaattagattgaaataattttatttagggcataaaatcccaacatgctcccagacctgttttaagggctctagatccaaagtagcatccacacacaaacaaagactgtcaagggaaacggcaggggtagtgatagaacttcatgtggtcttattttgactccctgcgtttgggggttcagaatctggattaaaatgttaagcttccttgtaatcatgcaataatctactgacaaaatcttccacatcaattattttagtgtaatgatcattaaaaagagcattgttccttgtgttccaaatttgtcagaggatactaataagcaatgtgaaactgtctttgctaagctggtctaaaccttgaaggtaaaaatccttaatgtcataattttgattagttgtatcaaacattttgagtgaggagtgcttccaaacagtccttgccctgggacattctgtaatgactgcatttataatatgaattagttaaggcaattagcactaattattggtannnnntataattatttatgaatttatttaattgtaggtcccattatcaaaagtgggcattagagttataatttctcaattctggagattttattaaactcaaagtgtattatttgagttatatatgaattatgtaatttttacaatttttgctcggcgacaacgaaaaatgcggtggatggctagtttgatcacatgagtaagtctagaaccttatttcttagtggaatgtatatttgaggaaataaaaaaccgaggtttagcggggttatggattttgaccattttacccctaggcttgaaatagcttaagattaagcaccaaggggcattttagtcatctttaataagggaatgaggtggttgtgtgtgtgacagctgccccttcattttatgctgggtgttgtgttgtgaaatgcattatgttggataattaagaaaaataaaaaaaaaataagaaaaaaataaaaatagagaactctgtttttctctctttcggctgaagcaaaaccagggagtatcatcagcaaaaccttgtgttttctaagtattgagcaggatctttgtgaatttgaagcaaaggtaacccctagaacttgtattctatgttttaaaagctttgaatttggtttgagtatgcatctttgagatataggggctgttagggtttagttgtgttgaatatggttttctaagcttattttgagttgattctaagttctggatactggttttgttgtgttgtgatggaattgcacaagtttgagctttgaaactcaaacttaggtcgttaatggcatattttgattttgagtatttttcttagttctgttgcttggaatatattgtggaaggttgttttagatactttggaaggtttggtggcatttggtatcaacaacctgctaattttcccaactctcttagatacactagcctaagtgtgacctaaaggctcaattttggcctcatccttaataccacctccatcatctttcgacattttataagaatcaatgacaatgccatctttcccactctcctcatctttaaggggacttgaataagattcatcaacaaagtgagcatcaatatacactcgctgacaagtaattatcaggcccacacgatcgttagtaaacaacatctttccatccctttctagtatgataatatcagtcaacatagcatttgcacgttgctacatgtcaattaatagaacatgccttttgaagggaccagccttttgaaaaataacatgtcttgaagggatgataggagtgtagaagtaattctgatgatagaggtcacaattgcttttagtgatgttgtcaatgtacacactaaattgatggaagtggtagaagccattcttctttcaagtagggctcattttcagatcacacaagaagttgatctcatgcggagttggaatgggccaattgtgcagaccataaaagatgaagaatgttgataaaatccgataataatttgggtttatttgttaaggttgttaagggtagactccaaagtaattagctaggcgagaatgcacctgcgttcatatgaatcctagaccaagcactacaacaagggttttgagaaaccacttggagtccctatccttggttttctaacaatagtttcaagaagtgagtactcatctcatatgttcaacttggtgctgagcaatggagctagagacaagatgtcttagttcaatggctcgatcccttgggtcctcattttcaatagcagcagtgagtaacttagtggccatgaatattccaccacgtgccttagtctttagattttggtaccatgagctttccacgaatgaattgagcagtatctcagttatattatttaggttttcttgtaattcttctaacacgaggcatgtctactctcaacttgaatttcctcaacttggagtagctaaatatcaactcaaaataactttttccaagcaagttaacacaaactgcaccttgtaggaaggaaaaagttcagcttaaatggctcacatgaaaatcgtatttttgtttttaatagggcttgccaatggagtttaaggatttccaacaagacccaaaatccttaaactgagatttacaaaggagatgaagagaaaaattcaaaaatttgaagaaattatatacttacaaaattgaagaacacttgaaaaattgatgaagcaagattctcaagaactcaatctctattttgggcatgtgaagcaatgtgaaaaaagaatagaggagttctctatttataagctattgatcacctctattgccatcaaggagtggatttaaatttaaatttaaaaagataagagagagaaaatcaactatcttttctc

SEQ ID NO: 44111 - DNA, 1981 bp, Cannabis sativa
aaagaaaacacacacacagtattgtgacggtgttttagttagaaaaataactaaggtcaatttaatcaagcattcaaattcagtaaaccaaaagaacatatatatcagaatcttattgaagtttgaaatagattgtgggattttactctggaataagtgctttgaatccctggccaagttgcgaaattttcacggcatgattcttcacttcaaaatccacaccccaccattcttgaagtacaactattccaggagcatcatctttgccaaccacatatgcatcaaatgtctgttcattgaggaatgacaaaaaaatgtagaagaatttagtcggcaaacagttgatagcaagcaaatacatacagtatatacaccaacgaatacatgaaataaaatcaccaagaagaaaaggtgtcacttttttgtataaatataagcaacaacgatagtcaactgcatatctaaagttcagcattagacagtcccgaaatcagtaggacacattggatgtcagtagatgaatttcacattgtcagtagatgaatttcacattgtcaattagagcattgtcagtatctcactgtaatggcccatcaaagttcttttttcctttactactaaacctgtacccaaatgtacttatgtcatgtttggtttaatgtaatggtgatagtaatagaatcatgattaccattacattgcttggtttaaagctttggaatgactttacattgtaatgatcattacattacatcatgtattataatttacattacattataaaaccaacataaagatgattacattgttaggaaatattaaaatatactaaacatcttttcaaaaaaaaaatatatatatataataaatataactcttgtgccctcctttttacttttatttaaattttgaatattaaataattaaactaggaacaataatatacttgttctatttcattacaatgtttatatctgacctacaccaaacatcataataccattcaccttacaatttttattctattacattaacatttctattaccattcacattacattacatcaaagaaaacatcactttacttcaaatacatttcctcgtaaccatttattttcattatttgtatcattctatcattctcgtatgtattctttagtgtggctttatagtaataattttttccagactatacaaataactataaagcttttaaagaacgaaagaaagaaaaaaacccattcccacgaaaaccccaactcccgaaacaaacaaacacacttgatcggaacttcaaaacatttaatccatctataaagcctgaaatgattcgacccagaaaatcaaatttggagtaaaagaactcacagtgtcatctctctgaatctgaatttttttgaagggagagggagatgctgcagagtcggccatagcgcgaaccgagaattgacctataggtgaaaacaaacgtcctctggagcaagctgcaacggcgaaggctgtggaagctgatgatctatgtacaatggaagtgactgccgaaaatagcatcattatttacatcattatgatattgctgctggatacaaaggggccatcacgaaaacgacgtactactctcttagaacgttgtcgttttgagtgggttttctttttaatgctgtcgttagtttttttatgacataactacgttgaaaatacaaaaattgtaaataattgtaaaaatttagatacaaaaaactacgttgaaaataactttcctcaataagttatatatataaaaaaaaaaaaaatactattttacattctgtgttttgcaaaagttactaattgaacctttattttgttaaaaaataaattgactatttattttttaaaattatacaaatagaaccctgaactgatttttttgtcaaaataaaacttaataataatctgatctaaagattttataacaaaactttttatattttttgtatat

SEQ ID NO: 44112 - DNA, 1923 bp, Cannabis sativa
aaattaagacaatttatttgagctaatattctaaattggactaaataagtgatctaattaaacaagcccaataaacatcttatttggtatggattttgtaatgtgtaatataaagaacatatagagtttggtcctcaaggctaatctcaacactattctcttcaattcctaagtgagaatagggatgaagaatagtttgtgcaagaccatatacctatatacccatcatctcattttatattatatctaatattatggaattaggtatgtttttcatcttattaattcatagagtaatctagagtaatcttgatgcttgacataagtttaagatccatatgtattttaaatctactttctaacaaaaaaaaatgtaagagaaaaaaatgtacggaaaatatagaagaataaaataaaataaaaaaaaaatatgaaaaggaagataaataaaaagagagaagaagggaaaaaatggaagaaaaaaataaaggagaaataattgtttccaaaaaatgataattctatttatatatttaaaaaagaaataacttttaattaataataaaaaaaaaaatcgtaccccattttttaacaaaactaaaaatcattcacagcattcctgcatgtgcctatatgatcattatgaaaataacgcaaaaatctagtcacattgactgaccaatttcacattaacaattttaatgtataatataatcctttccttgcttgatgccgtgacccctggtctccatgtcacgttcatcgtagcttttcatatccggtccatttggaataattaacttgcaattttcatatggtttcacgagagaagcccaacctcatgatataacgtttattggcaattaattaataaaaaataccactttataatttaccaacttaaccgtccccactaatctcaaataaatagagccactcccaaaacaataacctcatcatccttacttataattatatcttaatgcaatggcgccaccgggtgcattttcaagcccacctactaattctaaactaataataatgttcacgtatttgctaataataataacattatgcaaatgtgagactcaaaaacaaaaacaaaatcaaaaccaaaccagcttagtattcttcttgcaagattatgggtcgagcaatgccaatgctacggttgttccagtgattggcatcaagggcaaggagtggtcattcaactcgttcggcaccatttttgctgttgatgatccaatcacggaaaccccaagtagaaactcaaacgaggttggtcgagcacaaggagtgcttgtaacatcggctttagatgggtctagtgtgagtgtgttactgtcaatagtgttcaccaatagggaatacgatggtagcagtttggagcttcaaggtgttagccgtcaaaatgagaggtatagagaagtgtctgtggtttcagggacaggctatttcagattcaatagaggctttgctgttatggagactatatactatgaaagatcaacttcatactcaatcgttaggtgcaccattaccctacgtgatgagactatatatagctaatttattttaagtatatagtattactcctcatatattatatatgtactatccgaggcaataataataaatatagtcatcccataatgttaaaattttatacgcattcgttcctttctattttggctttctttgtttttttagtgatttgttttcaatgcctaaatctaaaatctacataatcttttctcctgaaacacatgaaattccaataaatctccaaaaaaaaaaatgtgatttctaatcatataaagaaataagtttaaccttacatccctcaaatattaagattaattttagatgtgattttcgcacccttccgcgagcctcctctgcttgtagtgggagatctct

SEQ ID NO: 44113 - DNA, 2404 bp, Cannabis sativa
  modified_base (1649)..(1671): a, c, t, g, unknown or other
gaaaaatattgctaaagtttatccacggccaattagcctcattacataagagcacaaataaactatgctactctacaaaatgtaaaatcctcgtaccaatgagaaagtaaaaaccctttcacaatgaagaaaaagaaaattactgttcttttttatttccaatcaccaacccactttataactctctctttctcatataaagaagtaatctttcattctagcctaactcgaacatcctcatacgccttaaaaggaactcatttcttataataaccatactactgtgaccatctttctattatagacatcttgaatgtactactaaggtcactctctgctgtgccaaattgaacttacaattttaaaccatttataaatcatgataatattaattccaatacaaatccaccagaaccaagaaaaacaaaataaataaataaacttaaatcgatcagggatccattaaataatactatggccaaagatgagagatatacccgaatccgagcggtaggaacctggcccgactcgagcaattgggccaattccctcttcatctgcttcacctgattttctctcttattattcaagagctttatgcgagaaacggagagcttcaacgccgttttgctacatagtaaaaactcaatatcaaaactctggaatccaattcccattatgatcataaatacaaccccaaattcatccctaatacattagaaaagatatatacttaccatttcgccggcttgaagctcctgtgaagcatactcatatcaaaaacttgttcagatcccttccagaaagaaaaattcacagaaactctgattttcacccctgattaaaaaaaatgaaaaaaaaataaataatatgtgtgtaattgaaccctgaatatgatatatgggattcagaacgtgaaagaaggatttgggggaaaacaaaatagttgggagtttggacagttggactttcgcggaaaattcaattcgatttcggggtggtaaacccaagacttcttcgttatggttaagcaaaccatttattttataatttatatccatttaaataatttctttgtttgactaatttacccttctttcctgtatttatacataaatattttatttttcaatggaactttctaaaaaaaagtcagattgtcttattattatttttctacagttaaattaatatatctatttccgaaaataaaaacttaaaatctatgttatgacctgtatcaatatatatagcaatatattattttattgtattaaataataaaataaataaccctatatttatataaaacaatgtacggtattaattattataactaaaatttttaatactatgtaagttgtattttttaatgcataacaaataatccgtattatcttatattataatatttataaagaattcagggtcaatctcaatctttgacccggaccagtacctaaacctaaactcgatcccaggactcggacccggacactaggatcagacctaagacccagatccaagatcaaaactcgggacttgggctcgggactagggacccgaacccggacccgtatgcagacccggatcgagacctagacctggaccaataattagtgttgaggtcgagtttattgaaaatatannnnnnnnnnnnnnnnnnnnnnnatacaagtcaatatcaaatatagtattgtataaacaatatcaatacaatacaatctaacacaatacaatacgacgtaccaaataaactctatatgtataaatatatatatcttatgggaaattaattaataggtccgggatctgcgtgtgggccagaggttggggacatgctctaagggtcaagggttagggtcgaggttggaattgggatccaagttcaagggtttgtgtccaagttcagaggtttgggtccaagttcaagtccgatggttgggttccaagtttgggttggggtttagggtccaaggtctgggggcctaggttggagtccaagtcctggtggaagttgaagtcaaagccagagtcgaggtccggactagggtcggcgtccgaggtctagagacgggttgagatcaaaagtatttatgaaagagaatatcttatataaatgttgaacaattaaacagtattattttaaggataaatagtggcatacgtacctaaagttttaaatttgtaagtggtataatcccaatgtttatttttagcggcataagtacccaatatttgtaaaattgtaatttttctctgatttcgtcagtacaagctctattatttttttaaacagaccacttataaggtcaagattcttgatcattgggtctatatagaaacatgtagtatcaattacttctaaatgttcctttaataaattcaaaacggagtttgtact

SEQ ID NO: 44114 - DNA, 3279 bp, Cannabis sativa
  modified_base (3238)..(3253): a, c, t, g, unknown or other
caagtaatgcaaagatgcttcagggaaattggagaagagcaaacgaatccgagacacaagaccggaaagagcagagaggtcttgccaatcattgttaactttggaaaccaagtttaagcaatccgagaagacgaactttggatgtaaatgaaaatccaaacaccacaataaactttgcaacaaagcctgcccctcagcgaatataggagtagaagcaccaggtagaaggcgatgttgagaggctaccgagtgacgatgtccaatcttgaagatgaatccagtccctgttaaaatattttttgtgatctagggctgcatccacataaagagatggagaatcctcttgaaagtcatcaacttgcagccgtagggaatgatgagtgattggagtagcttccgaatccaattgatccgtatgatagctttgttgagcctcattgtattcctgtaaataattaataacaaactcttctacattgttaggaataccaaatctattaaataaaattaagttgcgtgtattccatatatgccagataagagcaataaacaaaggaaaatcctgttttgagatattttgcaatgcttgaagataaaactcattaatatctgttctacgatagtcatagtaaaaatttttgaatcttgaaagcttccaaatggtcttcgctctggggcaatccataagggcatgagtgacagattctgtattgttaccacaaattgagcaatacggttgaggaagaatctttttttgaaataaatttaaggaacacggtaaaatatgattgaaagctttccaagtgaaatgcttaattttggggggaacagaaagagaccagagccttttccaccattgctgaaaagggttaggattggaaaaagaaggtacatcaatggaggctagggaagaagcaaggtgataagctgatttaacagtgataagaccagaagagtggaatccccagattagagaatcagtcagggttgggtccaggggaatttggaggatacggtcaacctggtaagaaggaaaaaaatgtttgagttttggcacattccaagtggtgtcatggtttatgaaaaaagagacaaaagcctgagaggggtcaattggatgcaggatggtgggattggcaagaccaggaatccagtttgaagctgataaaggaacatgggtacctgcaccaatcttccaaaccagaccttttttgaggagttgacggccccaaaggagacttctccacgtgaatgaagaattatagccaacaggagcattcaaaaagtcagagtgtttaaaataacgagctttgagaatggaatgtaggagggagccagtatcagtccacactctccaagcttgcttggccagaagagcttgattatgaaaagaaaaggtacgaaagcccaatccaccaaagaagttagagaccgagatggcagaccaacttttccaatgaacttctttagtgcccaaagaaccccaccaaaacctagctataacactctggatttttaggcaacttgaagcaagacattgcaaaagaggggatggcttgaacaacatcctttataagagtttcctttccagctctagagaaaagcttatcattccatatattcaaacgggaggaaacgctttggagaagataatgaaaaaccgaattggtaaccctacccacacagtgagggacacccagatacttgctaacaaagccctccccagtaagatgcaaagactgctgaaattgatgctgagagtcagccgaggtgtttggggagaaaagaatggaagacttatccttattaaccagctggccagtagctctgttatagagctggagaatagcattaagggcatcactagaatgaggagtgacatgagagaataacatgctatcatcggcaaacaagagatgggataggggggctcccctatagatctggatgccaggaaagcttccattagtttcatgtaaacagatagctgcagaaagcccctcagcaaccaagagaaaaagttaaggagataaaggatctccttggcgaatgccacgggttgagtgaaaagggttagtgagggtaccgtttatggacagccgataagtgacagtagacagacaattcaaaataagagaggtgaagggtgcaggaaaaccaacatgagtgagcagttgatggatgaagtgccattcaactatatcaaaggccttttccatgtcaagcttaatagctgcccaacctatcttgcccgaacgtctagagtgaatggcgtgaataatctcgttagcaaggagaatgttgtcagtaatttgacgacccttaaggaaagcgctttggtcaatgctaataatcgagtgaagaacaagttttaaacgattagcaagaaccttggagatgcacttatacagagtattacagagactaatcggcctaaagtcatggaccattttggggtttttcttttttggaatgagatcaatgatcgtttcattgatcagagaaatgttcccctggtggttaaaaatttggagcatagctcttgtgaaatcttttccaagggtagaccagtttttagataaaaaagagagttaaaaccatcagggccaggtgccttatctcccgaaaggccaaataaggcctgcttactctcaatctcagtaaagggttcttcaagaaaagcagactactgaggggagagtctattagagatcccttgaaggatagaatttatagccatatcacacactccttgagaactgaaaagagtagtgtagaaattgagaaattgggagactatagttggagtatcatgagaggtagacccatcaggaagagtgatctggcgaatggaattgttctttttacgagtggaagcgcgacgatggaaaaattttgtgttcttatcaccagcacgcagccagtcaactctagcccgttgcttccaataaatctcatccttatggagcagcccatccaattgagattggagataagcagcttgagttgaagattgaggagttggctgagtatcatttaaaagacgatggagctcaacttgagttcgagatatttggagctagagagggtgttgggttttacgccaagtcttaatatccgagagacatgtagattgtctgtccagaaacatttgaaggggggatatagcgaggttacttgaattggtccaggatgactgaacagtggaaacgaaagaagtgttggaaatattttaccnnnnnnnnnnnnnnnnaccaagtatgtttgattaacatccta

SEQ ID NO: 44115 - DNA, 3843 bp, Cannabis sativa
aacttgtaaatagaacaaccacttctcttctctcagtctcatcttcttcttcactacccttttccacttctacgaaatacccacttcaatacgatttgatcattaaccgaccaactcagtcctcactcgaccagactcacaaccgccgcccaccccttcgatgcaccacacccaattccgagtactcgccggaggagaaggaggaggaggagaattcgaagcccatttcggaattgggttttgaagggtgggtcgatcagaaactagcttcggagaagaagaataatgaaacggagggacccagctctgagattatggaaatggataaagctaagagaaagtactataacaagaggaggcagaggatgtacggaacagattctgatgaagaagattggaggaggagaaatgaagatgggtttgtggagttgaagcctgatgtggttgagttttcgagattgcataagcgagaagaagagttgtacttttacgatactttttgttatccatgggagaaagataaacattataagatggtttataagttggagaagaagtattttcctgatcagtgtttggacaaggcatttcttgaagctggagagtcaaattcgaatgttgttattgctgagaatcgaaaggggaaagttgtggcaaaaatgagtaaggttgatggtgagaaagttgagggtggtgatggtgttgatagtaataaggggcttgttttctttgatgaaggtgaggaagaaaaaaggagtagagaattggggaaggatgccattattagtaatgatgttactgagaagaaggtggaggagttctttaagtgtttgaagaaagttcccagtaaggatgatgctgtgggagttgataatggggaaccttaccttgtgactaggagtactgagcttcctccaagatgggatactcccaatggaacagtggtcttaatcaacaaaccaaaaggtaattcattgatgccttcttggtgtagtagagtatgggtggcaattcgtgtttgcttgtagtttttgtgtggtgttgaggtcttacatttactgaaaaactaccgacatgaacacaacccgtgacacgaaaaatttataaagtacggacactaacactacttgcataaattttgtattgtggcgaacgtgcaaaatcttgtttcatgttttgtcaaacccgcgtcctggcccaaattgccacccctaagtcgagtagtagatatgattccaatttttaagccttctctgtcattgaaccatgtgggcaaatggattagaacatccacaatgtataaatattggttttgatcaaattcaacttattatagtgtttgatcagaatcagctttagctggcaaatggacgtagtttagttgttgtgactttcatggtcaaatactcttcattccatgacatggttaaatgtcttcatgattttacatgcttgttattcacatttcctggaagtaagaagtaccctgaattatgaatttgcaacacaggatggacttcgtttacagtttgtggaaagctgcgtcgccttgtcaaagtgaaaaaggtttcttttttgcctattgcgcccgattttatataactcccactatagtctcctctaacttaattgtttggtggttttgcaggtagggcacgctgggactcttgatcctatggcaactggtttattaattgtttgtgttggtaaagcaactaagttggcagataggtatatcttgaatctagtcttgtgtgttaagtgtagcaaattacatctcatctagcaactagttaaaatctttgttgatatacatcaattgtaacgtaacattgaatacttgttgtgactagctattatgctatgattgagggttttatttgatttttttttttactacagctatcaagctatggttaagggttacagtggggttttccgtttaggtgaagctacttctacttgggatgctgattcaccagtatgtttgctttttctatttaaataacaacaatttgtactcatgattttgcatggtcttagatttcactcgagcattgttttcctatataggtcattcagcgtgaaccttgggagcacatcaaagatgaggacataaaaaaagcagcagcaacctttcgtggcgagatctggcaagtacctccaatgttttccgccatcaaggtaaaagtgtctgtgctatttatctgttcagtagcagatgatatgcaacggtgttgatatatcgttggcctttcattttcatagcatgggacttataattattggttttcttttatgtatttacttttatagctgaatacctatattagtgcattttgagagagaacaaaaaaggagtttgtgtttgcctcttcacagtgagatagtttgcacaaatggcctcttttattataggcatacttatttccttaccactttgcctacttttttgacaggttggaggtgagaaattgtatgagaaagctagaagaggagaaagcattgagctttcgccacgactcatttcaatcttcaagtttgacattgaacgtagtttagatgacaggtgctctcacacgaacacacaatgattccttgatcttaattatacctaataattttagcaagatctaatgtggaacaacccaccttcatttatgctaaaaaataggtgattttgtttattagtgcaacactatgaatcatgcaaaatcacttgaccagtcatgtagctgaatgtgctattcaaatttccaataatcaatgtcattatattcaacaatctaattattatttcctggtgtgcatctctgcagacaaaatctaatttttcgggttacatgctccaaagggacctacattaggtctctatgtgccgattttgggaaggctcttggaaggtatttactcataattaactcgatttttgtaaaagctttctcttttttttgttccaccttatgttttttttttttttggaatgaagaaactctacaacaaagtttatagctctttatccatgttttatacaattaattaattttactcttcttcactttcagctgtgctcatttaactgctcttcgtagagattcaattggtatgaacccttctatttttatctttatcttgcttaataaaaaatgcaacttcttcttcttctgttctacatgactaattataaattttgttcattgatttctttcaaacttttacaggagaatattccgccgatgatgcttgggaattcaaagatttggaagaagcaattaccaaaaactatttctagttgcttattgaagtcattatatgcaagtctctgcaatttttcaccctatataacaaaccacagaaaaggttccaccttttttttcatcttaaattttgttattataatgtaaatttatttatttttataccaggttaaattattctttctgaaaattcgttaatttttccaatgaatgacactaaacttcatgaactacaaacaaaattttcgagaaagaggtgtttttttagatgataggaatggtgagagaggatagcatgattgaggagattgtgcaacaaaaattgctgaaagtccattgaaacaaaactttcatcgaaaatgaagattctggtgatcgagcttttgcttcgacggacatgacagcgttgaagaccatttgaggatgtttgatgcaaaattttgaatgtgtgctttttacttgtcataaatttaggaatttgtgaataattgtgttatgaatttaacacaatgccctaaagagctttttgaggtgttttgaaacaaaattatttcgtgatattagaggtgggaattagtaaaaaaaa

SEQ ID NO: 44116 - DNA, 2195 bp, Cannabis sativa
tcattttttgcatttatcttttgagagaagagagttttttttgttttgtgagagtctagttgttcatctaggttctagtagtttatttcttccattgtaataatatctctaacagtttcgacttgtaataatctctgagtttcagtctcagtttcattgataaacaagctcattcattcttggtgtgtttgtttcaattatttttcataaccattacttattagtttctgtcattagtctttcagctgtatcattaatcattattatgtgttcttgatgattggattggatataagagacagacattatatctatctgtgttattctataacagagagattagaaccgagcctgtccttaaagtagacatggccaagaaattagctatcatattctcaaataagcaacaaaacatagaaaccgaatgatgttatttcagaagaatctcatttgtacaaaatgattaatattcattatgtattaatctcaaatgaacttgtttgttgttgtggagtctcaaaccccaaacacaacaccaaaacagccagcaaatgatcaaagaatgaatcacacaaaccagtaatcaagacttaaaacagaaagcataaaatcaacacaaaaacttacgtggttgggctacacaattgggggagatcatgagcttaatccacgagaaaaaacagcctttcaatggctgtatattaagctttattaatgccaaaaccaaggtacaaaaaaccctttactcaatggagttgctccttacataaacctcacttgagatctctcaatcaaacacatgagagtatctttcacaaccctccagcactcttattttctcctctcaattctcaactaaacacattacatgtgatcccctatttatagtgtcacttggacaaactaaaggttgtcaacttaactaacttactcccgagttagttaagactgttgaggacaaatacaaactgttttaactaacagttgtggcacgtgttcaagaggtcaaacctcaataattgtctttgacaaggctggtttgtaattaatacagatgtttctattggcgcggccgagaaggtgtatttgaaatcatcagggtagagtgatcaaaatccatctcaaagtcatcactctctcaaactgaacctctggtttgtggggccttacaacagtgatttcaaaattttggtctttcaaaatcagtgtaagatccaagaaagaaactttcagtgagtacctgcaaaaatgtactttaagatccacatttcaattaaaatgttatgctacaaagtacaaactctttgagtcaaatagcagcaaaatttagattccttaaaccaaatatatattaaacataaaaaaccaaatagtaatttagacctgtgatttcactagtcaccgttatacaaacttcaaaattttgtcagaacaagaagccaagcaaaataatgtatagagagacaaaatgatcatttcatcttgtattcttgcaactaattctgtaaaccagacaaaatatcagagattggaaacaaaaagttacatactttaacaacaatctacagaattatatgtaaagttgcttcctttgtttttgttcttggcaaaaatcaacagaattatttgtctagaaatctcaaacacatgagtgacattagtgttctgtccttgttagttatagctcattgggtttctgcaaagagttctttgattgaattctgtttgtcctgaacctatggtttgtggggcagttacaacagcagcccacagtgatttcaaaaatgtggtctttcaaagtgattataatatgaaaatatgataatcttaatcagagtgagtacctacaaaaatgtactttacaatatttatcaattaagatttttatgctacaaagtacaaaccttttgagtcaataaatttctacttgcttaagaagggtcacaacacaagagagtttagtttccttaatccaaaaaaccaataattttgctgttataagttatgatttagaccaaatataaattagacataaaaaccatacagtaaaattacaaacttcaaaattttggtcagaacaagaaatcaagcaaatggtagcactaatattttaaagctaactaaaatataagaacacgcacattagttcacaataaattttaagaaaaaaaaaataatacctcattcttatgcaa

SEQ ID NO: 44117 - DNA, 4785 bp, Cannabis sativa
aagaatccggagtcccccaatcatctatggaaaatcccacatcagcagagatgtcatctgcatccaaccctgcaaatgaaccttcccctgctgatacagtaaatacaccagctgcaactacagctccaccagtccaatcctttccttttcaaagtcttgccccacttaccataaaacttgacagatccaattacccctactggcggtctcaagctctaccagcccttagagctcatgaccttgaaggttatgtcttagggataaaaatatgtcccccacagtttgttgacaacacagtcggaggccctataacagatgaaccgagacaactaaaccttgggtatgctatgtggagacgcacagatcagtccgttctaagttggcttctcaattccatctcagagtccatgtttggacatgtagtaaactgtctatcttcgcatgacctctgggttactctcgaaaatctctacaccaccagttcgaaagccaggactctacaacttcggtttcaactacagtcacttaagaaagggagtctttccatacatgattatattctgaaaatgaaaaacattgctgatggtttatctgctgcaggtcagcttctgtctgatgaagatctaattctttacatacttgatggtcttggtcacgaatatgaggctgttgtagttaacctcacatccaggcatgataaagttacactccaagaagtccaatacatgctccaaagccaagagattcgactggagcaactcaactcagtcttaaatgactcttccacacctgctgcccatcttgctactcaaatgcgcagatctcttaacttcaacaaccattcacacaactccaatcaatcctctggcagtcgctctttcaatcctcgtggccgtggtcgaggcaggggacgcaccaacaacaaccgacccatttgtcaactttgcaacagaccaggtcacatagcctccaaatgctaccatcgttttgatatatcattccaagcacctggtgccaatcaatctcaaacctctcaaaacaccaactcaaatcaaccaacaaatgatcagcaagcctacttcaccaccactgatgctcacaccgacaatacatggtatatcgacagtggagctacaaatcacactacttcggaagcctccaacatacaacacaagtctgatatgaaaggtataactcatcttcttgttggcaatggctttccccttactgtcactaaatctggcacaagcacaatacacaataaatcaggccatcttattctcaatgatatgctttgtgtccctgaaatatccaaaaatcttgtgtcaatctctcaactaaccaaagataacaaagtatttgttgaattttatgctgatttctgtgttgtgaaggatctactcacgagggaggagctgcttcgaggagtgcttaacaatgggctttatcagttaacacttgctgcatcatcatcaccaactcaacattccaccagtagattaaatttccttgtttcctccaagagcagacaaactgccaagcctccagtccagtcaagtccaatagataggtgtcagtctttatttgctgaatcaaactttaactctgatgtcaatgtgtggcacatgcgccttggccatcccaatctcaatgtattgaaacacatgttgactaatgaaaaagtttctttcaaaaactctcctcctttttgcaatgcatgtcacataggcaaatcaaaatataagcactatagcagttcaaattctaagtctcattcaccaattgaactcatacatacggatgtatggggtccttctccaatcgtttctaaggaagggtacagatactatgttcacttcatagatgattatagcaatttcacgtggatatttcccctgaaactcaaatctgatgtgaaaaacacatttctcaatttccaaaaatttgttgaaagaaagtttgacaccaaaattaagaccctccaatcggattggggaggataatataggaaccttgcacctttcctagaatcaataggagttcactttagacacccttgtccccacactcacgctcaaaatggaaaatccgagcgaaaacaccaacacatcattgagatggggcttacacttctatctcaagcctccatgcccttgcggttttggtgggatgcatttagcacagccactttccttatcaaccatctctccacaccaaccttagctcacaaatcacccatagaaacacttttcaaagttacacctaatctgaaatttctgaaagtatttggaagtgcttgctttccacacttacgagcatacaataaccacaagcttgactttcgatcttccaaatgcgtgtttcttggatacagtcctaaccacaaggggtacaaatgtctacacccaagtggacgcatctatatagctcacagtgtctcctttaacgaactcgaattccctttttccactggttttggccaaactgaatccataacacccatgtcatcgccaacaattcactatcatcattggctgccatttatttcctctcctacatctcatgagggtgctgatgatgatgcaccaaatgttactactgaccattctccttgttttgcaggaccagaagcaacttcttactctactccttcatcatgtggctcgtccaaaacacaacatgctactcccaacaccaccaactcctattccaccaacccactggccgttcatctcccaattcacacactaacatccaactcaccatcaacaattccctcaccaccctcccctgaacccgtacccccactgccctctcatcccatggtaactcgctctaaggcgggcatcttcaaaccccgcaccttccttgcctctctacttcacaatccacacttaccagccttctcactctcaacaccttcctctcccaaaatagcattgaccattccagtttggaagaatgccatggatgatgaatactttgctctcaaacgcaacaacacgtggtatcttgttcctcgccttcctcacatgcatgttgtggacaataaatggatctttcgccacaagttcaactcagatggctctcttcaacgttgcaaagcacgactcgttgccaaaggctttcaacaacagcccggtgttgatttctttgacaccttcagccccgtcgtgaagccatccaccattcgggttatcctatccttggctgtcacttatggttgggatgtccaacaaattgatatcaacaacgccttccttaatggcacactcgaagaagaagtatacatgactcaacccattggctatgttgatcccaatttccccactgtcgtatgcaagcttaaccgagcaatttacggtctcaaacaggcaccgcgtgcttggtttgacacactacgcaatgctctcctcaaacttggcctgcaaaactccgtgtccgacacttctctcttcttccttgctgaaggtgatgctcgtttatatgtactcgtctatgtagatgatattctacttactggtaacaattccaatcgagttcttcacattatctctcaactgaacactgaattctcactcaaatccctcggctccgttacctatttccttggttttgagacaagtagggggcatgatggtttgcacttatctcaaaccaagtattccctggatcttttaaaaagaactcacatgcttgaagcaaaaccttgccccactccaatgatccaaagtaacaaacttcacctacatgacatccctccattcgaagacatcactcaatatagaagtgtcattggagctctacaatatctcacactcagtagactcgacattgcatttttccgtgaacaaattgagccaatttcttcaagctccaacacaaaatcactggctggcttgcaaacgtatactgagatacattgcaggaacaataggagaaggcattcaattcaaaaggaccactgatttcaccatcgaaagcttctgtgactctgactgggcaagctctcttgacgatcgcaaataaacatctggtatttgtgtctacttcggaggaaacctgattagctggagctcaaggaaacaaaagtctgtagctcgatccagcactgaagctgagtacaggtcctttgctcaagcttgtaccgaagtcacatggttgcaatctttattcactgaaatcggaatcaaacacaatcacactgctgtcatttggtgcgataattcaggtgcacgccaactcgcttccaatcctgtatttcactcaagaacaaagcatattgagatcgacgtgcacttcattcgagataaagtctcaagcaaagttgttgaagttagatacattcccactgaagaacaaactgccgacattctaactaaatcactacccatcactacctttcattatctcaaagacaagctgactgtgtgccaatcatcacagcacagcttgagggggcatgttgaaatgaaaggcctaacatcagcccagcccgaagaagaaagcccagaaattgagaaggcctgacagctgtgtactgccacaatcattggacaatgattgaatattcaccaaatcaattatgtggtcccaagagaatatctttctgttacagccgtgaccaatagggttgcaccttccagtacattccattgtgtataaatatccattgtaaatgcattgtaaaatcaagcagtgagtaatcaatataatagtaatatacagagaaagtttctcctatttttctctgcttcagccttaatttcctctgtttagcttggt

SEQ ID NO: 44118 - DNA, 2509 bp, Cannabis sativa
agatttactggcaacaacgatctcagattgattggatgcaattgggagataaaaatacaaaattctttcactccaaggcctcggctaggaaatcaaacaacaaaatttcatctctcaaaactgaagatggtacaacagtcacttccaaattggatatgagcatggtcattcaagaatatttttcccacatcttccagcattctcccacgaataatgaggctttggctgctactttggatactattccagtttcggtcactgttgatatgaatgagtctttactcaaaccatttacacaagctgatgtagaacttgctcttcattctatgggatctgacaaaagtccggggattgatggtatgtctgctatgttctaccaaaacaactgggatattgttggtaatatggtcactgctgctgtcctaagtgttctcaatgaaggagctgacccaacgccgctcaactctactatcatcactctcataccgaaaataaaaaaggcccagtacatgaaggatttcaggccaattagcctttgcaatgtcatttccaagctgatcactaaagtccttgttgctcgacttaagaatgtcctaccacatgttatttcagaaacacaaagcgcttttcttccaaatcgacttataacagacaacatattggttgcttttgagttaattcatggtattaaactcaaaacttcaggtcgtaaaggagtggctgctataaagttggatatgagtaaggcattcgatcgagttgaatgaaatttcatcaaagttgttatggagcaaatggggtttgctaatggttgggtatctttgattatgaactgcttgacaaaaaaccacttcacttttctcttgaatggtgagctcactggatcggttaccccaacaagaggactccgacaaggctgccctttgtcgccatatttatttttgatttgtttcgagggtctatcttgcttgctgcaacatgaggagcggttgggccgtctccatggttactcactttctagaagatctacaccaatttcacatctgctttttgcagaggatagcttacttttttgcaatgctactgaaagttcttgcaatgctatcaagagatctttggacatctatcacaaagcttcaggccaagtcttaaatccggataaatctgtcctctctttctcaccaaacacaactttggctgcgcaaattcagtttcatcgagtgttgtctatgccaattcgcgactgccatgaaaagtacctaggattaccagcttatactgaccaagataaacaacgcctatttagtgaagtcaaagaaaagatttggagactaatgagaacatggaatgacaagatcttttcggttgggggaaaagaaattctcctcaaggctgtggtgcaatctattccaacttatctcatgagttgtttcaaattaccaaataacatatgtaatcagctagaaatgatgatgtctaatttttggtggggttcaaatgacaaaggcacaaaaattcattggtgtaattggaaactgttatgtaagactaagattgagggtggtatggggtttcggtcgtttgtacactataaccaagcgcttcttgcaaagcaagcttagcgacttcttgacaatcctaactctcttttgagtagattgctgaaaagtcgatatttccagaacaactccttccttgaagctccacaaggtcattctccttcacttacatggcaaggtatccttttcggttgagaacttctaagtgctgggctgcgatggaaagttggtgagggcaggaacataatctgtgctcgtgatccatggattcccggtcactccaacttcctcccgactcactactcaagtccttcaaatgttgttgttgctaattttatttctgaagatagacaatggaattgtgacttgttacaccagtatttttcaaggatagatgtggagaggatactcacggtccctcttagtttttttctcaacaaccgatcggcttatttggcatcattattcatcaggcatttacaatgttaattctggttaccattttgctgcatcattagaagaagctgatgtttcttcggtctccacttcacccacagcctggtggacctttttttggaagttaaagctgtcacagaaaattaaaatttttgcctggagggtgtgccatgatgctctccctgttgctacatcgctggttcgtaggaatgttattaccgattccacttgttctctctgtcgtcaagcttgggagtctattggtcatgtcctttttggttgcaaatatgctcgagcagtttggcgtgcaactaatcactattttgactggaacaaggctgctttgatgcaaaaaggtgatttcctcattcatctttccactatggggttgactgaagttgattcttcggaagcaagtgagcagaaccttctctttgttcctgaaaaatggggttgattcactttcttaaggcttcatttttcttatctttcca

SEQ ID NO: 44119 - DNA, 1501 bp, Cannabis sativa
aactgaaagaaaattacagttttacaaacattgggtacttatagcgctaaaaataaacattggatttatgcggcttacaaacgtaaaacattggatacttatgccgctatttaccctgcaaagaatgtaaatttagaaaattaccatttttatgcaattattagaactttgttatatcactatttatattaggcccaaaaactccattgctggccctgcaccttatatcttgattctaaggttttcggccgaaactataataataataataataataataagctaaaacccttaatttttcagaagaaatcatccaaaaacctctgcaaaattcatcaatggcgtccaccatttccaggaagactaaccactttcgttatttctatcgctcattatcctattcccgtcttcaacgatgttcatctccattgccatcttcacacctcaatgacgcggttcaatttcgacgacctcttgctcttcttctacaatcggttcgtgcacttttctcaaatttctcactttgtacaaatctctgacacgattgttcgtgctttcccttcgtcttttcaaatttgtcaatgcaaattttgtcggtttgatctagaactctgtgaaaataaagtagttcttcgatttggaaaatctttaggtattgcctcgagggcttggagtacaatctttaactttgtatcagagatgtctattttcaactacgacgcctaatactaatgctggaaatgaagcatcgaaagtaggagaagaagctaatactggcaaagaggagaaatccggggaatcgaatcagaagcaaagcgattctgggaaatctgttcgcggaggggtacaaatacaattacatatttttcatttgtattgatttatatcaactttttttcttggtttaatttgagaagcttgacattttctgaccttgttgtgttgaccttttgcagccagtttcttggttgagttttattttgctggtagccacaggactgggaattatcttctactatgatacgaaaaagagaaaacatattgaaggtagattactatggtgagtagggtgtttgtttgttagctgtgctagtggattcaggtctcatgaactgaatcaaaattgcttggatgtttctgtttgatgttcaaaagttttaatatagatgaaaaaaaatacaatatctatcatgttgtgtgtatttgaagtttgttcttttaggagtgaagatttaatactggatctgcaattatctcatctctggaacttgtttcaagcttagaaatatgattggtggcatttatgtttttcttttgaataaaatgcaaatcgtcaagaatagctcctaagcaagagaggtccgtatctttcctattcaaagcttgaaaaacatgggcacaatcagattcaaattgtaaagtttttaagccagtccttttgcacaatctgattcagttaagcacagccatagcttggtgccatttatgtttttgaatgcct

SEQ ID NO: 44120 - DNA, 2268 bp, Cannabis sativa
ctagcgggctttcgatccacacctgtccagatggtgcaaagacgcttgaaatccgaacaaaaataagcgagtaaatggcatagccaacgaagggttgaaaatatgaggctatgtataggaagacaacaagtcacaagtttgatcgatgggtcatatgtggaagcatatggaaggatctttgtttgatatataccaaggtttttggctgtgggctactactattactactagtactaataactatcaactaaacgacactaaacaaattatattaaatatacataaatatattaatatttttgttttgtgattttgcatgctacttaaattttaagccatatgaacgaatctgatatgacattgaagatctgatagatattcagtgtctttttcttataaagtaaattaagttttgagtgaaatgtacgaatggaagccacttaaaaccacgtattcaacttaagggatgtttaattttagagaaatactaaaagatattagcataaatattggagataataataaatttttattttattattttattcggttgcatattaatagtttagtggactaccatgaagtctacaacactaaagatgctctaagatgcatcgttacacccttttcagggtgcattgtaaataagagtggagggagggagtcttatgtagggatgtgcatcaatttgtgaggttataacatatttttattaatttattaactcataataaataagatatttttatgaattaaatagaaaaatttcgataaagctttcgaagaataataaatagaataataaacacaaaatatttatatgattttgtagttaaatctacataattcacggatcattcttatttctggtattttgtttacggagtaaaaaaaaaaaatacaaatgataaaaggtgaatttctttcaaggtgattacttgattgaaaattagccttcgtcgcacagtgattaatctccctatttataaggtttctcctatgacaattatttcttttggacttatcttaataactattcatgaaacgtaatctccacgttttatacgtatgataaaaatgcataaacgcccagtaaccgtcacttggttttatccaatgaatagtttatttcaccgagaagccttcctaattatgctgctcgcaaataacttttagcagttcttcatgtaagtttcttaagttcatctcgcattctaaatgtttttatgtggtgactcatctcgcctttgtatatcttgtattcttttgttatgtgtagattatgtacttagttatctccgaaatgattgtaatatatgttattttgttctcactgactcttccatttaacaattaatatctttggactcacctttaattatcttctaaggtaagacttaaatataatattgctaatagtcatttccgaagcatttttaaataccatatttattctcttaaatacattctctattattttcgaatcttgttcacgtgtcgtggccatagttgttgcttgaaatatgggtataacataagctaatataaatattgcattgcaagtatttaattgtagcccgctgaattaaaaattacaaaaagtttaacccatccaataattttatcgttttgattaggttaacccatccaaattgatcttcacctttttttatatataattattattgttattagtttttagtattcaaattattagatttaaaaaattaaaaatatattatatatattctaagctaaaaaatactatagtctaaactaattttaaggactttaacataagataaataagtaaacataaaataaaataataataataataataataataagtaataatatggcgtagattttaaatttcaacttcagtattcaaatataataaaaattattaactataaaatttaaatttcaaattaaacaatataaagtccaaactttaaatacaaattttaactaataaatgtaaaatatataaactagtttatttcgatttattcaggttgattgaacggtttagaataatttgtaaaccactcaatatatttattagacggttcaaattttcattgtattatttcaggctataattttcattgatttatttagtttggtttgaacggttaattcggattggacaatttgtaatttttttgaacacccttagtcttatgggatcatttgccctccttttcaacttcttataaattaatttttgtatgtatatattttaaaatattttagttttca

SEQ ID NO: 44121 - DNA, 886 bp, Cannabis sativa
catgcattaacctagtaggttgagggctgcacgcactaacctagaaggttgaagggttgcacggactatcctggcaggttagtgatctccacgtgtcttcttcttttgactatgtagacatgttaggtcttgtggacaagatttgggataataatcttaaactaaccacttgtgttttacagacctcaatggagatagttgcaaatatacttgtaaccttaacatttatatatgtacatatgtttaacttagtgattggcttgatgacatggacactatttttgacacgtggcacaaagaaaacaacatcgagggctgcatcccaggatagggcagtgttacctgtacacttagtacaccaaaattactagtgtttgtaagattcatagcacaactaatcgctataccacattcactcaatatctcaaaagtactagtgttggtaggactagtaacctgactaatcactataccacgtgcattcaatgttggtttttatggtacatattagagatgaaagtggaagtagattttattaaaaaaaatgaatttattccaatatgaaccataatccccaacgatctaaacataataatatatagattaatctaaactatatgaaaaaaaaacacaatacctcgtgtagcctatcaagggatcctcaattcttcttgtataaaatgtcaatcatccaatccttattatgagcaatgatgaagaattcacaccacagtctaccaaatcagccccaacactcaggataagagtgggcttatggatacaaatagaagaagaattttctatcatagtgtgtacttaactcatgggacattgtaattatgggataaggaggaatttctcgaccacaaagagagagagagagaga

SEQ ID NO: 44122 - DNA, 3804 bp, Cannabis sativa
  modified_base (2322)..(2323): a, c, t, g, unknown or other
ttgtatcactttcaaataacatagaaaaaactagcataaaatttagtatacgtgcctcgcacgtaactctttgctagtatatatatatatatagatatatattagtaataatttagagttgtttaagtaaattttaatcatttttttagttttaagaattaataattcttcttcaattttttaagatttgatagaaaattgttatttttatataagtaaatctttaaataaaaaatcaataataattttctaaatcacttaattaattttaaaatattgatttcttttttatatacaaaataatttgtaattattcaaacttttttttctcgttttttaggatttgaattaatattttaagagttatcaaaaaaaaatattcatcaacttttctcatttttcttggggaggagtcaattcgatagttgtcaaaatttaaaagacaaaaatactaattaacatttaaacgagaaaatgaaatgtaacctaactgaaaaagattaaactttgatataatatataagtgaaagaggagtgctaccgtcaacttcctattataatctcttagtcaacctctacgcccgaaaacatatgtcgaaaacatgttcgttatgctttcaacatcatccctgtaaatttttaaaaatttcgaatagtttacagtgccgaaaatgcgtttgaagtttttgaatgcgcgtggtaaactagaatattagaaactctattttcggtactgtaaactattcggaatttttcaaaaatttacagggatgatactgtaactataacaaataccgttatgaaaaaaaaattgaaaaaaatgtttctttatgtgatttagaatgtaaaaattaactaaaaaattgtaataggaagttgtaattaacactccttataagtgaaaatatatattacctagctgtatatttttaagaggcgggatccatatcataaatttattggacaaaattaaatattaataatgatatgtatagtacatatgaaaattatacatgcatacactatagatatattgttgacaatacataagggttttcctaaattaaagtagcccctactcatcttttgtcaaaaaaaatgcagcccctaccatcaaatttatttctttattcttgtccaaaatgaattcaaagtctccaaatatttatggtaatgtaagggtgaaatactcaatatggtatcattaatgtttttggccactttgcaaattgtggtagtagtaccaatgccttaaaatatttctttttatgtcattgaacacgtcaatattgtcctcaaattagaatcggaaaattaaaaatcacaatacataattaattaagaaaagtcataaaataaacaatatatattaagttgatattacgcatctattgcaagtataattaattttttttaattaagtgatgttaagtgtaatatatgatgaatgtttaattttttttttaataaagtaattttttttttaatttttaaaatagggttcaagattttgatctttgaggattttttttagctatttcggctacatgtatgccctttgaattaatttgattatatatgtataattaaatccaagtaagatatcgtagtgaattgttgtgtgtctgattgagtaaaattatcttttattttaattcaaagttaactaacaaaatttaaaatgtggttaaaaatatctataatattttaagcattttaaatttgaattaaaattttcttatataaaatatctacatattttatttttaaatatatataataatattataatattaataaaaaatattttgctaagtaataatatattctgttaaagttaatataaaaaactaaaaaaataccgttaaattaaaaattatattatatagccacattttatatagaattgatatataaacatatgtatataattaaaataaaattatttttttgaattaaataataagatttattaaaattaaattattaaataaaagtaataatcacgtcccaatttgggctaattataagtaacaataacttctaaattgtacttatcttccaagtcgcttattaagaaagtatgtatttatgtaaaaataattatagcttaataaaatataaacatatggcttataaatttatttatgtaaaattaataattttattctaaattgtaatatatgtataaatattatatttactaaaaaataattttattatgatatagtattaaagattatttattattatcgttgttacattgatattttttggtgttttgattttttttagctggtgtaactctatttagttataacnnctcaattagaatataatttgtttggtctcaattatattcttaaataaaagttcaattgtatatatatgttatataacacacacatatatatatatatatatatattatattaaatgtggctatctaacaaaaattgttagtttaacgattctttttaattttttcgttaaagttaacggtgaaaactaacacaccgttaactcaatcaattaaaatcaattaattatctaattaattatctttttttttaaaaaaaaaaaatagttttaaatatttaaatttaatttaaaagtatcaacaaaattagataattatttttttatatattaatcttaatttaaatttgaattaaacgttaatttaattaattaatcatacttttatatctctcttatattaaatgtagttatttaacgaaaattgttgttttaataatttttttattatttttccgttaaagttaacggtaaaactaacattgtaaaatcaatcaattaattatagttttaaatatctaaatttaatataaaagtgtcaataaaattagataattattattttttatataaatcttaatttaaatttgaattaaatgttaatttataatgaattaatcatactttataataaatttattagttattttgtttaaaatatcacaactataaaaataagctttttattccagttttcaaaggtattttatcccaattttaacttaaaataaaaatcgacgagatattatgccagtgggataaaaagtcttattaaaagtgacataaaaaggaacttttaatcttgacttttatgtaaaaatcgggataaaaagagtcctttcctcccgatttttacatataaactagaattaaatgtcaaaaatataataaaaaaagttatatgaaaataatcagagaccgaaaatctttttattagtccaaattaaactttacatttttttcgtaaaatattcgaagcagtgcagccaaattttaagtccagaataataaatacaatcaaagccaagaaccaccttctcggcaaccataaacagttatcggcaaccacaaacacgatcataaagttctgtccaccatgaaacgccacaaacctaaaagtaccgaggttgacaaattgtcacaaacctccatccacctgagaaaaaagaatagtagagagatccaaagtatacaaagaacaagatcgacatttcagcaaaaaaaacaaagagagatggaaatacttgggggtttcagagggtgtggctcagatatgaaacttcgttggttcatacgtcacccaaaaaaaataaagagattgggtggagtagggttgctggcatgggctacttcacgaagacggtagaggaggatcgaagcccgttcgagagagaggtcattattccaaatgtaaaagtgggatcaaaagttttatcccgttttttattttttttttcaagtgtaaaaattgggataaaatagtcc

SEQ ID NO: 44123 - DNA, 3739 bp, Cannabis sativa
ccaccatcagtgtggcggcgagcatggcgggactccgataagcttgagaaatcgccgcgatcatagaccggtggcaattcagtccgccaccgctctagcttagatcggagtccttccatgctctcatccacactccatcccccaagaactgagctttctgtctcctccactgcttgaggttgtttcgcaatcgcttccgccacctccgacggagaagggccgagctctgattccgttaaaaacgccccaccgctagtcatgagcgtcgatttcctcggtgttgcatactcatacgtcatcggagtaggatgaaatttcgcattatgaaacggagatttcacataattattattcccattccttggggcattctgttgaaccaagttaaacctcggcgagggtttagtaaccctcggcgaggcattaaccatccccatcgctatcgcagcttcgcgaccaaacgatggggatggtttcaaaataggcttaataacatcctttttctttgctaaaacattatgattattattattattattattattatattctatatccacgtcagcatctgaattaccgttaattaacgaactctttttcgtacctttactctttttaggtggttccaccgcaacaacatctgaaacaccattaatcaaagaactcacttttcccgttttacccttatacgacgtcgtatcacctttatcacctgaaccaccaccaccaccaccattgttaacaaccgaactcggtttccccaaattactcttccccgtccggcgactaattgcgctactaatcaacgagcttcctcctttcttcctactcttccttctcctccttctcaaaattgaactcgcctctgattcattaaccatagaacttgattttttccccttattttttcccttattaacttctttaaattccctagctctgttttcagacccaatcaaagaactcacatcactcttagtcctccttaattccgacaacaaacccacatgaacagtatgattattattattttgattttgattattatgatgatgatgaattgggtcttcttcacccattaattccttatacccaacagcagaggtacttaactgagaatacaaaggcatacttctcatcgagctatgaagcaaagcaaccccaatattcaaaatcccttgaggacgacccgaagcccgacgaacctgtaaagcaacgaatctcatccccaattgaggattatgaaaatggccaccgccaccgccgcggccgtgaccgtgaccgtgaccgtaagaagaagttggtcgagaaagagggttcggaatcaaatttccaacaagaatccgtacagtaccaacgtggatatctttaaaccaatgaagagcgtagatttcaatcatgactgctgacgtgtcattttgtaagaaatcttcatcgacacgaaacacaaatttatcattccacgtgggattattgtgtccacgtgtatcgacacgtgtcgagagttttcgatctgggtggacccacgctacggcgtaagtcctcattgaacgtgagactggagaaaggtcttgagctgaaattacatttaattctaataattgaaatgggtttagtatagacatgattttttttggtgaattgggttttttattatttttctttgattatttttttttgggtttgttcagatgagagccgtcgtctcctccgtcgtcgccgccgaggacgacgagggaaagggtggcatgaaaggaagaaagatccaggaggataaaagagaaaagggtattaagtgtttttctatttggttaataataataatgaaaataattaattaattaattaattaataatttttgtgttttgagaaaaaatataattgagaaataaatggtgggaattggtcaggtgctgagtttttgagtttgaccattgtgggaaatatgaggttgtaagttgaattttagtaatgataaataatatactaatttgggattaatattaattaatgtaattttttttagtccaaatatttatagataataataggtgatattagtctaaaaatatagattagatagataataatagtatgtttataattttgaattatttttttttatctgtaaagactgtaatatttgtttgaaccatcaatttcaaacatttacaattacgatccttctgtcatgttaaaaaaaacatcactttaacagtttgaatatatattaggagaatttttaaaatataaatatttttcaacatatttttaattatttatagatgagatattttttataattttttttttctagaaaaagtcacattaatttagtcatagaaacaaaaagtaaaaaggcaaggaaggtagtataaagtcacaaaggtaaaaagtaataggttgaaaagaacaaatggagagtgatacaaggtgaatgtatcctaatagtaataaatatgtccattataagtttgtttttttttttttttaaaaaaaaaaatttaatttgtaatctattataatgtaatagctattacattaactatttaatttttattacaatcacactctattaaataaaatattttaataaaaatataataagaaagtcaaagtctataatacatgtttttttttgaatattttataattataaaataaaaataatagaatcattttagtcaatacaaattttatttcattacattcttatatcaaatcaaacacaataattttgaaaaattctaactacaaactaaacattgtagttaatattcttactttattacactaaatataaatcaaacaccacctaataatattagtcaaaaatattaaaaattaaaaattgcaattatattaatttatttgttactaatttaaccaaaatttaatcatactttccacttggtgggcaatggtaaagtaagtaaatatatatacgaattaaagtatgtcaattggatcaaaatattattatataaggaaaagttgtttggtatatgtgagaaaaaggagaatcattttttcttttttcttttattttttcttttcttttcttgcaatcaattctttgtaactaattaattataataaattacctcaccaatgttctggccattttggttaacactatctgataatggaagtgtataaagcaattaatctccccaaataaaatatgctttggtatagtgctgtaataatagcctatatatacactatttgagtccaagctattacaaactttgatcattgttcttcctatcatcaattggttattaatacataaaggcatgtttagagtaactatataagaagggccaactttaatttgtatggggtataggacaaaatttaaaaaatgaaccatttatttgataaataaattaatgaatttaattaaatttttaaaccgttttttctagcaaacatattttaagagaccttatatggactaaaattataagaaatttcttaaaaggagaaaagagattgggaggtctcatctcttgggcaacagccctagtcgtcttatcataaaaacggtcctgtatataagtagaaaagtataagctttaaagctagcacaatagtgagggaaagtaggaaaagcgaatactgcacaagttcgaactcaaaactcttgaattattagttaaaatgtttatcattatgttgtaataaaattaaatattcaatatcgtacgtatacgtacgtatcacttaccatcc

SEQ ID NO: 44124 - DNA, 1851 bp, Cannabis sativa
  modified_base (49)..(49): a, c, t, g, unknown or other
ttggggtcgaagtccaaaatattgattctcaaaaaaaaaaaaaattatntttaaaaaaaaaaattaaaaatttgattctcaattaaaattttttttaaaaataaaaacagttttataaaatatattttaaaaaaatatttttatttttctaattaaaactaattacaaaagtattacacgcaacctacccataagataattttataatgaaaaaactaaaataatatatgtatgcaattggtaagatatataattttgttggtattgcaagtgtttgtgaagaggccattattattttttctttttaaacaaacttttcttataatgcaattattgaaccaattgagagaacaagataaataaattattagcatttcaatcgatgattttcttacttgatacttcttatttcgatatttcgacgttaatttttcaacgttatttcgatatttaatttttttttttaaggagtacgtaggagaatattatatagagtaattataaaggtagtagacaatatatatgcactgctgctgagacaacacacctatctaaatatatataatgtcttttttttacttatatattactaaaaagtactgccaatgtctatagcatctttttcggtatcatactgttattagtttaattaagtatcgaattttatatataacttaaaaaaatagtttttgacaatatcgctaaccaatgcgcgccacctatagaaagtgttagacattacaaatgtccaataacaatgctctatatatatatattagtgaaagtgaaaggcaccaccttttttgttccaggggaaaatagagagaaacttagtatagtcccaacacatttcctttattaatttgataaaaattttgtatgtggggatgaaaaaattccctaaagtaaggacaacttggacccaaaataccaaaattaaacctttagcatcaaatcaaaaaacttcattgggaaatatatatagtagtaaaaaatctatatatgttgatgattcaaatatgtatttcgacaaatatatagttctattttttgttttccaagggaaaatattcaattatgagtttcaataattattacttaattatatagtactgatcattcatcttgtatatacgttaactgtttatttcacaccttatataactaattaatattgttgtagtcacttgcagatgttagaaaaaatatttaattttctccattttttctttatcaattttcttttttcaagtaaaatacaatatctaaataaccgatatacgttatcaatttttgataaactattgtactcataattatttataactcgtaaattttcattaaataactgatcaaaatccacaaaatatgtaaggcgatttcaatattgtttggaaaaacttatacattttccacaaatctatttataaattagttttataaaagcctaatatacatgcatgcaccgtaataatctacgacgctatacattggatattattaattaattgaccaacccaaatattttacgacagaaatcattaaaagtattttggtatgtatatttctcaaaagaattaactactagcaacgagagatcaacatgcagatatataaactttttaaccaatcaaatacataaaaaaaaaccagattttcacaaaaaggtcttaaaattacacatgttatatttttcagttcttttaattaatatcttttggaaaacaacattgttttcaccttgcggaaatctagtataatgtaatagtaatgtgaaaacaacattgttttgagaacaatagtaaaataggtgttaatttgtatttttgcaaaaaaaaaaaattaaaataa

SEQ ID NO: 44125 - DNA, 2023 bp, Cannabis sativa
ggtgctaaaataaataaaagtgcatcaatatatttattttaatggagtgcattgtaggattttcccttctttatttaggtcatgatatctatcttacaaagtttggaattgtttgaatgggaaggggataagaactcacaagagaagggcaacaatgttatgaaggataatttagtaattgtcagtgataggcaaaaaccctaaaacagcttagggtgagggcgagctcgtgagccgggtgtgaagcaaaagacggggaataaaaaccgggtctggcttttgttcaaacgccacgtggacgcgaaagcgataatacagccaaacctctcgatgacgtgtacccgtaaccatagcctccatataaaacccacacttgcttcccgatcctatttttcattctcatccatttcccactctctctcttcttatcaaaacactcgctttcggatccaaagctccggttaacctatcggacctactgatctagggcttcttattccgactagtttcatctcctctggctgagttggcttgtcagtgtcttcgcacgtttcgttattgagatccgattagcttctcctgtcttggctcgagatccgggccaagaacagaagaaacgggtttgggtgtggattctggaatcaacgctgctcgctcgcacagaccaggttattattcttttgattgttgtgttgttaggatttttcttttttttttttttgagtttttgttcggttgtctagaaagggtgggaaactagacgtggagaacacgaacagtgaaatacggttactgaattaaactcttttcaggtttttattttttaaaaatattgtgggagttttttttgtatgtataaaatgatgcaactatattataagagcttcattttatttacagtttaaacttttgattttttttttttgtttttacacatttgatggtgttgatataatatatattgtttgtatgatactaaaacttatgctggttgagttgataattgattggttttgtttatttcattttttttttacttttacgtgatgggattgtcattagatagaaatacaaattataacaagttcattctgatgtttgaatatcctttgatgctttatcttgattggttcaatttttttaccattgagaaacacattggattggaggtgtttgaacattgaattactgtttaattttgatactgtaggatatagatttttatggcgtcaggtgagggatttcttacggagcatcagagggaaaagttaaaaatagccagtcaaaatgttgaaaatttgtcctcttctccaaaatcccctccatctctgctttctgaattcttaaaagttccccctggtggcaaggcacctgcaggtgtccctgggagacatgtgcgacgatctcactctgggaagtctgtacgtgttaagaaaggtgagttaggtttatgctggactatgcattttgattattggaatggggcggggatatgtactgagatttattgttgaagatacaatgtttcttgatacttttgataggtcactggatgagattaatttatactagatttcacgcttcggtcatgaactcgttagtaaaatttcagttggtttagcattcccgtctgttctcccagtataattatgatatcttttctgtagttatgctgttcattttcaagtgtcttagatgtgtcgtttatgtgggcttcgttatatcctaatcagctattgtaaaatagttgctgggatgatcattatatttattttaaattagttgctcaatgtgaactatgatgtttttttaattgctgggatgtagtgtgtatgcagacaattgcttgtttttgactcaatggtgaatgtcattcattctgaacagtgcttaaatgtcattattacaattgtttcatcataaagctctcttattgcattttttaccctagctttgttgtggataatgttgaatgattaggtggttattcgtgtaataatttatgtatagatagattgactat

SEQ ID NO: 44126 - DNA, 956 bp, Cannabis sativa
gttgtaatttttttttaaataaaatttcaaaattatataaatacaatgaaaatttacatgtgtggtataatatactaagtagagaggtgttatatattatttttcaattaaatattgttatggcctagcactactattggtggagctccctatttgtttagggattttatttatattatttgttttaatataaattggatatttttttttttttgaaagaacatctaagttcattactcacagggcgaattccctccctttggacattggcgagcaaccttaacacttttagcaaagccatccgcaaacaagttacaactacgcttaatggaaaagaaactacaaatctcatattgtttagtaagatctactatagctaatgaaacactaaaagacttacacgtttgatgggcattggtgtttggccaatgcctaaattacatgccaacaatatgaaagaatatgaatttctttatattcattttcagtggctcacgaaagagccatatgaattgaaaaaatttcaactttcatggcagactcagttgaaactagctcctttaagccacaaagcatcaatgcagatgacctgatcgaccattttttttactcagatcaacctctacctttgtccttttcctttccaaactagaatttagatcaattgtttttgtacaattgctgttgaaagttgcataatcgtgataaacctgccttactctcatccgagccaaatctatactcgctagaattcctttccagcaaaggttatttctttgattccagatctgatcgaacatacaaccagggacggacgtactcctatcaatgttataggagtactctcattcgagccaaatctatacttgctgttgaaagttgcataatcgtgataaacctgctttactctcattcgaaccaaatctatacttgctagaattcctttccagcaaagg

SEQ ID NO: 44127 - DNA, 1524 bp, Cannabis sativa
aataatttcaaaaaataaaaaaattgaagaatgtggctggcgacttagtgatcagtaaaaagaagattggttgccttaggactttgggcttggcctttgctgaagggtggatttgatttggtagccgtaggactttgggcttgggcttaaaataactatgggaaaatttaggagttggatttgatttttattattttgtttctttctttacttttacttttacttttgattttttattttaattattaccttgaggacaaagtgtttttaagggttggggattattgcaccataaaaaaaatagtatagggaattagtagtaagtttttagtaatatgtaatgcgtataaatatgtattttttctagatattaagagatattaataaaactttattttattttagaaattttttaggaattgttgagataaacactttaatattcacaaaaaagtaatttgcgacataaatatttaaatttaacttctaattgcaaataaacaacaatgcataactgagactataacccaaaacttccaacacacacgtactttcctataactactcaaggcagcgtcaagttgtgccacaaattactctttacaaaatagaaaaaatactttgagaaattattttatctttccttgatgatgtaaattttgtggggactaggggaagagagagagagtactgctactactggaaaagtaggtcattattcaactcctaactaaactcatttttaacttgtttttaataaataatgactcagaaaaaggaaaggcacagctaccaaccattgtttgttttttttctcccatatatgatcacagtgaaataaggaagatatttgtacatgttaagttgtttagtacataatatttggtctattttttcataacaataaaagtagctataggcgcatctcacaataaattgtttcggctacttaatgttttgattttgattttgattatatatattattattatatgtatgtatctatcaaaagaccaaaaatatatgtaagatgtctttgtttgaagtaacttccaacgtacacaatggaatgtagttgaaggacatgatcataattaatatgatgctttaaattaataaatatgacatcaaattaataaaaagggatgtcaaaattcaaaacttatttatgtatgtatgaacagatccaactatgcccaatagaaatagaatgagatgagatcagattgaatttataacgactttctttgatgagctgtggtccatcaaggcttcgcatgtgcttaatttactcttttaatttcctcagtcgtacgacaaaacctagaaagtaataaatttttttttttttttttttggatgaaatatcaagttcattgaaatgaattagcattctgaatacataagattctgaagttcagaggaaataagaaaatcagaaatgctaccaccagcataaaatcgagactgcctagcaacataatgtgcagcacgatttgttgatcgtttaacaaaatataaatg

SEQ ID NO: 44128 - DNA, 2811 bp, Cannabis sativa
ctctagaaaagtgaggagcatctactactcagaatcggaatccgaaaatggcatttggtaagcatttttaggttcttcatcggtgatggaaggagaaggacgttcatttgatgctgttctcactcgttctctccttctagctttccttttctcctggaactaaacagattccaaaaattaatctactagtagtgtcgaccccactgtgcacaaagccccgaatatgtgcagacaagtctgcaactaataagttttaaaataatgcaatgttggtattcctgaaattggtttgttaggtgacagtttaaatatgcaaaatatactagttcattaggtgagtataaatagatgcatcacataccttagcattaggttgacttggttggtttgaatcttgttgattaggctgttgaggtggctgacttctttgcagccaaatggtaccaaaagatattaaggctgccagaagaaggatgggaccaatccttggatcttggataagatcatatattttggttataaagccacgaatatgctgcttgattctggatgttgaaggtaagctttgaacaccttttgaccagataggttgcgcatcgtcgggaaccagttcaggagtctttgttctctgcatttgaagcacacagaaaacttgagtataaatcccagaacacatgaagtaatgaaagttcttatagtcccttaatggtttgaggtgatggaagtagaagagaacatagtttccatctcaaaaatgtgaggttcttttcctttatttacatcaatatatcacaaattggtagcatacttgccctaaatataatcataaatattattccagcaaattaataaaggatattcgtagaaatatggatggatggaccaagaagctttttacacaaattactcgaaggagtgaaaagaaaaatagttaataatttttacataatgaggcagatccctggagtcgccatccttgattatttgtgaaacccatttaatgatctgcatgagaaagaaaagaagcatattaaaaacggaatattaacagaccaaagcctgtgactgggagactataaaccacctgcttagtgatgtacattaatcctcttgatgactacatgtatattaaatggttctcagttttataggtcacacgatctttctagtttcttatcatagaaatttttacgccaattgtatatcatctattgaaacttattattaaacaactttactgctaacatctaaagctgcaattttcatctgtaaactaacaccaacaaaacaattaaagttctctatggaagtggcatatatcatacttcatacaatatgcgatgtctctcataaccaacttcttatacaaagcatttaattgcttttgaatgtcaaaaaccaacttgaggaaaattacaaaattgttatagaaggcatctaatagtgtattgaaacacagtaaaatgcctgaaatttcaaattcaaacctctgaagtttcatctgaaccattgtactttgccacaagttgtgatgcaggatccaattcctgttcttgtaatgagtcccatatgcttcctttctttctcttaggctttgtgtcctcctcgctagcgtttcttttgtagcgcactataaataactggggtacatctgctagatctctccttggtccacaagtatcatagctattttcagaattgaggtaaaagaaacaatatctctggacatagaaataaattatcaccattataaatcccgaatttataaataatgttaaagaactcaaccagaaacctacaatcaaaaagaaaacacactaccaatagtacttggggaaagttggctttttaacaagaacaattagaactgtctctggcattttaccctcttcttctgttactgaaaacagactcaagcataaactaataccaggcctttaccaaaatgggttcctcattggcacgaaaacaaattagggataaagcattaagcaacaaacaatcagaatttagaatttattcaggatactaaacggagcgtctaaaactcaagctaaggagcatacaatctttctccacaggaattctaaatactcaaaagtaaaaggaaaaggaaagttattttaccttttgagtttccccttcaagccaagtgaaggtcaatcgtttgcttctaatcgcacccaatgctggtgccgtggtttgatcctcactagactcaatatcactggatagtaattcttgaaccctgcgtatggtctatcaacttaatgtgaattattcgcatagctcaagatgtaaatgaatggtccaaaacaaactatttgcttaactcgtactatataaatatatagttgaatacaaatgaaaaaaatatctaaaatagtatatttcatgtgaccctttagaaaccttatgataaattttgcgaacatatggttgccaaaattatgtccggcaaataattgcctgaatttataaaaatacaagcataggaaagacacttacttcacgcattttattgagttctgggccatgccttcctgcaagaatggcgcaataccaagtagaggtatcatatccagcacgagaatggtctctggcatcacagcccaattcaattgatgtttcacttctcaactgaggaagctctgaaaacaaaagctagacaaataaatagggtctctacacaaatacttcgtgtaatcacgaaaacatgttcaatcgttattgggtttccttggtcaaataaaagaatgatctgtagaactcactacaagaaaccaaaatggaaagcaaaaaatcatccag

SEQ ID NO: 44129 - DNA, 1884 bp, Cannabis sativa
ttggtgccatttttagcttaggccaaatttagcacacattttaaatcaccattagagttaacttttcgcaaaatgttctaaaaaataataatacaccaaatttatagttcttcattggagatgctctaagatctcaaaacttttcattgcaaagttgcaactacatcctattctacttagagtaaaatcttactcttgagtctcctagacatattttttttcctctcaaaatgattgattgccatctatttaataacagtataagtttacatagcgaaacggcaacctgttccatcgaggaaccgatcggtgtgccaacccttgacctggagttgagacaagaatggaccgaattcatcgttcatcttctggtacgatgcttccaagacactagcacttggttcatggaaggacttctccatttgtgcaacatatgcagcaacgagccaaccccgaagggcatcttcccctgttgcattgtgcatcaataccatgtccacacatttaccaccatgacttaagagaaacttctcctcagggaatatttgtctcagtttgtgaagtttcgaaggcttaacaaccttgtgtacagccctccctactttaacatttccagcatcttcgatgagtctcccaggaaataggagcgattctcgataccttaggtcagctggacttgaaacttttcctgtctggatgataaaccaaataaactcaaaacaaaataataacacacaaacacatacacatacggagaaacataagttctaacagaccttcaaaaaatctgctactatcattgcagtcctctgtggattcaatgtattaacaggtgctgctcgcatttcttcaacgacactgtatacatgtatgatggaaagaagaggccccacaatcaactgcaatgagttactcaggatcagaaaattagattcctactacagtgcaaatgcaaaacaaaagatcggatcagattatttacctttccttgcattgtagaacaaacagtagaggctaagtgtattcctgctcctaacccaactacattaaaaagagttgagatggcttctccttttgcaaaaagatcactgagattaccttcttttgcaaaagaagaatatatcggtaacctggttgctctagctgcaacaactgccataccctgttaagaggagagactaaattaattttttaaggaataaataaatgcagcatgaggtacggctgcaatagctacgatatcctgttaataagagggctcaaactcaatgcttctatagtcaaccggggagaaatattgaatcacatggatgcagaatcgtcacaagaacgagaaaatgatgaatagttaaattaattaaatatgtaataaatttcacaaggagtataaatttttaattcagaaaagtatttatgtataattctaccttggcaaaatttcccaggcctgccatttccagaaaaagatgtggacacaatggagaaagaacttctaagcccgtgcccaagtcatacagcacatcagctgcaatatgaaggcttattaaattaaattttaatatcaacactaactaacagcagatatgtaaaacagtcatggacattctgcattcagaaacatataacaaataaaacaaaatgtgactgaattaaaaaaaaaaaaaggacaaaccaagaactctccatcgtttaggttctgaatccattcttgcacctaaattactacatatgagcttaccgacatgttgcatcccatcttttaagacctacatgtaagcaagatatacattatatatttttgatgggatctttataaaaactacatatttttgatatgatcatgtttgtgcccagcaaaacaaatcagaacttacccaacttact

SEQ ID NO: 44130 - DNA, 2062 bp, Cannabis sativa
  modified_base (2030)..(2035): a, c, t, g, unknown or other
ccaactcagtagcaccagccacaacatcccaagattacttgtggaaaagctgggatattcaagccacgaattctgctgtcaaaagttactgctacaggtgatctttgtgagcctcgcactgttcaagaggtacttagtcacaaggggtggaattcagcaatgagtactgagatggtagccctctagaagaacaaaacctggtacttagtacctccttcaccttactacaatgttgttggaaataagtgggtctataagattaagttgaatgcagatggatcagttcaatgactcaaagctcgccttgttgtcaagggctttcatcagagacctggagcggattttaaaaagacatttagtctagtaatcaaagcttcaacagttagagttatcttgactattgttgtagctaaaaattgagacataagacaacttgacataaacaatgtctttttaaatggcaccttggatgaagatgtctatatggtttaaccttaaggtttcgaagatcccaataagcctcattatgtatgcaagctacaaaagtctatctacgggttgaaataagctcctatggcctggtatgaacaactcaaaacaatgttgctgcagtggaactttctgaattgaagggctaattcgtccttctttttgctgaagtaatatgactatgtgataatggttctaatctacgtcgatgacatcattgtcacagggaataaatcacacgagttagagaattttatatcacggttgaacaacacattctcccttaaagatctaggaggtctgcactacttcctaggaattgaggtttttagagatgacacaggattatacttgtcacaagggaaatacatctctaagttacttcaaagagttaacatgtcaaatttgaaacctagtacaactcctatgacagccaacaaaaccctatcaatcaacgatggtgagcccatgaccgatccatcccagtatagaagcatcataggtgcactctaatatctgagccacacactatccgatatttcttttgctgtgaacaaacttagtttctaaaatgtcctaccaatgtgcattggaatgcaaccaaacatgttctgaggtatcttaagggcacgatgcagcatggtatacacatatcaccaagtggcaggctctctcttataggattcactgatgccgactgggcatgtttcccagatgaccgaagatccatagctagttactgtgttttcttgggagattcactcatttcatggtcctccaagaaataaacagtggtagcacgatccagtaccgaatttgaatacaaggccttggctcacttagctactgaactcacttggattcaagagctactcaaagaaatgaggtttaaactgccagcacctcctgtcatttggtgtgacaacatgagtgcaagtgcacttgctgctaatccaatttatcatgccagaaccaagaatattgaactggatattcattttttaagagataaggttccacaaaaatagctggaagttcgatatatactgtcccatgatcaagttgcagactatctgactaagggtctttcacacactcagtttcagttcttagtcggcaagcttggagtgattgcatcaccctcgtgcttgaggggtggtgttacagaatgaaatactcaggggtagtttagtcatggtctattatgaggtatctccaaagttgttggaatattttattcctgaagtaacaaacccagctggacaaccaataccgttaggcctgattgtgggaagattctttttgctctgtaatgattgtaacacgtgtgaggctaagattgtatcactatattactcattgtatttccctgcttctataaatgaaatgctcactatcagactcaaattgagctgatcaattaaattcattttgccctgaaatttaaactctccttctatagtgattcaaactctccttcattgttcttcatccaattcgagcctgtagtgatagagtgtcatgcccatacatagcaagtnnnnnnctcaatcatagtgagtaagacggtggt

SEQ ID NO: 44131 - DNA, 1591 bp, Cannabis sativa
atcatcgctcatcttggccacttgcatcatcttattatatttggctaggcaagttttgggatctaagcgccgcccatcgtacaacccgatttggggcatattgaagttctctagaagtggggcttcagtgatcctcctaacgtaaggctctgggtcttcatcctctgaatcagtgagagctccgcttttttttcgaaccaactttgttaaggcagatatttggtcttctaatcgttttgtgttgctgtccaagagatcctttccacgaaccttgtcatttaggtgatttttgaggtcattaccacgtggcctcgcattcttactctttgctttttcatactttacgtataaacgccttttgaggtccacggtggaccgactatcatcagagtattgcttcttcaccccaccgtcctggtttatcaaatcactagggtggtcttctcttcccttgggttttggtactttcctaccagtacccttcggcgacatagagactttctaggctgaaggacgtccaagcctagaggcgttggctgtcttctgtgtctgaaaaggcctgttagcttgattcgcattttttgaggaggcttagggacacaagaattgttagggtcacccttttttccttctctttgtcatatacaagaccagaggtcctaccattaactggttttcccttggtatttcttctgacatattccaacgaagggtcatcattagaatctcctttgtctagatctccgaacttgctttgaagacggcctaacatttttttccatttgtggagaaaatctttcctgatgagctagcttttgctgagttttgaataactccttggaaactcttgttacctcaagtttgtgctagtgatggtagtcatctttgtaagacccatttttggcgtaacctttgtcatcttctacttcctcctcattctcaacatccttattgtcgccaacatggtcatgctggctgtctaggtgctcctcttgatcgttcacattggacgtatctccgcctctcgcgtcgctcggctgggcatgctctagcgagaggggatttacctcctccatgatcatctcgatgccacctttaagagtcttcttgagaactgtctttcatgtcaacaccatgatagtaatagtggcttacgtctttcttcggttctcaatgaaagtaccaaaatatttatcgaaattttagaaaactaaaatattcaagagctaaagaaataataagtttcaaaaattaagtgagggagatttttacgtttttcaagtgttaataaaccttagtccacaagtcagtctattagcctctaagggcagtattgatgaatttacagtattttgcaggaaaccctaactctttacccttagtttttaaagaataagaagattaagggtaatttcagcaaagttttatctatgtatttttcgacttgactcctttgaaaatgaaggggtatttataggctaagtggtgggtatggatagatccatgacccgcctaagatttttgcttaaatcccactattggggtaaattgcatgcaatgtagagttgactggttgattccttaggtatca

SEQ ID NO: 44132 - DNA, 3404 bp, Cannabis sativa
gaaccactcatcgtcgagattatccccgtagcggagcttaccgtggaggtgagaatggtggtcggagcagaggcaggtggaactggggtggggggaagcggagagagtaaagggctcgtgctgccatatatagtcggagacgaagggagagatggtttggaggatttggaggtggagggagttgagtgaggaggagagtgaagtggcggcggctgtaggatttagggagaagtcaggaaaaatagcgtagaaaacggtgtcgtctggaagcctggaggttttttgggataatatggaggaggaaggaggaggacttgtcgccattgttgtatctggtgtaggtgttttcctttcctgaatattcttcatgcttttacatcttcaccgccattgttataattagcaccaatatagggattcatgtaatccctcactttgattttgaggtgtgacatcccacacataggacaaagttctttcactatagctctagtggttaactttttggtttttaaggaaaagatttcaaccaccaaacaccaagaccaacaagccttctattaaggtagggacagagaattattcaaaaatagcatatgttattaataagttctgaatacaaataggatttcctagctaccaaactgcactttttctagctgtcaaaacaagtttgaccaaagtatgggcaacgctatcaaaagatctataacaatgcacacaattaacatcttagagcctattaacaagatcaataatatcaactaaaactagactcaaagaagtaataataaaatcattgtttttcagttcaagcacaatattcaaacaatcagactcaacaattatgttttcatacccaaaggagactcattgaatcaacgtcttgcggatagccaaagatttagccacttcaggaacaagcagccatcagaatgtcaacttgctgaagctacaactattcctaattgattacgaagcaccatatctaagccattacaattgcccaaagaattgacaacgacatttgtatttactcggagataaccaatcggaggaggtttctattttgggaccacctgaagaggggctgtccgagataccatcccgccagtagggacgtcagccgccttctgacaggggaagctgccgccgaagcctatttgttataaaacgtccctaggtaatcacgggcccaatgcacagtaagcacaagagtcaactcaacgttgttatggactattttattacgtctgaaacaaatcctccacaaaattaccataaccaattcaatcatctcctttgaaagggtattaataaacctatgaataaagtcaagaaaatccacacaatgaacaaaaggatcccccaacacaaacttatagaatttcctgcactgtaacaacatagtacaccccccgaaaagcatgatgagtagtttcatcttccaacccacacaaaggacataacccatcagataaaaaatcatgacgtgctagattaattttagtaggaatcaaattatgtgacgcttgccaagcaaagagtctaacctttgaatgaagattaagagactaaatctttttccaccaactagatgcgacaccagacggagaagcacgaggaacagccagattgcaaaggtcaagccaataatcactctaaatagaacgccaacctgatttctcaaagttccatatttttttatttggcacatcatgtgaggaccaagggatagaaaggatagactcagcttcatgaggcaagaaaatggattgaaataacacattatcccaaacacctgaatctttccgtaacaccgacaccttgctagatccatcaatttataaaggagcagacaaaacggaagggcaaaactgaaggaatccagttgtcagaataaatagcaatgtccttcccattcctcacacgccaaccagtcccatagtcaaaaagttctatctcccataagatatttttctacacaaaagagccactctttgatttcttgatctcagcaaaggaccgatgtcgaaaatatagaccctttaacacacgaccaaccaaagaatcaagaacattgatacaagaagcttgcttagccaagagagcctgaataaataaacgaaggtccctgaatcccatacctccatcttccttatgtaaataaagtttatcccaggtccaccaatgcatcttttttttctttttcacatcattaccgctccaccaaaagcaagcacacatacgatgcacatgtttgataaaaggtctttggaagcttaaaaagattcatagaataagtaagaatggactggataactgctttgatgagaatctcacaccccgcaatagaaaacaatttagatttctacccacttcttccaaatcctatcccgaatggaatcaaacaaccttgccttgctatgccccacaaaataaggaaggcctaaataagtctcatggcattcaactcccttcacacccaacaaatctaccaaaatgtatttatcataactcataacattagagctaaaaacacactgcagacttgtcaagatttactagctgacccaaggtcgccccataccaactcaaaagctatcaaaatctcacacgacacacatcagaagccttgaaatagaacaagctatcaccaacaaacaacaagtgcaaaataacagggccaccatgaccacaaggaaagccatacaataatttattttcacaatcctttcaaaccaagctcgaaaggccctcaacacaaagtaaaaaaagataagagaacatgggatcacattatctaagcccacgttgaggagtgatagagccattgacctcaccattcaacaaagaagaatactccactaaagagatgcagtcaagaatcttttgaatctaaacaccatgaaactcgagcttctacatcatctgctccaaaaaaataccacttaacatgatcataagctttggacatatcaagtttaagagcacgaaaactatcacctctcttttttttttctttaaagcattgatacattcaaaaccaataagagcattgtcagttataagacaactgaggagaaaggcactttgctcatccaaaatgatgtgacccaacacctcacgcatgcgattatctgtagtcttagtaataatcttgtaaaagatattacaaagactaataggacaaaagtccacaaccctaacggggttgtcaattttaggaatcaaacaaataagggttttgttgataacttttaagctagagaacccattgagaagattaagagctaccgaaataatgtcaggcccaactgtactccaatttttccgataaaaaccagtcgtgaaaccatcctctcccagactagaagggtctatctgaaaaaaaaaaaaaaaaa

SEQ ID NO: 44133 - DNA, 2153 bp, Cannabis sativa
acatgaaatggggtctcataacaaagaaaatggcactgatattattgacttagaaaatggtggtgaggctatgacatccacaagtgaagaacaaaaacacgaccacaactacaaccacgatcgagattcagattcagattgcaaaaatcagaagaaaatgttgagtaagttgcggagtgggaatttgggcaaatttagaacaataggaagaagaggaagtacggatggattgttgctattaggcacaagcaagaacaatgtgtgtttgagctccattggtggtgataatgatgatgatttggatatattggttaatggggttgaaggaaaggtaggaggaggagataattttgttgataagaaaaaagtgaataagaaatatagtagtaaaaaaaagtatccaaaacctcctagacctcctggtggtccttcattagatgaagctgatttgaagttggtcaaggaaatttgggaacattcaagggcgaggcgtaatagtagagaaaaaaccaaggctttgaagaaactaaaagccaataagacaccatcttcaaacgttaatgtccttgcaatgatcatcaccatcacttttttccttgtcataatcttccaaggtaagtgttgttattacataatcttacaagataatgcatttgatttactttattgaattatagtgttggtgttacacaatccacttcatgtcataaaaaaggtatttccctatatgaaaattttgagtggttagtttgtgctcagaattttacagtacaaaattggctcatttcttctaaatttatcacaggtatcttgggttctcgtacatgatgtaaatggtgtttgaggtaagtgatgttgtgtgagttgagtatatgaatatgtaagatggactcatggtttttgtttgaaagcttaattgaattgtcatgtatgtatgtaggagctccacacaaacaaaaaaaagcatacattagagaagaggggtggtgatgtttaaattgaccgagagatgaatctctcatgatttgggatattgattcttgaggtatggtgcattctttacattcaaatctcaaaatggatgactctgctactattagtgtgggcatgcattttgttattcagactcaagaacttgatctctatcttatagttataggtaggttactacaatgatcgagtataggtactgtaaatatatagtaagtagccttggtcctggaagcaatcccatcttactcattaggcttcatcaccatcaccaaaattagtggggcttttggttgttttaaactattctactctaccaaatgtatcaatgacaagacaatataccataatgtttaactatgtatttgatatcatcctaaataataagttactattcacaagtcttagaagcaatttttcagataatgcatgcaaatttctttcctggctttacatattgttttgagttgatctacaagggcgctgttgcttattaaacaaaaagaagcagaaaacaaagaagagacaaagatctatatgatttgattgtaactatgaacctgatatcaaaacatcccaatggaaacaccaccgagcttgactcggcatacttatgcagttaaatacaaaatctgattgatgaaatttgaaatgaagataaagacataaatagtgagaaaccaagactctaaactagaaaaggaaatatgtaaaactgttcaacaattgagactcttgactaacaaagttccgcaagtgaaatgttcagctgtgataccttctacatccagctaccacaaagcaattatgatttaacaggttccgctcgaggcctccacagtcctagtcgatacttgtgggtgtatttcagtatcagcttcctctggaacaatacaatcagacgtgattgtaagtaagaaacgaataatccaaataaagccaatcatgcaatagggcacaacacttcatactcaaacctaagttcttcgttcactccacgcttcaataaaaatttactagtattaacaagcctaaaaaggagaggaaatgtaacgctagctcatacaatttccgattgtaaaaacgaaatcaatcaggcaatgacacatgaactctttgagctactagctctaaactgaagagttactcccattgaaaatgga

SEQ ID NO: 44134 - DNA, 1927 bp, Cannabis sativa
aaaaaatcaaaactaatgagaaatgataaaagtgaaaataattacaaggagataaggcagaatcaatgtagtgtgactgtggaggaggcatcataaaatcattggtgattgttaattgatcatgtgtcttcaactgcattattaatcaaatgaaaataatttgaaattcacttctacatccaaaagggttcatttttctaccaagttacatgagagattattaaaaataacaagaaaaaaaaaatgaaagtagaaattaaacacacaaagcaatattggttgcacctcatttccttcatcaatgatatcgaatggattggttgattttgctgcttgtacaggctgtgaatgaaaacataacggtgaagttatgtacaaaacgtacttaagaaatattattaaaggtatcagtagtgtttaatactatcaaattttgattgctacagttgagtacaatgtcggtttttgggtagggcaactagggcatgggctcaaggccctaaaattttactgaatgattctttgaaaaaaaaaaaaaagagcctaaaatttttaaaaaaatgcctaattttaacattttaacattatgtctatttaaaaaaaaaaaaaaaatgctctttaaaaaggcctcattgtgtaaagagtcccatatattctaccctaaatgattgtgatttctcttttttcaaataattcaataaacaatataataattatattatttttgattattttatatttttaactcatccatttttattattgattattctgatttcagttacaaagtaaacgtgacaatcaaaatatgtaagatttgaaattaagttagtgtctcatccatttaaagaatataagagaaagataagagtaagacaagacataccgttgtgttatggaaataattgaaatccataacatgaggcggacgagtttgccagcccgaaactggtgtaggcattaccgagtagcttgcggtaaaaagatcctgcaaagtattcaaaataaattacaaacaaaattattcaaaagaggaatcataaattaactttagaaatatcccacttttacctctggtaattcctttctaactccacaacttgtttggacaagttggttttcagctacattggtggcatcctcaactgttcttggtaaagcttgggatgattgttcaacactatcagttaaagcttgttgtgcattacatggaaatggtgaaacactagactgaaaatatgcatgaaaataagtattagaaagtcttaattctattctgtaattggaactttttaaaacacccattttagctgacatgcccctgagcttttgctatttagcaattcagtctcttttcttttttgacaatcaagtacttgagttttgcaaagaataacaatcaagtgttctgattttttttttatggataattttaaaattttctaaatattgtgcactcccaaatactttttacaaatcattcaaaaactaaaaaaattgtaaaaaaaattaatctgagagagcctaattaattcacatctcaaaatcctaatattaaaactcaaaaacttgattgccaagataaatttttggggaatggtgtttggttagaggtaataaaattgaatagaatgtaaaggaaataatttttattctattcttttattcggttgcatattaaagtattggaatagcctttccatcattttagtgaaatgactattccattttgaaataaaagaaaagatcattccaatgcataatgagaaaatttttataatttttttatcaattttttatatattttttaaattttattgcatactatttttattcatattcttatattttcattcctctcaacgtcccctaaagtggcatttagttggaggtaatttaatggaatccattcctttgtttggttgca

SEQ ID NO: 44135 - DNA, 1957 bp, Cannabis sativa
gtgataatagtgcccgttttgtaactggaattcaaagactcatcaatttttgttgtttgttcaatcctaaataaaatcaattcagtttaatgacataacaagttggatcatgctacatcatcaagaccttacccaagaataagttaagttagttatgttattagttccttttttatgttattgtaaaggcttaaccagttgtggtttatcttatatatatatatgtatatagatcttagttttcattatattttgtaacaaacagaaacatagatagatagagaagggaattcattgtatggtgaggtgagagcacttgtttgatgaggtgagagcacttgttgagagaaggaaaatctgagagctttgaagaacaaaatcgaaaagccaaggaaagaagtagatctatctcagggtgactccaagggtataatatcaaaattaattcttgctattttcataatgaaagaggaatatttaatggggattaggctcttcactattgtgaaggaagttcgaacctctataattttgtgtgcgttctttcatttctgttaattttggcttcaattcaattctatccattttgatttttggtctgttaattgtattttcatgctagctgagattgtttgttaatcccaatacatttgtttttaaacactggtacagtgaaaaaaactgtgcaaaagtgccttaggtgattgggtattggtactagtcattttgatttaattagttgcaactttgaattggatcaagagaagtaaacattctaaattcaaatgtatacttctgtggtgaatatatataattaatcttgtgatgtatgtttgaacactttttacacctaagactcttcaattgtatatatatattatttataccttataacatgcaccacagccagctccgtccttgtagagtgccctagaaactcctgagacatagccattattgatggcccttccataatcgccaaatccacaagctccacctaattaattttatatacatatatagtaaaaacttattaaataggtatatatgttttatgcaaattatatataggaatattaatgtatattacatacttcgactcccatagccatctggactgctaaaataggtggctcttgaagctgtaaacgtagcattattagaggcactactacaaaacgctggaaaaagcacaagaataatattaattagcatagcacataattgtttctccatttttttgttcacgaattaaagaattaaattaagtagttagttttcaacatatatgatataatataaggaaagacagtataaagaaaaagattattgagctaatatatatatatatatatataaacagaagaatcagaaaaaagaagtttgtttggtagcaatgaaagaaggtatgtcatgtatttatagtgttacaatggtacgtaagggctagtagagatgatggtttggtttaggatgaaatccacgtatgccagatttgcttaggaaattttctagctcaccatctttctaattgaatgagatgtgtcatcttctaaataatgtttttacatcatattaattaattgttcgtagtttttagagaaatgcatgtcaaaaggcacattcaccttgtaattctctaacctttatggatgccacatgtgtgtttttttaaactcactacaagaaatatcacttttaccaccacagttcgctactgcgctgctaaaaataacttttaccagcacatttcgcaaactgcgctggcaaagaggttaaagttttaccagcgtactttgcagtggctaaaatctagctaacttttaccagtgcatttacgttttgggaaaaattatttttgccagcgcttttcattttatgttggcaagagttctaataccagcattgatttgccaacccccttttgccaacacatcacaagtaaattctattttac

SEQ ID NO: 44136 - DNA, 1474 bp, Cannabis sativa
tactctataaaggttaaccatctatcaaacacttacaattggcaaacaataagcattcaaaccaaaaaaagtgaacagcattacagcttaaacaaccatttaaggaccatcaaagaaaaacaacaatcaacaaatgcacatacagtaaagtgtttagttgttcatatcagcgccaactgaatcttcaataagccgaaaaacattacactaaaagctaatgcagttaatgcaatagtcgataaaactggagcagtcaaattaccaaaggaaatttttatgcataacaaacttcagttgacaatttatcacaaatctgaagttcaagaactaattacagtacaatctttgactttacaactacttgaacaagcagatcccaatacaattgtcgaataaattatgtcaatttagaaccaaacaacctttcactaccaaaaacactcaaacaacgtaagctaatcataatttaaccaataaactggaaaagattacagaccagaggcttaacaacgataccctcagcttcatgatcagtgagtcggtgagtctcaggaccgaaccggtgataatcggcgggaactgaaaaaggcggcttcatagacgaaaaaggaagctgatgaggctttaacggttgccggatctgctcagacggctgagccgaggggttcgaagcctgcgcgccggacatgggagtgagccgaaccgaagatcgaatcttggagggaaagaaaagggatcgaaagggtttcggaaaataagaaattgggaaagaaataaaaaaaataaaattggagggaaaattttgattaatgaaaagagaaaaagaaaggtcggttgggaattttggaagagagttttgagatctgattaaagtgattattgagaagttgagtttagaaagagaaaagaaaaaaagcgggagaaagaggagaacagaaaacgagggaaggtttggcaaagcaggaaaggaaggaaaggagggaatttggttcggatatagatgtggagggaaggaaggaaggaagcacttattatatatttttatttttattatttatttttaggcaaaaacagaattggtttggatgtgttgtggtaatataatgtggttggtttgttaagttaagtaagcattaagaagtggtgtagtgtttccaattccactactttagtcaaaatcattcaaatcaattttattgtcgacaagtaagaaaatcattaaaattgtttttttttttaatttgtaataataaaataacaagagtaataacaaaatgtggagttagagtttctaaaagatatttaataatgactttcattttatctctttttgaaatgatttttagattaatttctttaaacaaaattaaaattaaactaatttgtaaagggaaatttatatggtatactaacttttgctaattttttacaaaaatactgccaggcggtacttttttacttttttactgtattt

SEQ ID NO: 44137 - DNA, 3810 bp, Cannabis sativa
  modified_base (3419)..(3423): a, c, t, g, unknown or other
aaaaagtgggggggggggggatatgggctgtaggatatgtggttggcgaaggttgtgatggttttgggtggtgttcattctttgctgcttggtttcgtgaggtagaaaaagatgaagaagatgaagctcttagggttttaatataaccctattttattggttgttaagaaataaccggcggtatagggtacacatgtcagttatttcggcatagggttaataaacaacccttcagcactcccaaactcccaactgagtctaaatggtgtagtctaattctataactgcggtttttataaaataaccgcttttaaatgtcaattttcaataggcgggtatttttacaccctttaacttttcttttaataaaatttgtgcaaaaacaacctctagaatctattggaacatctttaacatgaatgaaaaacttggcaaaagttgaaacaaatgcattgcaatcactgtgtggccaaacaacaaacataacagttaaaacagctataatgcaacacattaacaactaaaatacaaaaaaaaaaaccttacttgttctcctggccgagaaggctatcaatctccactactctaagtggagctttaacatcaaatcccggattcaagaaaatggcccataacagatgaaatttttaaaaattatggaaaaacgaaaaagaaatgaaaaaaataaccttgataatatgatcaagttgattgttcccctttttagcctctgaaaaaggaatcttctcagcctcaacattgtttgatttcttctaaggaggatgacgaacaagtttcttaacaagggaaaacaaaaatcatcaccgtcgtcgataggacgtttacctttagatttgttgacccgatctttaacacccatttttcgagatttcttcaacaatagcgaaagtgaagaagagcaccgagtgactgccattatatatagaagcttataaaagaaaaaaaaaaaaagtaagggaaaattgtgagcagttgcaaaaaagaatgtagagaaggaggaggagatcaaatttttggaagaaaaacaagattttagtttttttaatggtagataaaaactaaaaatcaaaatcgtatatgaaaaattgaaatgaaaactggaaagaaataaaatgaaaagaaaaagagaaggaaaataggtagagtgttaaagtatatgtgtaaaggtaagtagagaaggaaaattaaatgtttattgaaccgtataaaggtatatgtgcaatatttttaattatttgtattttttatgtaaaattttttttttttttattcgtgttatgttgatggggttcagtaaaattgttattaaaaaaaactcataaaattttaaaaagaattgtaaaaatgttaatataaatattaaccgtgtaaatgttaaaattgggtaaataataataatttttgtaaaattcctaaaaaataacaatattattgtggctttcaaaaaaaaaaaaaaaacaagattattgtggcaagttgggcattacctagatgatcaatttaaaatggccagaatagacaccactttataactactttctctttttcatactttgttggcgcatacaatgattcaaattatcagtcattattctagtctagtggctcctcttttactttttctttatctttcagccatatatataaagtaaaagatattattataaacttactactgtatagtttatgatcagtaattatagcagagaatatatatgtttcagttcaaattcttgcaatttactcttctctttcaccagaaatttcgcatttcgattggagaggcttatatgtgttaattgtaaaaactaaacaaattaatatatatataataacaattaagagtatgtatgccataataagcttaatatgttaaccagacacaatcgaaagtattatttatttgtaataatctttcatctttacaaaaacttcgatgaaatttctaatcgacttgtaaaatatattattttcttttttggtacttgcctctattgttgttttgcagtacaagagatattgatctccagaactcccaattaagcggaaaaaaaacaaaggataagaaagaaagatgggtgtaagatctctatatagtgaaaaactagcaactaataatcacaaaaaaacctatatatgtcccctaagcatattaaaatccaccaccccacggtcaacacgagtgaaaggagagagaagtagagagaggatgatgatggtgttggtgttggtgatggcggtggtggtggtggttagtcgacgactccttctcaatccgccaccggaggtgaaggaagtcgtcgatagaacacggcaaccgaagaggaccagtggtatgatagccataaacctcatgagctttctccaatagcctcctcaagagtggatggtaaagataagcaattgggatggtgaagcgctgaaatccaccatcttcttcttctaaccctacttctacggcaagccatcctttctttaccttattcattttcctgtagtcttgcttaatattgatggaatctgaaggagacccctattaagaagagtgatcaaaaagtttgttgtgggattagttgatgatgagaatgagagtaaagaaaaagatcaaatatataggaatggaagaaaccaaaaaaaaaataaataaataaggtggggttatatcactatgtgtttattattattttaatttgtttagtggtttgattgaaaataaattagttagttaaagtgggaagagtacgtgtacagttcgtactaatacggaatcatatcaaaactatgctttttataattttcactaaaataaatgattctgattctatcttattgccgtccactttgttttctagtagactagaattggtgtgagaaagagacttgaaaaacccatactctccacattgagatatgagaggctatgaaaaagtgctgaccaccagaagaaaagactcattctttgccttttaatatttattatctaatatatatagttgtaattatatatttgcagcttaatcaatttggaaatttcgacccttggaatggtttacgggccaaactttttggaagattaatcaaattatatgtttggaattgggagcgtttatattttttaatttatttttataataataaagagtatatatgtttaaaaacaatgagagaagcaagtttttttagtaagtctcattcgctaattacatttaacaaaactaactttgtcttgcccggaaagtattatttaatttttatgtataacagtagaagatgtatctgtttaagaattaagctggtgtttggttgggaaaataaaaatatatggataggaattagattgaaaataagaataaaaatgatatggaatgaaatttaaaatgtataaaaaaattgataannnnnattattaaattttttctcatcatcatgcattagaattgttttttttttccatttcaaaatgaaatagtcattctagcaaaatagtggaaagactgttccattgaaatgacatttcaatactgtaatatgcaaccaaataaaagacactataatacaaaagtcagaattcgtgaccgtcctaaaaatacttttttttaggactgtcgctaaaaaattaagtaactgtttgaaatcgtcgggaaaaattagtattcccgacagtttataacagtaattacaagaatatgcgatgattttaattggaatttgtgaatttattggacccttataaggacccattaaaaaatcgtcacgtacttctcgccacatttctcacgtgcccaccta

SEQ ID NO: 44138 - DNA, 2437 bp, Cannabis sativa
caaaaagatataagtgtatgaataaaggaaccccaaaccgagctgctagctaaaagacaccgcccacttacataaccgaatgatacaaggaagttgcccaacttaataatactaaccaataacaaatctttgctataaaatctatcaacagggaagaatgaacttatatctcctaaattatctaaccacaagaaaaagcatcaaaagctagaagaaacactacaaagtaaattccatgattccatcctattcatctgtagttaagacttcttccaggcataaaagaaaaatcaaacaaatataaaaacccgaatgtgctattataaccagaaaggatagtgaaaatctgttcatgaccccaactattatcggtgtatgtaagtattaaattttgaatttgaaagacagcctgcatcattcatgtaacttttgctagagcaattattattaaaaattatcccattagattagcaaaacaataggggcataatgttaaatctaaatgttctaatttaaaattttcaagtggtaacttactcttttgtaattcttctggtgtcattttctgcaaattacaataaaggcaagcacatgagatgtatcaaaacatagaaaataacaggaagaaaacaaaagataatttgataagaaattaacctgagcctttgggttcgagacaatgcatttcgcaatgaagtttgcaacaccatccaccacgtgctcctcgctaacaattacataactgtcgtcatcgattccactccgttcctcaacattgcttggaaccatgtcctctgtcacccaaacccaccaacttggttctttctggtcaacatttacaagaatttcagctgcctgcaaatcattttctatcgaaaaagaaaacccaacacaacagttactaaatttcatagaataagtaaatggcaccaaaaaaaatagaatcatcagttaaatctaaacaacctgtggcaaccttgaaaggaaattcataaccatctcctttggccgaagcgagctggagggatttgatacgagccaagaacttctcagaatcaacagtagctactaaacgagcatacaactacattgcaaaaacacaatacccccatttagcccaacgggaaattccccaaactaacaacatgaaaatgttaaatcagcaaattaaccacattgaaaatacactgtgccaccattaaacaaccatgatggtctttttatggtagcgtagtgtaatttttgatcgtttgtgaaatcaaacatagttatttctgatagctattatttccaaaccacttacattttttcaagtcacttctactaatttaagattaaaaaaaaaagaacctttgttaaatagtaatatgattctatagaaaagtgtatcatagtaactttcatctgaggcatgggaaatttgccaaactaacaacattaaatttacattgttttatggtcaaatagtataattttataattattttgctaataaaaattttcatatggttatttttacaaaacactgttcaattattggggtttcaaccaaattctcatccacattaaaatagtaatataagctcaattttggagaacttttaaccaaattctcatccataaagtttccaaattaaattcaaaaaactttcaatatagacaaaaagacatacatctggagggcattcgttcaacaaagaaggagaatcagaaagattctgaagaagcttgatattctggtgaagcaagtccctcaatcgatgattctcggatctgagatattccaattcttcctcgggagaagcgtgttgaatgggctcatcggaagagtcgttgtggtggcggtgtttgtggcaggtttccatggcggtccaggcaacgtcggcgacctccatgactgtcttggctacctcaatagctccgtggccacccatggcgatcgttaattcggttatgtaaaagaagaaagagagaatttttgagaagaatgaaaggaatgaatgaatgaatgaccgcttgggcttcggtttgagtttgggttttgtgttattgcgtgtagcaaaaggagatgaagaagacgaagggtaaatttggtattttgctaactatattgacacgtgtaactacaaattgtaaacattttcgatggtagggtgttcataaaatagtcgatccaataatccaatccgattcaaaattttaagattttatagtattggaaaattctataatacactcccttgtatagataactcctatcttttttcggcatcccaaagattttttaatctaatttttttatggtcggttacattttaagacatcttacaaaattttgaaaaattcagaaaaaattaacatgttgaaaacaagattcaaactgtctgctacacacgtgactgttttattataaacgcgtgtaaaaaagactgtttga

SEQ ID NO: 44139 - DNA, 1364 bp, Cannabis sativa
atagttgacggccaaaaaagttcagggacacaatttactacatgtcaaagttgggggaaaaattactaattagtcttaggaatattgtgcgtacctcttgtgtagggactgaagctgttgttttctttcccttatcaggatgcactaaaaccatgagattatactctgacggtacccctgtttgcttgctcattttaacaacctaaaaaatagggaacgaagcaagatacccaaattatgacaatgttgtctcggacagagaacaaaagttgataagaatatacttttaataagtaacaaaccttctcttctatctctttactttgtgttaaccatgcatgggatgtcaacatatcaatttgtctccttgcaagaacctgtgaaataaaggggataagttaagagcttaaaaaattcatttcctaagaaacaaagttcttaatgcagtgttcaattgagtagagaagctgaaacattaccttattaagaggcaaatccttagctttctgaactttcaagttgatggtgaaactgcttgtatcagccaaggtaccactgatttcaatggtgtcaggaaaattcccatcacatctgcctgacacaatcaatggacttccatacgaaaggtctggaatatttgatggatatagctgcaacagggaaggaaaacatgagacctcaatgttctcagtaaaattagcaatttcctccaacattagcagtcacctcaagcgaatcaagatgttccaacgagttcaaagttatgtcggcaagaataactgatgaaacgctagagaatagtctttgcattttagagccaatagaagctggaaataattagatattagaaatttcagatattaacatcaccatttactgataaattttctgaattacatgaaattggttttgccagcactagtgaaagaaatcgaacacagtaaaataagggaggagaaaccaaccagaatcaaacgcagcatcataataccccttcccaatctgtgctagcatttgcaggaagtaatggttacaatataaacctggaatgttgtttcacatataaaattaatgtgcaattataagaaagaataaacaggctgttcattaccaacaaaaatataaaaataagaactaattaaaaaaggaagactttacaaatttggtaatagagatacctatgccaaatgtacatatgcgtggacaaacagaatccccatttgtgacataacctttaacaatgctgcaaatctctctttcattttcaacagacccatcagtaatgaggaaaatgaaaggaattgaattactttttgccaacaacttgattgcctaaagagacaacattgaaatttatacatcaa

SEQ ID NO: 44140 - DNA, 3022 bp, Cannabis sativa
  modified_base (67)..(106): a, c, t, g, unknown or other
gcaatcactgtaagatttctgatactcttatgtgtttaatttcctatcgttttagaagttcatattnnnnnnnnnnnnnnnnnnnnnnnnnnnnnnnnnnnnnnnncctggtaaaataacttccaatagtagaatgaattgtggaaatggtttaagctgctaaactaactcagttgagttgaaattctttatttatatacatggacttgataaggaattttacgactgaaagctaactaaattcataatagaattttgcgcggtaagaaatgtataatagacttaatgtacttatctctagctaaatcattttcctaattttcttacaatacctaaaaattttgttgcgagaatttttttacaagagggaatatgaggattataatcaaatacactaaacgtataacatcatgattacattagtagaagaaaaatagattacaactcattgcaataatacatcacactttatatatgaccacaaagaagagaaaaaaaattctcaaaggcttaaacaaggttaaggacttttgtcctaaaagtcatttcttcctttgtgtggacactttggaaaatttaagaatattttttagaatttatcaagcttcatatgctctgtgtagtttctataaatgagcatatcatcacaaggttctaaccaagcaagtgatttcaacaagtgtctcacaagtgaacaagtggtcactatttatagagaattcactcctatttgaacatgaatgaccatcataaagcccttgactattacgaatcataaactgggcattcatgaaattaattaggtaatttaggggttttttagctgttagaaacatctcaaacattcaaaaaattggttagtatatttttcaacttttgttattttttcttcaaaatattccaaactactctcactagattccggatcaattatacaccttataaataaaaaaatcaagtctacaatagttatatttttaataactatcattcattcacattcaaacaaaattagtaatatcttttactaatttaaaagtgataatggaatgttgagttacacaagtttgcgatgatcatttctcaagaatttacaattcctctatgatgtaacctcttatgtgttactttttgacaaaaatattattttgtgacacttaaatatttagattatataaacactacaaaaatttcactcatttcctctccaaattatagttgtaatccttgaatcaatggatatttatatcggaaaattctgaaataatattatttatacttacaaattattcttctacaaatgaattatttctcagtcattatataaaattaaccatgaatattatagataacatcttaggaaaagacaacacacatataagtaagaaaggtggttgaattaaaccaacaatctatatgttgttccttctattacagaaggctacaaaaagcaatgtcaaagctgcagacttaaaaatggtggagaagggaatgccatactttcctttcccaaataaccctttcaagatattccacaagcacaataccaaccacaaactacaaaagacctccaaagcccctgagccgtgacctgcaccactgcgaactggcggtttcaaccttagaaatgccatagccaacgctatgagttggaccaataataaggttgtgaccggcacaaagactggtgactcgtcaaaggtgaatgtgccaaccccagcatttatatgatcatcatgatcagtaatagtacctgaagttgattggtcttttttggtcacttcaaatactgtctctgaaattcctataagctttagtatcacaccaattactcccaaaatccaagggcccattgagattattcttgtcattttctgattgttccaccacgctttgattgattgtccagtggcaatgtactctgatattgtgtatagattgtacaccacaaatatcgatattggaatgatgaacgttggttcttggctctacatttaatttcacacattcagaactagtaataaatagaacaaatatctataattataacatgtcttaatagatttagcttgttataattataacttgaaatatgaaagagcattgtggtcacctggggatataactgggagttggtaataatagaataggctagtagaagagaatagcaaagctcaggaatggagcagaacccccaaaggagaacccaaagataggccaagcattgtctgaattgaagtttgtcgaatatagtgaagaaaatggggcagtttctccctactagtatttctagaaggcctgtggcccatcttttctgttggatcatagaaccaggcccattagtaggtgtgcatccaagaaaagctggtggatctggtgcacaaaaagcagatctccaacctttcttatggatacaaagcccagtattcatatcttctgtcgttgacccatacatccacccaacctgcaccaaatcataataaacagactacataagataggaaaaacgtcagctgtcgccaatttttttatacaaacctgtccctcaaattaataagagaaatggataaaggcaaaattggtgattaacactctattatgtgtcaatattactattattaattcaattaagtatctggtcccaatttaatataataatttttagagagtatcgttagccaatcgcaactcgacatgtctagaaagtactaagcaccactagtacctaatagcaatactcaattaataattgccacccattttgattttttccacttcatttattaactttttcaaacatatttaaccctttttgtaggttccgtattattccgtttaaatgttaatgtgtatttgtaaattagcaactttgttccctcaattttaaaaattatcaaatcgtaccccctaaaactaaaaatgagaaagattcaatatttttttcaataaatcttcaaaaattaatttagatgttaaaaaaatcatttgaataattaagaaaattaaaaaggaaattaaaatt

SEQ ID NO: 44141 - DNA, 2195 bp, Cannabis sativa
ttgatcggattattagtcattagtctaattaattggattattatcatcaatataaagaatcatgattttttgctttgtgggaatttaattgtaataaaattttgtacctataagtaaaaacatttataatcactccaagaaaaaaaaaaaattataggagcataataattataaaaaaataattatggggtaatttatattatctattttggtgtataattatcgaataattaaaaaaaaaattaattttttaattgtgggcaattctttttttactagggctacaagcccatatcaaatgttggtgccgaaatattgttaaatgaaatgatcagtaataggcaaatatgtatgggcagtggcaacaaaaatttgggttcaatgggttcatcagtctatcttggcacagaattggtgtacatggcatcgagtaccaacaattgggtattggagacatgtatttgtcaaaacgaaagaataatataattaaatttgatgcattcattaattcttgacaaggaagtataaaattaattagtaaggggtatactctcctaagtctccttaatttactcgtctaagcagaaaatcccttagcatagaggtgtgtgtggaatagaatcacaataccgaagcacagatttatcttatggctttcgatacttgacagattatcgccgaagaaaaatgttgtttagatattgaatatatattatctgtataacatagatctttagacgtgtagaaaaatatgtaaagatcgataaaataaaaattaatttataattagtcgtaattgttttacttttaatcacaaattttgttgttactaaaagtaaaatgattttttatagtgtcaaaatatgtgtttatccttaatactaatatagtacgtggttttttgtcatatggtttcttttacatatgatgtactattgtgcatgtgttaactgtatatataggacgtggtttttttcttggtggttgacatgttatatatacatgcatggaatatttgctgtgaaaatatgattttaataataataaaaaaagaatgactactttatttatcttatgattttgttgtaatcgtatttttttaattattaaatgccaattaagttcgttaaatgttagctcaaaaatatgtgatgacatatttttttagtttatttaatatatagtccaataatatgtcgccatctatttttaaattgaacttaatgaccaaaaattataacaaaatcgtaaaataaataacttttatcatcacttttttaattaggatcataaatgtaacaattataaatattaaaagtggtttggctgcaatagtcaaaatttaaattaattatgctttttttaataaaaataattaattatacttaattaagctctagtttatttgtaaagtttttctttacaaggtaataaggataaaaaggattttgttgaggattgaacgtaatcatgtcctttgtttttaattatttttaaggaattatttacgtgaatatggaaagagtattttgcaaatgagtttgtatgaagaaactattaattgagtaattaattaaagaagttgtacaaaaagaaagaaataattacttttgataaatatataatatctctaatttaagtactcatttttgaatgaaaagagttgacaaaaaatgatcatatatatgtcggtcgtcatatataatatcttttctctatccaaaagatatagtactcttccttgtctctcaaatattttttcatttataaatagttacttagatttgtagaacacatccttttctagaatctttctttttcatttttgcatgtagtcttaaaaagatttttctttttaataaaatatatatgaaacaagataggtattttttgtgtgtgtatatatatatatataagcgtttgctcacctaataagtaatctattggcaatttcgaaaatggattacagtaaatgtataaattatgatcatattaatttcttctgtttttcttaaggtgatcatatttcttctaagtgaattataataaaattggtgattaaaaacaaacaaaaaaaaattgtaatatataataaatcaccattcttatattgtgactaaaagatacgtgactaaaggtattagttacaaaaatcataatttgttgtgactaaatgtgtttttattattagtcac

SEQ ID NO: 44142 - DNA, 2919 bp, Cannabis sativa
gctaatgactttaaagtgaattatgcatgaattgacacactttatttacattgaaagcaatttttggtcttataattgtcacctactatggatctgtaaagttgcaatttttggatctgtaattgtcacctactattgatcaattggatcactatcatatgcatagagtctttggacacttgtcattggagtagaattggcttttgcttcttgcatttttgccttgcatagaagatctttgatatattttgtctgagtaacgagcatgccttaatcagtatacaaaacttatatgcctagaaagtagtccaaaacacccaagtctttaagggagaattcttgatgcagcttagatataagagaggtaatgacactttgatcacttccagtgattaaaatgtcatcaacatatacaaaaataatgataatggatggtggtgtatgctgaataaatatggaatggtctgccttagatgagcgaaaaccaaacttagttaaacattgttgtaatctctcaagccatgctcttggtgcttgttttaggccatagagagtcttgtgaagcttgtagactagatgtggggttgtaggatcctcaaagccaaggggctgaagcatgtagacttcctcttgtagaatgccattgaggaagatattattaacatctagttgtctaacataccattcctttgcttaatgcaagagtcaacacaactctttttgtaactagtttaacagactgaatgtctcagtgaagtcaaaactagattcttagttaaagtctttggcaaccaaccaagctttttatttattgactgaaccattattgatattgtgattccttctcaccattattgagtagcattagaacaggacaaagaaagaacaagaaagacagagtaaggtaaagaaagaagagagaaagagaaagaaagatagatcctgaaataatagtcttaaccattagtaaagagcacaattacagtttatatacaagctcaataaagcaaacaaatcttaccaccaatctaactaactcctaactgaatcccagagctcactaactgttatagtagacagttaactaactatcttgacaaccattcacatttttcttaattatatacacccaattgcaccctattgcttgtctccatgtagaaagtctcacaagaattcaagttttatttttcttgagtgcaaacatctcttctaacatggcattgtttcagtgaccatatagtagagcttactaaattgactcaaaaaaatttgagacaatgaatgtcttaggtttatagatacttgacttggacctggtttgcatttggtgtctagattgttgtggaggaacttgggtgttgtttgcaggaagaacattagcaggggtaacacaacttaatgcagtaggggcctgagcttctagttgaccaacattcgatgttgaggtaggagttggcattgtggaagtaggctaagcacctctaagaacttgatctgaagcagtatgctacaaatcaataattttgttagcatgggaagttgagaaaaatggacctttaaagtgacctgagtgaggtgcattctaaacacgtgcagtaggatatattggtagaggttgtgaggaatgtaagggaatatgagcaaaagggagaactttaagtttaggacaacttgtacaattattggtaggagtaggttgacttgaactaggttgagatgacaccacaagtgagttgatatgatattgtgggacactagactaaagcaattgagttggggattgaggagatgagtggagttgcagatcatcaaaatcaaaagaatacatgccactcttgtgtctccccatgagaagaacaaaatgtgtcacctgatctttcacaagacattggttagggtgaaattgaaaatagactccacaatatgtagcaaacttagacacactaactaaatttttagtaatagtaggcacatgtaagatattttaaagaagtaaatagtgagagtgacaagaagtttgtgaaatgaaagtgttgtcaatgtgtttaatgaacagacttgtaccatcactaatatacatacgttcaggttctatgtaatcactgttgttcatgacattttgagcatctggtgtgcaatggttggttgcacctgcgtcagggtaccaattgttatcagaggcttgatttgcagcagtgagattagcttcagctgatgcagattgtgctgatgaagttgagcaagaggcagggaagttggagaagctcttgccaaatctataatagcagtcttaagtagtgtgaccagatttgaagcagatttagcattgaggtctattggtaggtgaactaaaccttgtcctcttgaaaatccaagtccgcctctcaagaaaataccaagagcacgatcattagagtagaaagagctatttgaagaaaagtttgggttgttacctctgttaaagtttttattgaaatttccttttgaagaaggaaattttatttttatttatttatcttattgatttatgttgattattgctatattttagtaaataggttgttagctagccactaaaagtcaatttttatttcacttagtatcataattaaaagactattttggaaagctatctatttaaagatgctctaagtaaaataaggctaaagatagaatagaacaccatataactatctcattattaaatagtactaatgtacaatactaatacaattataggggtcacataataatttatttctatatagcctacttgtgtatgtgtgtgtgtttcactcaagtgtgttccataattatgttttttagatggaaacacttcttaatatttattttcaaaattgaatgagaagtttggataatgatgtaaaagctattgtgccataaatatcattaaat

SEQ ID NO: 44143 - DNA, 1485 bp, Cannabis sativa
ttctacatgctctgttgttctacactcctaactaagacaaacataattactaagagatcagaatcaacaatttcaacaaaatttgaaagaaaaactatccaatgtcactaatatgtcacacgatatacttgtattactgataatcatcatcttctactcctaaattaacagtcgctaattctacttcctccaaaataaaagtattatatggagttcaaaataaaaatattattacaccaaacaatcttattaaatattatgtgatcataaaaatatatgcataaagatctaaaaaaatatttatacgtaaattctaaatagcataggattaattataatattaagtgaagtgattgtcctattttgattttagacataaattctaaataggaattaattataatattaagtgaggcgactgtcttattttggttttaagtagcttcgcccttggttaaactatctaagtcatgtttatttattcttgtgagacttttagttaagtttttattttgaccttaatagtaaagtgtgttaggtgagctttcaaagtaaccgttttgtaacttatttatgttctttgaaatattaaatctgcaaatagaaattaaatttaatttctcctataattgtgaaacttttagctagatttttattttgacgttagtagaaagtctattaggtgagcttatgaacttgtaaaagctttgtaacctattcatcttccctcaaattttaaatatgcatattaatagtggtgtttttaacctcctagttttagtgctattcttttttttttttttgttatgatcactttattgatcaaaaaagaattacatcaacaaaaaaagggtctctttcatctaaaaaagctcatcaatccaacatggtaattttgttaattatattgataaatttatttagggttagggtagctcacacaaattaaatattaagaagttgttctgtcttgtttgtatgtatgtgcagatgaccttattgtaccattgtctatggcctaggaagattttgaattttgggttgtttttccttttctttggataatgcaatcaatccacttacaaacaaatagaaaaagaaaaaagaaaaggatttgccattggacaccttactaaaaaaaattgacaaatataaacacatttcattttacatccttacagatcattttacaaccttttgtgatgatttttttctcaatatttgaaacaatgtactgtggttattgactgttattctgctctttctttccctttacagtttcaacttcgatgttattggtgacactcttcaaaatacctctgaaaattgtccaaaaacaaaatttatatgtgtatccagggagaccataaggcctgctgtttttgttgcttcattcaatttagcaagtccctcctaaattccctgccccgtatagattttgtttatttatatataaaatacataatataaagaagaaaataaaaa

SEQ ID NO: 44144 - DNA, 3501 bp, Cannabis sativa
atacccttcgataccctttctataaggaccgctcaatatgtatgggagtttctgagacaataattaataacgggtgctactgtaatgtagtagtagaacagataaaagagccactcaacacgtgcgtttttcttctttgtattaattacccatgttacaattttcacataataacattgtcttttcttgtaaagaaaaataatctattgtgggggttcgtaatacgttttgattttattttggttaataaaatgcaaattagtattttttactgattcataatatatatatatatatatgtatatattttttttttccgctcaaaaacgaaagttgatttctttcacccattttttatcttacaattcttcattattattaattaaaatactttttattttctatttcaaatcaatcctttctgttatttaaacgaaaagagaaagaaaattatgaaaaagggtggacatattgtaagaacctcagtagaaaatttaataaaagattggaatgggtatagttttgggtaaaggcgtccaccggaaatattgaagaggtttataaaaaatgactgatccctggttttccaccctgcttttgggcagtgtaggaaatctacaactcactcacttcttaattccttcatctcttcaatatttcaaattaattcatactactagttagttggcactggaccactaaaactagactactctattcatttctttcttttatatgattgactactctattcatttacttagccatttttatcttacccacctcacccaaaagtaaaatgcaaataattacaatagctttgattttgtctcattcaccattaaaatttcagttagtagaacagacaggggggaagggaattgctacagctagcttgataatgccaaaccgtgaagtatggaggaagattctcttaattacttcttcatagcatacaaaaaaaaatgaaaattagaatcgaaactccacatcacattttttatgcttctttccattagggattaatattaagttgaaatagttgatgtgtgattaaaaagagaaatgcaaaaaaattaaaaaattaaacattcatatatgaacgtctttttagaaaaattgtaaaacaaagaagcctaaatagtaagtaattaaggcttgaattacatgctttctaattctgtaacatcaacacaaatagatacagacaacaaagaaacaaaaaaatgacataaaataagaagtagctataactagtgagaaaacaaaaaaacagaccattaattaattctactcatttttggttcaaaattgatatgtttaacagaaaaagccaaaattgccatcgtcgaaattgagtgcataacttaaagggtcgtagttgaagctgaaactcttcttatggagctttgagctacggcgactgtagttgacgtgtctcttgatctgggctctcaccctccgaaatagtttcctcaaccttcttttaccgtacaccataaccccattcggatcaaagcacagctccaacataagattcacacccattttattattctaggctagcttgtttcctggaaagtagaaaaagaacagacaaagaaagaaggaaacgaaaaaggaaaggaggggtgggtatatatagagggagagggagagggtgagagagtgagtgaaaagagaagagaagagaatagaaaaggttgggttggagagaaaggctaagaaagattgggtgtggtttttatggggctttgtgaagctgaaaggctgagtatgttgctctgcgaaagtctacgccgcgcagactgggggtctgtgcgtgtcaaagccctgaaaaaggatagctaagccgaggaaagtaagatgggccgggtagttcaaaactcaaaagtacacatatgcaatatgcattacattagtgaaaaatttcatccacctagcaattagtataagactaattaaactagaaaaaaaaaaaaaaaaaaatagtcgtgtcctactctctttgaaatttgtgtaacatccccggaagatattttggtactcatttacttattttagtatttagaaaaaaaattgagttaatatttttttttttttttgcatgatagcatatgctctatttataaatgttctgaaaattttaaataatttatcgtgttaaaattaaggttgaaataattatttaccacgcatataaataaataattgttcgtgcaacaaaatatttaaactttatttttcgataatttaaactactggaatttttttaaaaaattacaactgatcttatataactataacatacaccattacgaaaaaaaaaattgattaaaaattattttagatatcaaaatatatagagcatttaccgaaacaccatttagtgtactgtatacttacccaaagttctattattatgtctcagcaaaaaaaaataaataaataaataaaacattgcaaaatgtgacctttcattttgcatgcaaaactaatgccaagatgatatgagacttataatatgctctaatttgaagtaatattgtatgggaaatttcttgttaaaataatatatatggtgtggtagcaaaatttgattgtgaaagatggaattgatgtaaagtaagacagttttatttatttatttttatataaatttcaatcacatagcatttattaattatcaaaattttatcataaaattctattttaaaacaaggcaaacttggtacagtttcattccacctaaactttattttggatggaatagatgcaaaattaataaatattggtatctagcaccatatgcttgttattttattaataaatccttgtattttaattaataatataagatataagacttgataataaattacatcaactaatgttcgatggcattcgacatcataaatgccttataagttgtaacaatcgaagtcctataatttgtaaagaaaaagactgagtaagttatgtaattttatattacctagagaatgttaagtgtgataattctaagactgtgcatagatgagactacacaaatgaagagagcttaaatgaattgataggtgctacttatgacaacaagatgcatcttctttttggtagcccaccactagcaactccaaaattaagtatgtttaacttggagaaatcttaaggtggctgacctcttgagaagtttttctagaaagcatgcgagtgaggacaaaacacgttgaaaagactcgcgttggtttgtacgaccagttgttattccaagaaacagccaaagtgacatatctatgtatataagagccagcacaagtgtaggtggcacatacactgttattacacaatgataagctcctatcacctcactcagtttatttttagattaattaattaattcaaatgattaatatttatttaaatttgaatttaagatttggttataaatatttattatgattgagatatcccctcaaagtagttgagaaattctctccaagt

SEQ ID NO: 44145 - DNA, 5060 bp, Cannabis sativa
ttattttcatcgttttagaaattcatatttaggatattaaaaacatctttgttagtaaatctagatcctggtaaaataattccaacatcatcgacatacactaggagaattattaggcttgtatcagaaccatagacaaaaagataggtatctgatttggaagcgtagaaatcccattgcaacagtgtgtgcctcagtttttcattccatgctcgtggatccttaaagcctcttggttgcctatatacactgtttcttggaaatcaccatttaaaaaggcattgctaacatccaattgcctaacagaccaagctgaagtgacaactaaagttagaacagttctaacagtaattggtttaaccacaggactaaaagtgtcttcatagtcaataccaggttcttgtaaatatccctttgcacctaacctggatttatatgtgttaagagagccatcgacattaagtttaatctgatacacccacttattgttaatgacatgcatatgaggttgatgtgggacaagtgtccaagtattggatcgaatcaaggtagcactttctttttgcattgattgaaaccacttcaaatctttgagagcctactaaacggaccttagttcagtaggaattagagactcaacaagggaatgtcttgtggataaataggccttaggtttatagattccactttgagaccttgttttcattttgtgaattcttgataaaatgcttgagtcctgtgttgtttgagcaggctgcacacgagagtttaagacatttcgatcaagcaaaccagatggctgatgtagaacaacagactactgatttggtgaattaggttgccggtgtggaacatgagacaactggtttggtaaatcaggttgctggtgtggtaaatttggttgttggtatgaaattgcaggctgctggtgagagatttcaggctgttggtgtgaaattttaggctgctggggtgaaatttcaggctgctggtgagataggattgggaaatttccagaaacaggtggaatatctaggttaggaggttatggttttgggatatttgtgtgaatgggcagggtagtgagagggttgatgggttgtttttctggtatgggggcttgtgtggaaaggttattattagtggtaggcataggaggttgtgattgaaaagcagcacaaccagaatatgtgttagatgtaggaataacagtaggaaaaacatatgtagaagaaggtaatgagcttgaggattgaactgtgaagggcatgaggttgtaaaagcagggaaacaactttcattgaacaccacattccttgcaatataaattctgcctttagaattttcacataagtaacatttgtgatgagatgaataaccaagaaagatgcactgatctaatctgaactcaagtttgtaattattgtaaggtctaaaatgtggaaaacaagcacaaccaaaaggtttgagaatcttgtaatcaggtagacttccaaacaaactttcatagggactcttgaagtcaagaacagctgtaggaagtctattaattgtaaaaaaaacacattgaaaaggataccaccaatatgacaaagaaagaccaaattaagctagtaaaaccaagccagtttcaatgatgtgcctatgttttctttcagctcttccattttattcatgatcatgaggacaaggatgctgaaaatgaattccttggtcatgtaaaaatctagcaaatggtctgtattccccaccccaatcagactggacacttttaataggcaaattgaattgtttttccaccatgcttttaaactttaaaaagatatcaaaggcttgagatttgagtgtcaagggatagatccaagtgtacctagtgtgatcatttataaaatggatgtaatattgataaccttctcgagatgagacatgagaaggaccccataaatcagtgtgaattaactgaaggggctgtgaagcatgactgatggacaatggatagggttgtttgtgactcttgccttttcgacatacaacatagaattgtaaatcttttaaagtacccaaatgttgtatagtttttaaaattctgcttagagtaggaggtgaaggatgccccaatttttgatgcaaagtattaatatcttgattaaaagtagttaatgaaacaaatggagaacaatgttaagaatagatagaagtagtttcttttttgatacggggcacattacaagagtttactgagttaacagtgagattattacaacaacattgtcaattattacaatttgggacagtggtagactgagacaatttggtaagattacattgaagtgtatgagagctttgactagaatcaccaagcacatagaggccatctttaattggtcctttgagaagaacaactccactgagtttgtgcttgaaaaaacaacaattcttgtgaaattcaaggtacacattattgtcatgaattatcttagacacactaattaaattctttttaatggcaggcacatttaaaacagagtttaagtgtaaagcatgagaattgggggaggacaaagaagtggatcctatgtgagttattagaagagtcttaccatcacatacatacagtgtctcagtgccaacatagggagtggggcatcaagagactcagaaccatttctgacatgaacatttgcccctgtatcaacaaactggagattttcatctccaaaatcaggtaagacagtagtattaggtacctgatggtcattatccatttcaagctcaatgagataggctcgaggaggggcaaattttggaggcacaaagtttttgtcaaagtgatagtgacacacaacagcagtgtgtctacttttgagacataattgacaaatgagcctagtctaaaagacaaaagaaccacgagtagaaccccttccaacattacttgaagaagattcagtgttatttcctcgagcaggtggtggaatgtatctccttgagttagatttattgttgccaactgtaagattggcctgaagtttcattgaaagatatatcatagagttgtgatgctctaaccgactttcatgagacatgagtaaggcttgaacctcatcaagtgtcaaagaatcacttcttgaagtaattctagagacaagaggatcaaattcagcaccttatccattcaagatctgaagaataatatcttgctcacttatgttcgatccagcaatgatcaaagaatcagcaagagactgaaatttatcaacataataagatatagacaaatttcctttgttgacattggaaaactgaccttgcaattggagtaatcttgcacgagattggctagaaaatctcccttgaagggcacgccatactacagacgaggtgtggtgatttgcaactgaagtaagaactccttcagtcatggatgaacgaatccatgacaaaagcaactgatcatgtttcttccattggtgataagcaggattgattccaccattgatcaagaaatgaggaggcttccatgaaaggaagttggcacgatcaagcttgatcgtgagagaagtagagagagaactagggagcggattctaggcagaggaagtagaatagaaagattgagcagaccgatctagtgtaggtgctgtgaccgtctgtggagcaggatcagagattggaatcgacgattccattgaaggcaactgataccatgtagaagctaaacaagctgaaccaaaaatggtagaaaccaaaaagaaagaaaactaactcagagagaataggaaagaaagaaatagagagaatttagctgaaaagcttagctcaaaatatgagcacaatccctttatttttatcacagtattacaaggcaaaagagagttagttgagaaaactaactaaaatagtaaaaacaaacactagtaagttaatagtactcattcttcttcttcttctcttttcaatttcatgtctaggttttatctgattttagcttgatactcatccttttgtatgaacgaacaaaaacaccgatagagctctttaacaactggataatggatttgtttgtacatttttttaccaatcgttgttgttgttgagatcttcatattagccattgttgactgcttcgattatcaccgatccagtcccaaaaagaaatttcttaaccattgaagattgcgctcgactcgctgatgagacccgatatatgtgtttgattttgcattttagagtctgtgagttccctaattttggttgtgtattaattgatttaaggctaattttacagttttagggcacgtttggtaggtcgtataagggtctaattgtattaaagaatataataatactatatttagataaagcaatgtattgtattaattattatgataattttttttaatacaatgtaagttgtaatatttagtacataaccaatggtctgtattaacttgtattataatttttacaaagaatctaggttcaactctaatcttcgacctggatccagggacccgtacccagattggacacgaacttggactggacgttgacttgagacccaagacccaagatccagacccacacctgggacctgagacctgagacccagacttgggacctagacctagacctagacccagaccgggaacagggctcgggactcgggaacctagacacagaaccgaacccgggacctggaccatggacctcaacccaaacccgagacccaagacctagatctggaccgggacccaaactcgagactcaaacctggatcggatacgggacctcggaccggacgtgggactcagacctagacctgggacccgagcccaggaccgaacacgagactcgaacgtgaacttgggaccgaacacgtgacccgaactcgggatcggacatgagacccaaacttaggacccaagacgcaagacccagacccagattaaactggagatagatctgagaccctaacccaaactcgatatccaaactcgggaccagactagactcgggacacgagactcgaaccggactcgagagacaagacccagacc

SEQ ID NO: 44146 - DNA, 1302 bp, Cannabis sativa
gtgactcttttgggaataggaacaatgatggtattattgataggcgataaataaacattgttgttcaagaagctaagagtagcttgaacaatgtcagttccgagcaaatgcctatttttttggaaaaaagttccgttgaagccatctgggctaggtgatttatcaccagctagttggaagactgcttgctggacctcatcaaccgtgaaaggtgcttctatgcataagcactccgtattggtaagtttatcagagattctagaaagaacataatccatttgctcaatagtaggttgttggctaataaagagttgagtaaagtattgttcaattgttgtcaaaatgctctgagtatcggtgacaattgagccatcaatgcatgtgagtgagcggattgtttttttggctcgacgagaggaagcaaactgatgaaagtagtgagtatttttgtcaccgagtttcagccaagtgatgcgagagcactgctgccagtattcttcttctttattgaaaagcctatcaaggtccccttggagttggcgatagtgaagaatctaggaattggaagattagggatggctttgagaagcctgaagttgagattgaactttgctgattagtcgaggaaggggaggcccaagcattttttgccattgtgagagagtgagagcacaatgctaaagcttgttagcaaggttggatatatgatcttggctacaagagtcatgagtaggattccacgcctgacttatgcaatcctcaaagctgttctcagcaagccatctgtaatcgaaatggaatcgttgttttggagcacgaaagcgatcgtcatccttgtgaagggcaaggattaaagttcggtgatcagaaccaaagaagttgccatggaggaggttggcgttgggaaaggaggagatccatatgaggttggagatgccctagtctaattgttcttggatgtgggtgagatgtgagtgtttattagtccatgtataaaggctgatgtgaccatgtatggggtgaagtgtgtatgtatttaagaaattcctaaaaaaagcaaaggttgtttgttaactgtgtccccaattttgtccgcaagggagagaaaatcgttaaaatcacccattaaaagccaagttgttataaacaatattactaagatgatggagaagttgccacgtgttatagcggtttttgtggtactgggcctcatagaagccagtgaaagtgaatggacaatgatgaggaaattgcatgtaacagtgaaagtgacttatattataggaaagtagagttacatca

SEQ ID NO: 44147 - DNA, 4147 bp, Cannabis sativa
  modified_base (4119)..(4121): a, c, t, g, unknown or other
gctagaagatgatgttgaccatgaacatgtagtaccagtaattgctctggtggtcggcttagtgacttattagatacaatttttttaattattgcaaaacctcactgcaattggagtaaataaagctacggtgatcttcaaattcatgcgactcctacagaaaagaacaaaaaagaagaactctgttatatagtaccgatgatggttgtgaagtgagaaccactaaatcaagtctctcttccaataaaatcaacaattcaaacaaaaattagagagagagagagagatttcgcacaagcattaccatttggaagactggtggattatttgagaaagcttcaacatattcctctccgtaaaactgccaattgtatagttaagcacgaactcaaccaaaactatttcatcaatcgattcggagtgcaatagagatgatgacaatgagagatatccctatgagagcttgagattgagatcagaatggtgagaaatcgaggagagcaacatgaaaaataaaggaaagcgacctgtccatgaaaacatcagagagcatggtctgcaacaaacggctagtatcaaaccaacaaggaaagtaatcagagtcaacaacaatggtccagggtctattttggggaagaatttaaaagtggtgaataatacctgctcccaaccgaagggtattacccttacatctcaagcctctggttccttgggagcgtgccatcctggaaagggaagaagagccagattcgtatcccctattgtgtcaagaagacctattcaaggtaacaatagtacactctctgatatagatatattaaataaattttcatcaagaccccccctaacccagcagacaatggaattcttaccaccattatggctaatattgggcccacttatgatcaaatggtggataaggccccatgttaaacttatgcccaatcaaagacaaccccataaacaccctgagcccacccatttcccttggcccatctatgctgaagaaattggtttagctgaggagttaatgggccctgcccaagttgataagtttgaaccaattcccaccttgtttaatgacccagaagatgtctcaaacttagtccatcattgtccacaaccaaggaaaagaaaagctagccttactttaatcccttatgtccaacacacggatgaaaacaccatggaattttcccaagaaatccctcccctgcctgaattttctccagccccgaattcatctttcaagatgggttctggcccttcttcttcatcaacgaagaatgacaaaaggaggcgcaagggatcacggtccaaaataacagcagacaagaagaatcaaaatgaggctgtgaacaatgatgccgagaccaatacgcagagaaacctcatcgacactctcaatttaattgaagtaccaatcgaaagctctcaaaaattttctatgggcgaggaggcggcccttatcaagcccccaccagccccatgaaatgcctatcgtggaattgtcggggcctcgcacgagacccgacaccccaagctattgtggcttgggtgaataagtttaaggtggatgttgtttttttaatggaaacgaaggttactaaaaactttatggaagatttggctcgaaagttgggttttaacaggattaattgtgttggtgaaagaggtctagcgggtggttcttgtttgatgtggaacaacaacattaatattgttgtcaattactttgctgaaggattttttgaagcaactgtgtgggacattcatacgcaactcaattggaaactttatgcagtatatggtactccgtatatcggtgccaaggaagctttttggaagagtatggaaacataattttctttctgtcaattgccatgggtgttgataggagacttgaactgcatcagtaaccaagaggagaagagtgggggtcggagagtaactgcaaatgacacaaaatggctaagtaatttcatggaagctacaggtggtgtggacttgcaattcattggcaataaatatacttggcaaaacaataggttctcaggaggcctaattcgtgaaagacttgatagagccatttgttctccggattggttgatggagtatgcctctaatgggattcgaaatatgcctatttcaatctcagatcatgccccaatcatccttgacacacacttatttgcctctagaggatttattccattccgctttttcgaggcttggtcctgggaggattcatgcaagaaggaagttgccatggcttggtcctcaaatggtaatgatactgtgtcctttatcagaaatattgataagtcaaaaatggcgatccaggcttggaagaagaaacacaagagtttgaatgaaggagaaataaaagaaatggagttcagattacaatggatccagaatcaacctatttccgatttgctcaaagaagaggaagcccgaattcaaactctgatttcagattcttggtcaaaactagagagcatgtggagacaaaaatcaagggagacttggctttccttgggagacaaaaacacaagattttttcacgctgcaacaatcataaggaaaagaagaaatagtatttggtcaatcaaggataaagacgggagagtgtggaaggacagagaacacattgcggaggtcatcaatatgcacttccatgagcttttcacttcctctaatcctatgatcaatggggaatttgacgacttgtttactactcggctcgattcactttcgaatgaatgctttgctgcttcaccctcagaggcagaaattagagaagctgtatttagtttacaccctctaaaagccccggggccggatgggttctcgggagtttttatcgcagatattgggagttagtgggaccaaatctttgtgcaacagtaaaagaattcttttccactggctatatgcacccaaaactgaatactactttcatttgcctaattcctaaagtagagtttcctatgagagtggatcaatttagaccgataagcctttgcaatttctcatacaaagtaattgcaaagattttatccaatagattgagacctcttatgaatagtatggtatccccttttcaatctgcttttattcctggaaggtggattgcagaatcttcgatccttacacaagaaatagttcacaagattcgacaaaaaaggggtttgggaggtcttatggctttgaagctagatatgcataaggcttacgataaaatggaatggagctttcttgaaaaagttctatgtgcgaatggcttcaatgaacggtgtaggaagcttttgatggcgtgtgttacaagtgtctcatattcggttcttttaaatggcagccctcttaaaaagatctctcctcaaagaggacttcgccaaggagacccgatctctccattcatgtttctcctctgttaggaggtcctttccaaacttatttgtaaggcggaagagaggggatctatccatggtattaaaatagctcattcagcccctccggtgtctcatctcatgtttgccgacgacacaatactctttgcccgagccaataaaaaggaagcaaaaaagctgatggagtgtatttccgtgtatgaaaaatggtcgggtcaatcttgtagcaagccaaagtcaagtgttctattctcaagaaacttgtcgtctcaaataaaggagcagattttcggtaatttgaatattgatcaagtgcgtggcgacgagcgacatctaggcaacccgtttgtttttaaaagaagaaagaaggaggattacttgcgtctaaaagaaagcttgatgaagaaattggaaggatggaagatgaaacttctctcttatgcagggcgtctattaatcaagagtgtgacttcagccatacctatctatgctatgtctacttcaaggatccctctttctagttgccgtgaattagacgctttgatgcgaaaatattggtggttaggaaaggtagacaagaagagataccttgctctcaaggcatgggaccaaatttgccaacctaagatctcgggaggtttgggggtgagaagatgtgaggacatgaatagggctctggtggctaaactgttaggttttatgcccnnnataaaactctttacaatctgattagt

SEQ ID NO: 44148 - DNA, 3476 bp, Cannabis sativa
cattaagatagaaaagtcaaattggcaattacaacagtgttaatatcattaggaacattgctacaaacaaaagtacaatctgaccaataacaagcaccacgagccaaacaatagacggtattattaatatatcgcttaacaaaacggacgtaaacattgaccaaagaattaagcaaattatataagagtattattaaaaccataggattctaaatttttattttgattaaatacagtacccttgctattaaaatatatatatatatatacatataataaaattaatatatataatgtatgggatatttgcatgtaaattagtgtaatattgagtagtagtagagagagacaagggttaaacaagagtaattaatgagcggagcggcgtaaggggtggtgtgggggcaaaatataaggtgtgggccttacacttgttagatattgctttattaattatatatatttttggtttgaatttgagtttggggccaagagaattcaatgttgttatgtgtcttgtaattttggaaatgatagtatgagttggtaatgtcgggaactatatgtatacttccactcatctcactttcacactctcttcatcatcacataattcacaaattaataatgtagttctacctatatatataataattatatccacaaaaaatatatacatacatatatatagtactagtagtacacatactacatactactattggttttccatctcatattgatcgacataaaaaataaatatttgagaatatacattcaactatttataaaaatatataactcactaattctactaattaccaattgatttttaaataaaatcttataattgttaacatgagcataactttagtgaacatcaagaaatattatatattgataattttattttttatttagttaattgaggtgagatttggaagattttttttttctaaaatttgtagagttaaaaagtattattggtgcttagcatctttctaggtgtcgtatcacatggtgcaattacgtataataatataaaagtgttgaacatcactgatactcaataataatattttacaattaatatgttattagaatgagtcacatacttcttgattattaatttttttttataatagttattaaattaaaatacttaaaaatattaaatatttagttacaataataacattatcacatgttggagagacggctaactatacaattaatatgatttcaatttctatttgactagggttgtgtgtttttatcttttacatataatagagtcacaatcaattgaatggtgtgcagaaaattatttagttattatgatttctcttcactttcacaataactataatataaagtcacatcattcaaattgcattttaagacaaaattattgttaagatgcatgtttaaagaattttccttaattgatgactaaaatcaaataattaaattctaactttataatgtcacggacgagtaaagctctcaagcttaaagagactcacaataagaaaaataaaaaataattgtatttatataatataaaaatattttcaaaaagtaaagcctaaaagagaatctagccaaagacatggctactcaataaatacaactttttcatgtaatatttgttgaggcaaagtttaaatttacttactagtctcattattagagctacaaataagacaataatatattaattaaataaaaaattagttgaaatagaaagagaaaggtaaggaagtctagttgaaaatctttcttcacattcttattttctattttaaaaaacgacaccaaaaatggagttattctagccaagccaagtagtgaaaaagggcagtgatgatacatattaatacatacatggtcccgtttccaagttgagtttttcttcttttttattttatttgaaaaaaaaaaaaaaaaagaagcaatgtcgttttcagcagtaagaatattctttggcagttatttccgaaaatgcccctagaccatgtgatgaagggaaggggtataactgacaatggagtaatattagaagtacgaatgtgtacccgaggagtgtcagaagggaaatgataaagtgaccgacgtgtagtgtgggaaagtgacgggcaagaatgttgtcgtttttgtgaattcagtgggcgattccaattgggatttgggtgatcttttggagtggtccccactatatagggtctaggggtgagaggcacgtgaccattgtcccaccacgtggccccactttattggatttcgtggatgtgttgtctgtatccacgtagttgtagttgtagacttactaagcaatataccatacatccatgtgtggacgtatgtatatacataatacatggcctctatatatgcataatgtaggtgtatattatattctctatattgattgcataattaattaagaaagtttttgttaatttgggaatttgttggaaaatttgaataaatgttgtgttaaaaataaactaaattaaatttttcatcaatttggctaaatatatactaataagatatacatataaaaacaatgtttatcaaataccatattattataattattattattattataaaaaatatcaaagaccatccatatatatcatattactaagtgatataataattaatatcggtcttatttattttatttaaataaagattataaatatattttgtatccgcataaataagttaagtctgcgcttaaagcccatttattttagggacctaaataaaaaaaaaaatatcttttaaaaaatatacatatttttttaataattttaaaaaatatcatctatctttatagtaagagtctaacaaaaactttttaactaagacctatttcaactcagagccggctataaatataccaataattatttagaaagttctacctcaaaataatgctatgcacgaaggttttaattcgtgaaaaactttaagtttaatgaatttagttgattgttgttttattttctatcaatttggtttaaataataaattttattattatttttaaaaattattggcttgttatcaagctggtcttttatttacccatttaatcaaaaagcatgcatgcctagtttacttttttgtatgttttgaagctgatttgtttgtgcattatttaagacctttcttaaaaattctctaaggttttcgtattacatcatttacatgtaatgataatgttgtaaatgacttggaatacttatattattagttgattttgttctaactttctcttaccaattacatcaatttaaatatatatacaaacaaaaaatacacacacaaaataatgaagaaatgagaatataaataatgacatttaataaataaaaaagcttaattaagcataaacccatatatattaagatgaacaaacttaacataaactatatacaaatattataaattaatctttt

SEQ ID NO: 44149 - DNA, 5407 bp, Cannabis sativa
tccttggtagattgaggtttctagagtaaaaacgctcgcacgggcccatgaaacctagtttgggcacacttgggtgtgtgagtcccatcaccaaatggttggttaatatctttgagtcttctaaaagttctatggggccctcaagaaggatatcttaactcatttgacacatttataaatcttggtcaaagtcccaaggttgaatttagtgtcttcaaggcactcttggcatgtgggttgtaacgccctgtctcacaagaacgccacgtgtgtgcttttacaaattgatttataattaatctatcaggttaagaaaagtgtggtttaattaaaacttttggattaaactaaaacataactattaaatcaaagcattgttggatttggggatcccctgtttgcaaacccttgcattttgtctcaaaaccgatattacaaaatagagctacaatataatacataattaacaggtagatcctatccactggaagccaaaacaccaaggttgatatgtacatcgctgggagacctctgactcatggtcgaccacagcttcttcctccttacctgcaccacgaagcacccgtgagtcacattgactcagcaagaaaagctattaaatcaagataatgacaaacacaagtaatcacaacacgacataatatgtttactcataattcattacttattcagcatgcatacataatttaacatctgtaccaacacgcatattacgcattataagaaagtcatagcaactcataatcaacaacttcattatcataatagacaggtcttcgctcaatacgtaatcacataactaattaaactaattaattgatttataagacaatcatattgtaatgcttcataaagcatccttaccactcgttatccacaagctgcgtatgtcactactactgcctaataaagcaactgataaataagaaatctatttgcgatttcaaggagtaattactcatttcattaacggtaatgacagtatctttattcattcattaacggtaatggatgtgtcttttcctcgatcataatcgagtcataaatgataataatcattacctcgatcataatcgagtcataaataataataatttttccatatcactacctcgatcatcactaaaatatcctagtctaggctctggaaaacaccccgaacaaaaccaattttgaggctaaaaaccagagtttttccctgttggcaaaaccggttaaccggtttcacatcacctgaaaaactagttaaccggtttctcaactgacagaattgggaactctggtttttcacaccaaaaaccaaccaactctcctccaaatctgctcaaacttttcagaacagttatataccacaaaaatagtatatccaaacatccaaaacttagaaatgcactaaaattacaatttaaatcaatccaaaagccattaaaatctctcaactcaaactcaaacaaactttaaatcaaacccaaaaatatattttacaatatattcataccccagccccgaaatcaagcataaccttaatcaaaacctagctcaaaatcatgaaattgaagagaagaaaagaaaggattacctcaagacttgagcagcacctagggctagctaaaactataagaagaggttgaattggtgaagaattgagttggttctcagctggattctagggctgtcgaacatgagaagagaaagagagtgaaggttatccaatttttttttattatttctcttagttttgtttttttattcttaaataagtaaataagtattaaactaatattaaatcccaaatttctgcctagaaaaaccaattaggacaaaacctaacattccatcaaaatgactattttgcccctctttaatcatgtaagtctaaaataaagcctaagggtaatttggtcttttctacttaatcccgccaaaccgattatttagaattctaaaccagtccaatatagtactaacataacacaacttaatttctgtgacaattctgaccacctcgtccagttctcaatgccgccaaactcgaaaacattttattctaaaaatggtatctacgatattcccataagcttataaaatttccgtaattaataaattacgctttatttattcattaactcatattttcctaattaattcgtaattaatttaagtaaaattataatcctacactaatgcccatttaatcacatatttaataaaatatgtccaattaaaatatcattatatttttcaggatattacatgggtccttgtgcaagagtattcattttattttatttttttgcaaaaactgggtataacatatagcatctccaatagaatgatataaatatgacgtacatgtattttttttagatcatgtttatataattgaccttaagactatcttcaatgcaatatttaaaatttgtgctaaacttaacacaaaaaatgaatttgtgttatatttggcccattatttataattgtgatccaatacataaaatgtaaaataagtaagaaaaaaaaattaattgttaatatttaccaaaatttttgaaaacctaatataacaaaataagaactaagaaaataaattcaaaagaagaaatagagatagagatttttacgtggttcgattattgatgaaccttagcccatgagttagttgtattgggctaagtagccatgaagtattacacaaatattcttgacaagcttaaaaatcctagttttttgctatagtattcgagtaatgaatttctcacactttgcatgagggtatgatgtagcatttataggctaggatttgggtatggacatacctgtgacccactagggtttgcatgtaaacctggcccactaattgggtaaatacataaaatacagtaacgttgggcccacggactgagacccattccatggggctattactttccgtacagcaggggaccacttaaggtcgataggtgtcatatgtgcactgcctttacgtactgtagtgtcagagtagtggccgtaggacaaaaaagatgttccatttggtggtacgcgtactctcagggtctaacataggggaaagccccttggtacagtgagatttagtgttagaggattgccctgtcaacttcagccaagcttccagggcgtctcttggaatgtccttcctggagcatccaaatggctcatttggaggatcttcatcattccttcctgtctgatctatgacgtcttcttgatctggagcagtccaaataagaatgttaatggcccatagtctaaatggactctcgaccatatctccatgtggattcaacctattaccttagttgggcccatatttaggcttcaattgtttgtatctgatctgaatatgctaggtgtcctccttctgaaaaacacgaataacagttaatgatagttatttattattttagtaagaatatacaataattattatttttatttttaaataatatatagtaaataaaaaatgcaaatttttataaaagtcaatgtattattatacattttttgtggcaataaattataataactagtggcactataataaataataaaagttatttttattatggaccaaatttgacacaataatataccatgtgttaaattgtgtacaaatttttagcatgtactaaatttggcaaactttttagaatactattgcagtggtattttttcttacgtgtgcaaaatatagcaatacattatattttttaacactctaatcaagatgctccaatggtgatgtataatggtttacatttggtatatgttaaaaattgtgtcaaattttatacaaaatataacataagtaaaattttatagcacaataaatatttttttttatttactcttttaccacttattaatgtaattaactactttttgtaatttatttatatatttaatataatttttttatgtattttcaataaaaatttaatgcttttgttggttttttttatactttcttattaacaaaaaaacttaatttaacctactgcatttgagtgctactttaaaatttatgctaaatataatattaattttttttttttaactaattttagcataaattttaaaacttaattttaccttaatgtgttggagcattattttaaaatttaagccaaatataatattgtcttattttttagttaattttagtacaaattttaaaacttaattcaaccttaatctgttggagtattattttaaaatttacgctaaatataatattatttattttttagctaattttagcattaaatttacattatcaatctattgaagatgatgttattaattgagaggatcatagctatagcagccctcgatggttaattaataagtatattaaatagttgtcttaaaaaacaaataaacatcatgagcaacttgtttagttttgatatataacacatgagtattaattgctcgaatttataattttcacaaaacgtagaatgtatttataaatgattataatactcaattgacttggagtaataaaatgaagattatagtactcaattgacttggatttatcaaccatatgatatagtatatataggtgtatatatattctatatatatacgcaactcttctcagcacaattaacatgaatattttttttaacgcaaagtgccattaacattaatatgatttcctctaatgaactcttgacctccaaactgccattaggaatgtcaatcggggtggtccgggctgacccgacccgccacaaacccggtccgactcaatatcactttgacccggtccgattcagcccgcaaaaataactcaaattgctatttctagctgccatctctctccaataaaaatcttgtctccaaaattctatctccaccgtgcttgagtaatgagcaaatgacacctatttaaattttttaaaactcacgtgatactttcaaacttattctaacagttccgtttctattcttccgttccgtttccatggctataaaataatttatttattttttttatttttttttactttttgttctttttcttttttcttttaaggctatagaatatcattcaaaaagaagaaaataaaaactgagatggtacgagtaaatggtgactgtatttaggagtgtgtataaatcaatctaatccaacaaaaactaatgactgtcatatattagatatttaattgtgatcggatcagattggatgttatttttaaatatccaattagatcggattgaatggtggatggagtgtccaaaaatcgagtacttccaacatccaatcgaactaattagtattttcatttattttggatgagtaattagattttatattgttatatggaaaatctttatatatatataaaaa

SEQ ID NO: 44150 - DNA, 2652 bp, Cannabis sativa
  modified_base (27)..(30): a, c, t, g, unknown or other
actaatcagattgtaaagagttttatnnnnggcataaaacccaacactattgtgagtccaaattgctaattcctcatcagctggattaagagatagaacatacgagaagtttcgagaataccctaataggtttctagagatatactctacacttattctttttattgttttgatttaatgtacacacatatggaggtcctaggggctatggtacgatgataatcaaataatacgaaattcttctgctgcgtacctaatttagtaccataaaaccaacaaaagaccttttactgcgaaagacaacatagcccaagaacaacttgagctagtaaccaatcaatatacaagctcaaggtggttacgaatgatttgttacttttattgatgattaatcaaaatatgctcatacttacctaatggccaagaaatttaaaatttttacaaagtttaaagactttatgtgctagatgaaaaacaattaggtaaatctttaaaaatactttgattagatcgaggtggagactatttggattgtgaattcgaagactacctgttggagcatgcgaccctatccctattcacatcactaaaaatgcctcaacagaacaatgtttcaaaaagaagaaacttgaccttgttagacatggtcaggtctatgttaatttacttatcactaccgctcaacttcaagggatacacacttcaagcagctacttacattcttaatgtaatacccgcaaagagtagaagcaagactccaagagaattatatggaataggacaaaatcgaatttgaattatttttatattttgggttgtcctactcatgtttaaagacctaaagagagaaaaacttgctccttggtcataagtgtgtatatttgtggactatatttagaagaaactcgaagtagtcttcctgaaagatgattatatgagaaatcacatcatcccaaaaaattaccccttttgagatgaacccaaatttttaaaggccttcaatcaatttgatgttatagaaatgatgaaaaaaaaagtggtgaatatttggtactacaaaccctcatacagacattttattagacaagagaaagagtagctgtacaatggtactaaaaaaccaaaaaagtcatgaagattaaaagcccaatttatgaagcaaactaatgaagaaaacaaagcaaagttaattttcagccacacaataactcaccctactaacagctaaagcttcagttatttacatcactgcctttcaaatctcaaccatacatatataagaagaaaagggcacatgtctcatacggtatcccatttcaaggaatgacctttcctactctgtggctgcaagaactgctggcccttccacctgtgtgatttcaaccccaccaaatagactaattagtgaaatgtgtggatgcaattaatttaatggtcccctttatcacactattaaaaacaaagttcattcagggtaacaagtcactgttccattttctattgttgacaagtcacctgtcaagaattaagaatgtatacgaaatttccagttcttctcttatcgtttgaatactttggttatttttcatattagtttgtgtacaaagttttagtttgaaacccagattgctattatgtataaaatttgtatcttcaaatttgtaacacactaatcaatttaccttatatttggcaccccagatctcttcatcattagcaggcacagcagtgatcttgttcttaggattctcaaaacttctaagtcctcccaatgttgtagagaaaaaacatcctaacaagtgacaatcaaatgaaaccacatcaacaaaagtgtaatcaaatatatccatatattctgccctttattgtatatataccacaagcagccattacaagcacttttgtgttcactactcaccttgagggaatgaagcaagtgacttgccacaggcacccttgagcagctcagcgtcgtcagcaaaagccacatatccatctgctgtgattccccaataaagaggaaccttaccaaattggtcctgtagtcaaaaatcacatcaaccaaactatgttgttgttagagaccaattcaattcaattcaagctagacaaaagatactaaaatggcttaggtgcttttacttacagaagcaacaaacaaggtggaggtggacttgtcaaaaactatgaaagcaaagtttccatttaagtggccaactacatggttagcagggtatggtgctcgatcacgcagtgccttgtaagcctcaatcaccaaaaccacttcatttgcagacttggcaagtccatattgctgtctcagactacccaagttgtcaagtgctccttcgaacaagcagaatatttcatccttcacagcaaatgatctgccccaaccaaaacaaaaatttatataagaacttatattacactgtaattgtgtatgtaacaaattactttagttttgtaacttaaaatccaaaccaaaagagtaattatcattgtcaagttacaccttaattcactataacttgagtttgttcacattagaagtcatataatatttaattcaagagcttcaagttcagtttactttccactaacttgatgttatattttgggataaccaaattccaatcatccaagacttta

SEQ ID NO: 44151 - DNA, 1548 bp, Cannabis sativa
ccgcctccgccgccgaggaaaaactaatcccatcaatgatagttggattctcctcatcaaaactatgaattctaaaagaatcaaaacttttcctagaaaaagtttttaaggaagaagtggttcgaaattgttgctctcccatcgaatctgctaccgaaattatactattgttactattggatttccctactatttctcccatctgcctaaaccaaaccaatactctctatctctttcgtcctattttaagcctctcttctctatcaatctatatataatattagatgggaattcaatccaagtagtgatgacctaattagttacgttgaaaagtttgtggagagagaatttatgtgatttatttcttttcaaagtatatgctaatattgacagaagctacactttgatagagatattagcaataatatattatctatactagtattatatataagtggtactctacgattcgtagcattatatataaatatattacttttcgtagcatttggcttagcaaaccatgtgacgtcatgcatgattctgtgtgatggcgtcattaataatggtagatgcacaataatttcacaattcctattttgctttttaagtaaagtttgagcagctgtgaaacaaagacaggctgtcaatgtaacagtatatatatatttttaaaatcttcttttagactttggtttgcaccgcgttcgtgtaattattaatttattattattattattattattaacttatttatatatttaatataaaagaaaacataaaaggatgagaaattctgtgattggagcaataatattagtgagggtgtaacatcctaacaaatagacacgataagattttctgataaacataatctaatcttgctaaactaagattactagaaataaaagtaaaatttaaactttaaattatttatggaatgaaaatataacttgtaactgtttaaactttataaaccatttcaaaagagatttctcacatttcaggatcctattaaatttttacaaaatattacaagttattttttttacatgtcgacctaagcgacaaaaccaagaatacgaaatacatcaatcgatagacccaacccgcgtggtctaatatgacccgaacatatataatccactgccaagccctcgaactcatggttgatcacaaactgatttactctttcctgcacaataaagcacccatgagccaagcccagaaaaacagtgaaaataataatatgcaatatattcacaatttagataaatactgatgccaccgcatctactgtctatttagcatagacttacgtgttgcgctcatacgtctatttacattaaggcttcgaacagtttatctcggttctgattaccaagtctaacctaattatgccttacgcgcataattctttatttcaacatatatataacatgacattgcattcaaagtcatttaatcactagagtaataatcctagaccatataactgctcactttagtgtaataaccctaatcccaatttttcatttaatcacaagc

SEQ ID NO: 44152 - DNA, 1713 bp, Cannabis sativa
accttggtctttaatttctcccagtgttgtgaagcatgatcttgaagcatcacacctccattcttccctgagcttggattagaaaagtgcgacggatctgggagatcaatgtcgaactctttgctatcaatttcttcctgttgcaacggaagactagcatccattgcatcatcaaaatcacaagctaattcttcagttccttccattcctagtaaattagcagcaagcgaacgctgattagaacgttgcaatggatctagcttccggttggatttcttcttcgtcatcggaagaggaagtcgtcaccttacgccttcataatggataaaagaaaaaggttctcaatttcaaactaattttattattaatgggtacatatttagtttacccatgtaccttatttatttaaataaacaacctgtgacaactgagttttaatttttttttgtttttaataaataatagtgaattatttatttatgttaatattacagcttaattttttttttaaaataatatttggaaaatcttattttaatttagttatgtgagtggattgtttagagtatatatagttttgtatagtgagaaatacatattggattataatatagtttaggtatattatttgctttaggaccataaaataattctagaaagtgttatttgataaattgaatgaaagtaagttatatatcactacaaaaaaaattatttttagtaacaattttttagtcgcaatataatttttttataactaaatgtaatttttactcacaacagaaaaattaaaaaaattagttgtaactaaaacataatatttagatacaagttgttaatataatactacacaatacaatacgatgtactagagtgtaccaaacaaattcattattaatttagtatttagattatacgtttggcaatattatttcttggtgaatgcaaatatgactaagtgtgacaattttgctagtgtgtggacccaatagggagccaaaatggtcaagggaccaaaaacacttaaaggaaaaagagaagttaggaaaacttgacaattctggtcaagaatttgattaagattaagaacggtaattctattgtctttctcatggtatttttcggttgtagtagagtgcttcaatggttggttttgtttgtagaaagtatgaaaccagagaggaaaagaaagcatatatataccatttcagattcaagatctatagttttctgtctttatatttgatctagttttgattatcaaaattctgagttgttttagatctttaatttatgattgaaatcaggttttgatggattagatcttgagtaatttgaggtggtctaaattatttaatgttatttttctaaataaaagttattatcaattcctgtgaagtagttaccatcaaaggtagctcaatccctgacatgctctgttgagcaacgataataaatggatcattggagctgcccttaagattgatccccttctacttagcctgatgacatatatagttgatgattttgtgtcatataattgcattaacagtacttatgattatgaatatgtttttggttgttgagttatacatagttgttgtgatcaatttattgagtttctctaataatttatgagttgttgttgtgctttgtatgtgtaggtatgggattaaaaagctaaggaataggatggagtcggtagctgatggg

SEQ ID NO: 44153 - DNA, 3498 bp, Cannabis sativa
aaaacttaattcaaaaaataatttgcaatacatatgccctgaatgacatgtttatttatacctataaacatgatgggcttagtctattatttaaagcttatttcataagccatttataatacacatgtttgtttaactttcacattttataacttttttttatataactattttaaccttttctattctggactaggttgattaaatattagtttatagtttcatgtgaaaagttttttcataatatgatttttctatatctataatcaaactcgaagttatcttctttttttggttgcaaccagataagaagtttttttgttcaattgcaaccagttttattagtgatctttgggcatgccctctaatgaagaggaatttggtttgttgaggttcaattcgctaagtaccgcaagttgttctctataaagtgtctccatttcttaagtgaacatattaggttatcctcaagaagattgagtcatctttgagtagaattatctacgagcctatttatctatgagtatagttatctatgagcatatttatctctaaacatagttatttgcgagtagatttatttattagaaaatttatatatgagcacagatatctacgagcagacttatttggtcaccactttttgattgaatgtaagaataacgatatttttcatatcctcttagcttttttggccctttttgctcggtactcaaaggctaaatagtcataattagcatgctaatatataaaatcatatattttggttatatgctctcatttggtgctgataagttatttggacaactcatgtttacgtgacacatcaacaattgtaatttttagttataagtagattgtgttttagggatatgagtggacaatagttcctcatatcactgctatgcaatttgaggagatgttaatctttgtattacgagatgttgaatgttttactaaaataacatcttaacaatgttgaaataacttatttcacaaaacttgtgatccttatttagatgaggtcacctcacaagttgagtcttgagtttttttcgacatgtcccacaatatatttgttgtgagaatttattatctatgccaggttacattcaattcaacattttcattaaagtccaaataatgggtataatagatagatatatagagagtaacgaaaaatgaagaaaagatagggtttcaattttttttagtttatattatttatttgtaatttttttattatttaaatttaatttttaaataattttttgtaatgtttaaatagttaaaattacttcgaccaataaatacatactacatgtatataagtgtgcacattaacagtcataattgacgtttaactgttaaatttgacttaatttcaaatttacaaatataagtgaagataaggtagtttttcagaataaataaataaaaggattaagtgttaaaagaataaataataaaatgatttagccataaatttgttttttttattttttttatttttaactttatgttctaaattaaaatcatattattagataaagaagtggataatctgggagttaaagctgccttgtgtgtcttaaaattctacaaaagtaagtttatttatttatttatttttgtaatgatgaaattagttgaattgcgctatttctgactctaaaaaatatttataaatttacataatgaataaattaaacaggtgaaatatcaccaatattgcccaaaagttgtcgttttgtaccaacttgtagtgaatattcaatggaagcttacaagaaatatggatttgtaaagggtacccttttgactacttggcgtatttgtcgttgtaatcctcttggtaattattctctcatttataatcttaaccttaatcattttggtcttcttttaataattattttaactgatttatttatctatttggttaggtggatctggatttgatcctccaaggtggttcgatgaaacaagtttaccagaagaataagaataaaatattataacttaattgaataaagttaaatttgtttgcatgtaattaattttgcaatcattactctctttgttttcttcttctttataatatgtattgcttcagatctttcccaaaatacgtggtagcggcagagggtgacacgtggacctaaaaaaggattcactcacgaaaatcaattaagtcttgagcaaggaagtgcatctcatggagtgagcctcccggaggagagcataagacacgcctttaccctctgggaggctagaactgtcacaaggcatctccgagaaggaaagagattgttcgaacagtcacttcccatttaatgttgcatgggaaaaatgtatcagaacctccataagaggatttgacagatggcggaagccctttttacagcgattacacaacaatcgacgagtctagtgacggctacattatgagaactcacatcaatcaagggaggataaaagatcatatccacttaactcgtaagatacctaccgtataggtcatgcatttcctattttgtatctgttaggaatttgtgcccctaagaggctaacacaaaaagacaagtgatccctttctaggaatcccccgaaaaacactataaataccccataaacagaatggaaaaggggtcgatcgatgaattaaagaatcaaagagagtaaagaagagggagagagattcaccaagaacattctctgtaaaaacacatccataaataacagagactcgtggactaaggctcattaatgccctaaccacgtaaaaatcacctgcattaaactttcttcagcttttctcattctactatttaattggttgccgaaaacttcggtcaacattttggtgctttcattgagagctgaaggaatcgtcgtcagatagacaacaatcaaaggaaaagtcagattaacaatggtggaaactcgtaacaatacacgtcagccccgtcctcctcatgatgctcaaaacctaaaaggcgaagaagtagcctcaagagtgaatgtgggctctgaggagcgagatgaggcgaacgacgaagaatacgaagagaacttcaaagggtatgacacttacgacgaaggtagctatacaaaactactggtcttgaggcaaaagacggttgatcatgaagtcgagcttgcagctcaaaaagaacagaatagggggatgtaagaggtgatggttgacatgcaaaaagccatggagattataggaatacacatacaccttaaggccatcgcagtaggacttgaggaaataccggaagagtcctcaccgagtacttagaaacccaataccagggaaccaagccctatacggtacccttccgaggaaaaccctgggaaaaatccaacttcaatccctgggaaagaaaaggtgcaggatctgcagaaagtctgctcggatttcttgaaagggaaatgtccgtagaggggcaagctccctcgagcgagtcttggccctcaggaccgaga

SEQ ID NO: 44154 - DNA, 1910 bp, Cannabis sativa
  modified_base (66)..(66): a, c, t, g, unknown or other
  modified_base (734)..(734): a, c, t, g, unknown or other
  modified_base (780)..(787): a, c, t, g, unknown or other
tacacatttgaagagagcttaaattgattaattggtactaccagcagccagagtggcgtactcgtntataagagccattattctgtgggtataaggactcaatgaatacttgaagcggggacgttacacatatactaaaaaaaaacttctagtaggtattttattggtgggatagaaagtcacaagttaaaggttttcttttttgtatagtaaaattttattgtttaattttcttggaggtatttgtgcatgcttttaaaataaacaatgaacctttttagatggaagaaaattctccatattttgcgtaacatagttacttttgtcattttaatatttatcgattttccttacaaaaataaaaaataaagttatagacattttatatatatttttaataataattgaattatttttttatatatattttaatatttaaggaatattttaaattttgtatatagttttataaatatgcattgaattacaatgataaataatgtcaaatattaaagttaattttttataaattaatatgacacaggttttgcacgtttcatatgagaggacttaggcctcatagtacttaatattaccaataattttataccttaaatatataagggaaatttacatggtatactaatttttgttaattttttacaaaaatactgcccggcggtattttttatttttttactgtgttttcttataagtttcatactgcagtatantgtgttaagttttcactggtattttgtagttgttttactgttgttnnnnnnnnttctgttttgtgttctactagtgttttgtaaaaatacagtatttttgaaaacttgtaaaacttaacccaaattccaatatttatgtaagtttcccttccatgggtctgtatcatcactacagcttttaattttttccatgcctatcatcttaaattaatgagaataaactctagcaaaagataaatatccctaaggctgggcttgagattgggtaggtcttaggagaaaaaaaaaattattgagccttttatttaaaaaaatatatggtatttttaaaacctactaaaaagtatatataattttaaaaaaaaaatattttttttgagcccttaagttgggtggaccctaagcacaagcctagcctgccttactccagacctttccctatatctctactctcaatacaagtgggaaaaaaatcacttgtcctagttatgggggaattttgtcaatttcaaacaaactattatcatttttagtaaatttatttaaccatgtttatggagacatttttataattttagtgcataactatcacgtgggtccgtccatatacatgcaaaactcatgttcatgtccagataaataccattaattaaagagttatttgttgtaaatatttaaaattttgagtttgtgaacctagtgatggaatgactgaatgacccagtgtataacaaactgagagattcatgggtttgagtccgaagggtggtgccttactgcaccacaggcaaacgcattgtagcgttcgtggtggtgctttaggattccaatgtacagcattcaagatcagaacgagatcgttggtcgaccactaccatccttgagttagctggagtgcaaccatcttatccattgaactagctagaaactatcgctttaaatcgaagcactaaaagaaaaggactgagaaacgcgacagcataggaaccacaggaccccctactagtaaagggaaaacgaaagtacgctcttgcgccacagccttaaaatcggttttgtccccttttcataataataaggtgagctttatagttctggcttcttttctattattttctttaggttgggtagctggatacgagatcctcgtattaggctggaccaacatccagccga

SEQ ID NO: 44155 - DNA, 1241 bp, Cannabis sativa
tttttttaaaaaaaaaataaccgactttccttatttaaacagtaatgtgattataaatttctattcaataacaaaagggaacacaaattgtatgtatcacttaagtttgacaattaaaattggctgctaaatttttcttagtaagaacaggtaataagggctaatttctttaaattacttaaatgagattcaattttataatcctccaatactctttacagccacttgagctaatctcaaatgactaggtgaaaatggctaacttaacaaaattaattattataatttaatatggttgagtctcataatataattattttatattaatgcatcttatattaaattatattattatatttttcttctctcatatctatatcaatttagatattggataataatatataaacctaaattttttatcccgaatttcaaaaatttatatttatacaaagaatatgataaacctaattataagtcaactttacaaaatgtaaactaaaaataccccaagtaaaatgtatacatttacaaagttattccaagtatatagaaaatttaataattttacaaaaaaatttaaacttttttttttttaaaaaaaatggctatgggatgtgactttttagcaatgtgtgatttattatttcaatcattcttaaaagaaagaagtagattgtatcaacttaatttaattagtggtactacacttttttttacgtagatgacgttttacaatctaatccctttagaatgagcactattaaattttaactaccaatctattaacctgttttttgtaaggccaacctataccaaattaagatgtagtaattcagatgaaaaaaaataataataataataataataatttaaagagaccacccgattcgagtataagaaaatacaatatagatataagttttactttattaatgtcaaagcagaaatggaaactttaagcacgattactcaactaaatcccctttgaccctttccaatttgaaccaattccatattgacaactcttaactctactcttagccctcttagctcatatttcgtataaatttaaaccaagtttgaatagtaagcaaataatattaaatgacatatcaaataatttctattatagtacttagtcgtataattctctagctacttcttattacaaaagggcaaactaaaaactaatggttatatttaattattcataagtattaaaaagaacaattaaaaaa

SEQ ID NO: 44156 - DNA, 2677 bp, Cannabis sativa
aagaggaaaatgaaaggagatgagaacctgaatatgatggcaagaatgaaagtgaaagctgggatgagattaagcatggctgtaccaagtgtgggagagctatagtcaatacccacataaccaaatatctgtcctgaacacctgaatatgaatttacataattaataatatatatttattggtaactttatatatatttatataattttgttttaattggaataatgtatactcctatactcacccaaataaggcaagaaagaagaatctgcagactatggaagaggtcaagggagggaggtctgaagatctggtgaattaaaattaatcttaattagtattaattaattaataattatgatggagaggagagaagaaataagagtgataataattgatgatttagttaccttgggtaataaaataggaagtagtaggcaaaaggaagaagaataaaagaagagatggcattagagtaaagaggcatgatgtacttgttagttccattagacatggccatttttgttatcaccatattgcttgcttgtgctacaattgccataaccattcccacaaacaccacccaattattattctccatctccctctctctctctctctcaatctctatctatattacaaagaaaaacaaaagaaaataataataaatatcttcttactattttcaaaagaaaaaaaaaattatatattcttaatagattaaagttatatatggtggtcatgatgctacaaatgacctctctctctctctctcttgaccaagtttaagaaaatactaagtcaatgtattaagtgttttaaagaaaattatacaaagaaagaagatatgagtcacttctaaagctaataactactatcatttatttgacaaaacaatttaagaacattaaaaaaaaaactaccaatgtatgttttataggaaaattatattatggatctactaaaagggtgcaacaatgcatttttatctaatttggcatgaaaattttttaatctattttttttatgattgtgtatgttataattatttataaaaaaaaaattgagaatttttgaaaaattcagcaaaaattaaaactccgaaaataatatttaaatagttaatttgctgcatgtgtcacatgtaaaataaattgtttgaacaatgttttctatattataaattagtcttattttctcaaaattttataaaatattataaataattataacgtaaacgatcaaaaaaaaattattttattttttatgtcaaaatgataaaaattggactcttctctattttggtaataagcaccatatttaatatatacatttgtatatatatcatatatgtccgcgaattattggtgctttttttaattttttaattaattattagttattataaatgacaaaaatataaattatatactgtcatagttatgtcatcacttttaaaataaataattctttttttcttcaaaaagaaaataaaaatcttttacaatagttgactttgacaaaacataaaaattactacataattttgaatccaatgatcatttactacattaattttgtatttttaattaaaaatatcaatgaagtttattaaattttaggagtgggacaagtttttatcttaaaaaaagaccaacaaagaatagtcaacagaccctactaaattcttgttaaaaaaggaaccgagatcccatctcggagactcactcactattacttggttttaatatttacttaattaatataaatttttattaaccaataaataaatttttatgtaataaataaactttaggatatttataaataataataataataaatataaatagtaagaagattttttaacgtgattttgaagttaatttttcacactctacgagtcttttatttttgaaattttagaaagtgtatagtgaatagagaatacaagatattatttgtgaattatattatttttttaaaaaaaattggtcgtcccttgtttcttaaattatgtctcgacttagagaagtattagaatgatagttattccgttggaatcttatttttgtaaccgttcatgaaacgtggacaattctcacgtttcatatttacatcacaagagataattataaataactattgtaactcctcttgtctttatctataaatggttatgttgactacacttctccatctcgcaatatacaaatgatcctcttaggatgctttattctgaagataacttatgcgtctaagtataatttgggacatgtttctcgcgtccttatgtaaatgttgagagaggtgaacgcgaaacgatatcatggttcgacaactccgagctaggtgaattattataggtgtattttcctaagtctttcaacacattcacgagtatgtgggtcaatgagttgcaagctcttaaaaaactcatcatctaccattttcaacgtactattattctattgtgtactccgtatatcccgagatagaccttctacgttgattattcatctcgctggtcttacgaaatggtagttattactcatggctcgtccttatctttaaaaaaggatgaattcaaatactccttccaatcatattgtccgaggcgagtttattgaacatatagatatttattgctttattacacgagttgatttattttcta

SEQ ID NO: 44157 - DNA, 2236 bp, Cannabis sativa
ataaacgccgttacgggtgacgtgcctagtaaggacccagccacgattgacgtggcgtcggacatgaaagcgaagtattgaccttcgaaatcgccattttcgtctgagaaaccagcgaaactcgccatggaatacagagtcccggtagttgatagtatatctacgtatagaaacgtgacgagagcttcccaaagatgtcctttacccatgttcttgaaactcaatgcccctaaagttttttgtattgggtgaacgtccacaatctgtttgaagtaacggtacgccgtttctcccgaaacggtgttgggaaacgccgtcacgctagtgtttcggaaccacgaaacggccgttacgaaaacgatgccgtatatcattgcccccttaacgtttttgatcaggcagtaggcaattataacgaaacccaccattgccagccaaaatgtggtgctttccattcggcctcggctgcacatgatcgctcccgacacacctccgccttcgattagagctaccgttccgttaactaacgtccgcacgggtgcgagcgatacgcgttcggagggaggacaggctccgattgtgacaagagtcgaggaatcgtacgcaattaacccaattccctggttgttttgtagtccgataaaggccaggaagagtccgattccggcggaggagcttatccgaatcggtttcgggatcagtttagcaagtttagtacgaaatccaactaccgagatgagtaagaagattaagccttcgatgaaaacggcggttaacgcactctcgtacgagacattacccgacccgtgaaacccgactacggtataagcgaagtaagcgttgatacccattccaggagccagagcaagaggaagattcgcgaagattcccattatgaggcagccgatcagggacgaagctgcggtggccactatcaaatctttccgtaatacctctaaacaagcggcgtaacccgggttgaccggttcgaacttgcacgacgagtcgggttgtataaccgtgagatttgaacttgtacagctcgagacagggatggaagggtcggaacagagagggatacagtcggagacgctgcaaggacccccggagtcggtgaggatcgatgcgttgacggctaggatgtaagccatggtgaggaaagtagccgtgccggctcttaactcggtggtgaagttggagtttcgttcggtgagtttgaatcgctttccgaatcggctgttggcgacgaacgtgttgagccgagttagtgcctttggcttccgctcttccatgtccatcttattaattcaaaatttaaatgaaaaaaaaaattaaaataatttttttcctatttgtgtttttagttctctgtaatcaatcttttatagtcctgtagtgtatgtatatatatatgggactaaagagagagtgtggaagagtaatggcgatagttattattagaggtagattctataaaagagggatcttcttatacaagaggaaagtatctctcttgggggcttttccaactaggctggcctctattgaatctctcatttgactttctttttttccttttttaatatataaaacaaaaaagaaaacaaaaattgatgaaaattttggaccatgattcatgagatgactagatgagatgtccaaagcactatttgaagttgcaaataacgtaagaagaaggactaatgagattaattgtgccaacataatgaaaacatttaagttgacccgtaacattgggtgtatctggttattgccttttttctttgaatgaaattaaactcaaaattattttatatattttaatatatattttgtgtggcattatatatatttttatgttaaactcaacttttccttaaaaaaaaatgataacttcaagtaggaatgcagccatttggtttcaaacattgtttgccaaaacttgttgccgaaattagagataacggctacttgaaaaacttactaacttactacgtttgacttttttttttttataatataaaattatatctaatttataatttcttataataaatattaaaaaacattttcgttctttcttttaatcaatttattgtcattctcacatggtggccacgaaaaaatggcaacttattatttcagtttcacatttgcccgcccgcatttccctcttatatattaaatttatgattaaatcaattattcccacgttattaggttttaattttttttt

SEQ ID NO: 44158 - DNA, 2164 bp, Cannabis sativa
tgtaaacccttccacacactctaccttggccatagggatgagggggattctgatctcctcaatcgccaccaagctcgaccatattgcctagacctcgatccccgatccttgctaattctgccaaccacaaactaaatacctaatttaaccatgtctgttgctagctaagaagaaatcatcttagtgctgaaagcctgctttgatcccttcctgctcaaggcatccgccatcacattagcatttgtggggtgataaaggatctcatagttgtaatccttaactagttttaaccaccgtatttgccttatgttcaagtctttctgggataagaaaaatttgaaatattgtgtttaatctcaccaactgtgtatccttcaattcgagtgttggtggagatgatgaaggtgtcatactcgcttggcaagcctttaaagatggcaacaatgtgatctcgatcatacaagatttctccaacagaggctaggagatcaacatgttgcttcacttaaaggagatagtaattgagattcagagtgcctttcttaagtttctacaattttgttctgagttccagaatcttggatgaaactttgagagtgaagtgttgttcaagggctttccatatttgtcgagctgagttacatcccaccatacgacttagaagactttctgtcatcaaagagagaagccaagatacaagaagttgatcatgagcatcacaattaatgaactttggattgaatttttgtgcagctcgatctgcatcattgaggaattgaggtgggaagcaacatcttagatgaattgaagaagacgatttccacgaattgcaggtaagatttgttgtttccagagtaaataattgtgatcattgatcttgatcgagactgcgtgattgaagtacaccgtgccatcctcttgatccttgtttcgagttctcggagcagcagcttgagctcttttttgtacaggttgatgatttgagctaccatttctcacagtagccatgtttgccattaatgacggaaaaggctctgataccatgttggattgatttaaccttcttgacattgaaatagaaagaaagaacagaaaagagaggaaagaagaagaagaaaaagaggaagagagaaagaaactcttattgattaagtgagtgttacaatgcatatttatatacacattaagctaacaaaaagtaataaatacctaaacaatctctaaccaaaaccaaaaaaagcaagagctaacccaaattaactactaaccaacaaattgatagacaattttaactaagtgtcctaacataatttaacaaaataaatgaactaaattagtgtattcccaatgaataaatatgtctaaccctttcaaaataattaataccccataaaaagtattctatatatctatgtctagtattattatgtcattttgtattatatgtctaatagtcacggtgtgcggtgtaatcctaaagtcgtcacataacattgcaaatacaaactttggtaaacttaatattttattttcttatcatttgataattatacctcgtctcaacactaattaaaaagaagtgtattattttaataggtcactagaaacaaggttaagacttgataaatttattccattcatttcccattagaattaattaaaaagttatggataatatatttttttgccaacaccaaaataaataagacatattacatagcattattccttatcattttcatagattggacccacaaaaatttccaatacccactccccaattatgtgtaacaacattgccctatcttaggtttggtcacccaaaaacataggtaactttagagccataaataaaccttaggccacctatcttcatcaccgtccaatcaacttaggtcaaaactgacaaaagattttttttaacaccattttttctttctatttggctttaatccatttttggcccaacttaattaactcattattgatattttctttatgggtaactaattaattattgactgaactcaaattattacacttaccaactccaaatgactatgagaaggactatacaggaaatatgtgatctatacttggtgattgacctaacatgggtataaatgtcatttcagttttactgtagaaaaaaacacttgttttt

SEQ ID NO: 44159 - DNA, 3681 bp, Cannabis sativa
  modified_base (1754)..(1755): a, c, t, g, unknown or other
gctgggttcccattatcctcctttccttggcccaccttatcttctacgtctccgtggcccagaccctcagatgcatcaatgggttcaagtaccagaggcgatgccacaagctcacccttggactcgccaccgaaaagctcagggagatgaagattagaattgttaatggcggcgggggacctggtggagagtttgatggagttggggacgatgagttcgagattcattaccaggaaccacctgagagttactttggtaagttcaagagaaattgggctctgcattttggtttcttgatcttgatctatgggtttatggtttcctcttctgttgttcttttatgcttttagattatttttttttccctttattaattgcaattagaggttaaaattattaaatgccaattgacattaaaattggcatttgatattcttttttcggttttgggtatgaaagtttgggaaggaacggaatccgactttgaaattgaatgaaacaaaacatatttgttgggagttatgtgtattccttttatttagaagaataattttatatatttatggatttttatttaattatagagaaagtggtaagattttgtatgacaatgtcttcttgcttttggatggagactatttcacactaaaaagttaagtagctttcttcttacttttgttgcaatatggaacgaaacaggcccttaaaaacgaaacacagtccattttggtgacaattgaaaatgagaaatagttggagaaaaactaaaatatggagtaatttggtcggtttaaattttgaaagtggtaggtacatacataacacagtttggtggttttttactttatcaccctttcattgtaccggggtcaaatactcatgtttttagactttcttaagtttgtagtgatttaaatatgcacatatcattatcaaaaaaccaacttatgtaacaatctgagccgtacatctgagtgacatacacacttagattgtgcagtcacaatctgagccgtccatcagagtgacatacatacacttttttttgattgtgcaatcacaactcacaaccctatcacacacagaacacctgaatagagtagagagtggttcataattggtcaacgcaataaaaaaaaaagttcatcaattgaagagctaaatgtgacagctgggactgaagctcagcagtggtcccctcctgcatgatgagctgtatgtagagtagtttaacacacaccccctcccagagcagcatctactatctcctaccaaattattttcactagtttttaacctaacagaggactttcagaagatctaaaatagtaatagccaaaaaaaaaattagataagaggtaaacaaaagtactattctatagactatagtgtttagctacacgtagagaataaatattatataattttttaatttttttaaaaatatgtaaataatattattatatttatttatttaatctttataataaataaagtatattaaatgaaatcattttgaattgatatagaaaacatatgaaaagttaatgtatggtataatgtaaatgtttaaggtaaaataaaaaaaaaataaaattttaataaggtattataaaagatagagtagagaagttaatgtgagagctcttaataattgcttagattttttttttagggaaaattaatatatgataacctcacttttacccaagacactgagtctttaaagcaatgaaataataataataataatnntaataataataataaacatatatgagcaataagaacacgagaaaatttatagaggttcgttcctgtgattatggtaatagtttactctcctttgctgtattacttagaagattcttaggtcgcaaggagctggtcaagtgagttactcaacaatcttatgaaatcttactagtctttgacaacataagtgttttttttcgaaaatatgaactcgggatctccaaaagtgaaatggttctactatttttagggaagatacaatgaatattatttcttaaaataataggaaaggaaataggaaactaacattaattcttaaaaactctcctatatgtaaaataagtcacataaatgtacgaatttaaccatgctataaatgaggatatatttaaggacaatatcttaaagaatctaaatttaccgcatcattcttcgtggaggattcttcttagctcgctaaagacattctgcttggaacattacgcacaggtctaatctagtttcttgttgaagactttgacatagtcaattttgagtgtggactcttttgaactctagcaattgagtcatgttgaactctagcttgttcatcacatagtttgtggtgaaagctttcaagcaaggaaatagtgactcaaggttcatactcacttgagtcctttcgtcgatgatagcctcgtgtgtctctgcctcatgcattagctcaattatgtgcaatacatgaattctaatagggacacccttcttcattttacaattcatgttgctacgagtagcatcatgccttgtttgattagactactgcccaaacacgacctgtagagaattcattatttgagatgcattctccatttcttcacgcatcttacgcaaaatattgtccatgctaacagtcataaaacatttggccttattgttggattgaatctaagcatcatatctatcccaaaaattttttaaggcattggtagttggatcctcgacgctcctcagttaggaaaaatttgttattttcacaaactagcatcaaattcatattagattttcatttcaaagaattttcaccattcagtttttcaagtgatagtgaagcagtaagagaatttctcatagtagacatgactgaaataaataaagtgacataatgattatactttaataataaatatcattttagaattacttacaaacgtgatgcatgagcgcatacaagaaaaatacataaaatcttgtttaagttattccacgataaaactctttgataatttgatctccgtctacaggtcggtatcgagccaattttattgagcctatgagacaattctcatcttcattgttttgaaacttaaatatctcatatttcttttttaaaatataagtaccgctgtttggtcaagttaacaactaaccactatgaagcttagttgcactttgtgagtgtaacccattatttcaaatttcatgacttaacttagtaatgccgccttaaggtcaatattataataagatacatctcttcctattatcttagtcaagagatcaatcttgaacaacagtatagaccaatacctttcttaactggacaaaataacgtcgtctcgaggccaatctatattccttcggtgttgaccaataataaagactgtaagttacattgacatgtactccttctcccactcactattttaggttaatgtgtttattttattaattctcaaaattaatacatattaactactttaatgattatgattaatttatttataataaaaactttaaattataaataaatttcccgtcataattattaaatctgaattaactttttaatttatattttaaaactagtttaaatgaataggttaattttaaattaatcttagccaatttgcatgattttggtttcaaaaacggtaaatacataaa

SEQ ID NO: 44160 - DNA, 3029 bp, Cannabis sativa
  modified_base (39)..(46): a, c, t, g, unknown or other
gtgtaattaccactttagtaattaccctacctagtaatnnnnnnnntacttccaaacacacccttaaaatgaatccaaatagagtgtgaaaattataaatagcgatatcggcattggcttcgaagcatttctcgagcaattcatacatactaaacaaaatcataccatacagccgatatggaaaaggcgactaaccctattacaacacactctccgaaaatataacaaaataaaacttgaaataaagagttttcttttattattttaagtattcaattggacaaaccagaacacaacatcacctgggaagcatcatgaaaatgagggaaagctcaaatgtctcttcctgcacagataatatagctaaagccttaaacagaaccccccttatcagccttcccaagctcaaaccattattttatttagtaattaagctaacatgtaatttgtacatacatgaaacatgaaacatgaaacagattataatactaaataagtagaagaaactccgcgatttcttttcaaacccttttaccaactgctcaatttgcacgctctctaagaacatcaagatccatctcgctccgatcagttgcctggatctcgtaatgaatcccctcaagctcccttctaaacctgtctttcgatgttgcatatagcatctttgctcgaattctcgatacagatggtgacctggaatacaagatttacataaaaagtacttatagtggcaaccaaccgaagagaacacaccattttcgattacttaaaaaggtttgtaacaatgttttttctcagaataaccatagtattgcagcaacattcagtacaaacaacaacaaatttgatgtattctaacaagactaagtatgtcagttcaaactgctctcctctcctttaacaccataagttttaatttttcaaaagctagaaataaaaggtaaaataccaaatgcgagtatgaaggcaacagacaactaattaaaacaccacggaaggtgacactttatttgtggttgaatttaaaatcgaaaattattatgctttatagcaattaacacaggccttcataaaacagcattttcagacaaccctcttcaatcttataggcttctctgtttttattaatcaactcattatcaaatctctagtgaatgaaattctcgaacccaaacatttggcaatctcagacacgttaatatagcaaagttaaactaacaagtattaagttattaacaagagaatcaaaataaagcaaatggaaaagaaactaaccatgcaataaaaaaaatcttgctcttttgacaattctcggaagtgacgaaatcaaagtcataaacagcatatcgacaatcattctcaggcatagaggcggcaaaatcactgtagctttcagcagggcctccggttttttcaaccacaacctcttttttcttctcatcaatcttgaaaatcacatagcggtaaaatttcttcctctgaagttcaaggaatgtgctcttactatgctcatccacacccatgccagatgaagcatttccctatacatatcaaaaaaaccaacattgaacattaacataacataaaccaagccactatgttttctccttatggtttgatcattcatgagtgtcgtgttttatactttctttattagagaatgtttctcttcattttgttaggcggtctgctaatactgttgctcattagcttacttgagcattgtgttctattcatgaccgtgttattaaggtggacaatcgtccccttgagttgttgcctatgttgacttctgattgttctgattaataaaagttacaatcttcttcttcaaaaaaaaaacataacataaccacaaaacaaccccattaaaatccatgatgttagcaagttacattcaaatcactactcttaaagtcaagtcaaaagtaatgctatgatggtactcattatttgttcttatattattctatactcatgagtgatctgattgtttaatccaaaaaggactaatttccattttccagtggaaactaatcaaaatgatttaaattaatatgtatatgtgtgtgttattctacaaaatgaaaaatgcctagctctttctttgaggtttaagtcaaaaaatgaaaatgttacactaataaataaacagaatttaggttttgggtatgaaaaagattgaaactttaataatcaaccttctagccaaaagcatccaattcgaaaagaaacacaaaaataaattaaccccaaatccaggtttcagttaaactcaaactacagttacagcaaaaatttaccaatttttcatttgggtactgaaattttcaaaagaagaacaaataaagatcatattttttatttttataacactaattttgggaaagaaaaagttgggtattgattcaaagaactgcataagtaaaaaggcagaatctttaaagcttacccctctgaaagccatggctgctgctttgatcgccgacaaatagttttagagagagagagagagaaatcagcgaccacgaccaggatatgaaaattgaaattaaaaaatgattaattaataataaaaaattagaatagtctgcgagaaaattgagtaagaaatgaatgaaagatatatattcgctgtctgacaaagactgccatgaatggagtgatataatcacctgagaaaacaggatcttgaatatcacaggattgaattggttcggtcttttgggcccgtgagcctatggagttgacaacaagagaggtctcctccggcccaataaacacgagataggcccaataagctttttaattaattaatcttgaaaaattctacaataatgcactcttaaaagtggtagtgtgtactgatgcatttataaagaagcaaccatacacgactataaaaaaaaaaaaatagattaattttctttttaaatgccaaaatcgatacaccctttatgagctttatgagaatgaattgtagaagcaaccaatatcattttacatatacatattattactcgataaat

SEQ ID NO: 44161 - DNA, 2148 bp, Cannabis sativa
tatatatatatacatatataagaacgttcctaatttataataaatgaatattctggtattttagaattaatataaaattaaattcgtcatactttgcttgcaactccatcgcaagtaccttagtttcaaagctcaagaataataaagagctagaaatgcatgatcagctggtgagtaagtactagaattcaaaaggaaaatgctgtgggcattacatgtatatcgtcattgagttttcaaaatttttagataaaaagaaaagaaagagagttgtcaatatttttagatcaaaaagaaaaagagttttcaatactcactcactatacagtaagtagtactatatcagttcgtttagtatatgtattaatgtattagttttatttagtacaatattatttttaatattgatttgtactaatagattaggtaaaattacaaattgtttaagggtaatttgcgatcaaactctttggacttttaaatttagtatgatttaatcccatactgaaaaaattatgactaaagttccctacctcgtattggttaataatcttttggttagttttaatcataccacttggttgtaaatacaagtgtacacgtggtaaaattttattgggtcacttagtattaataattaaaaaaataaaaaatatatttaaaaccaccccctacaacccaccaagaagaagcagaaagcaaaaaaaaaggaaagaaagaaaaaagaaaagaaagaaagaaaaaaaaaaagaaaaaagagaatttttttcttttccaatttttaaatattttaatttatttttttaatttttaatattaggtggcccaatatacttgtgtacactttggcaggtctatttggcacttaatagccaaaaactaacccaaggagtgctggccaaaacgattgtggatgtttgggacttgagccataatttttctagtatggaggttagatcgtaccaaacttaaaagtctagggatttcggtcgtaaattacccattatttaaaataaacttgaccccaactccaaccatggcctggactcagacccagacccagaccccgcatccagaatatgcctgcacctggaccctagactcgaacccaaacctgaacctcaaacccgaaccaagacctggaccccagactcgaacccagacccaaactcggacctcggacccagaccccgacttgaaccctggactgagacttagacccagattccaaccgcagacctcgggttcaggttcgagttctgggtttgggacctgagttaggttcatggtccagggcctggtctgggttcgagtccgagtctatgtccagtgttctaggctgggtctggggtttgggtcggggtccagggttggggtcggggtctatggtccttgtttagctctaggttttggttcgagtttgggtcagggtcaaggtccgagttgggctcttggtctagggttcgtgtcaaggtctgggtctggggtttaggtctaggtctaaggtccgagtaggggtcagggcttggggtcgtggtctggggtccaggtttaggtctgggttcgagtccattgtcagggtatgggtccagggctggggttgaggtcggggtggacccttataatgccctaactcctagggacgccacgtgtgtgcttttgaaacataattttattgaaaatattttaccaagatctagatttactaacatatatgttggattataattctataatctaacatcctaaatattaatttcctaaaacaatgaattaaacacgtaaaaattgttgtataccttacattgatggcatcagaataatatgactctctccgttcaaatatctaacccttgatcctttctgttgcagagtatgatcaagatctgaacctggattctctttcagttgacaattggactacatagtcttcctcactatgctgagtattgctttgaaatgtgtggacaagttctcaacactaaggagcacgaattttgataaagaaatccaagagaaaaaatagcctttgaattttcaaaaagttaaagagaagaagaagtgagatttttagggtttcctaacttaaaaaattattatctgacaaaggtcttttctctttctatctataggctttacttagggtta

SEQ ID NO: 44162 - DNA, 1059 bp, Cannabis sativa
aaaaaacactgttttgaagtgtaaaaatgaaaaaatctttttttttctccaaaactattattatcactactgtattgtgttcaaattatccctcgaactatttcatcagacaaaaagtaacagaaggactaaaactcaacaacggtagtttgagagagtaattctaataacgtgaaaagtttagggcacaatacggcagtggtaatggtttagaggaaaaattataattttcttataactatgtatgttgtagttattcaagacatcttattattataaatttcaaatttgtacatgactcagagcaatatgccaaaaaattagattggcatcaatatattttcttgacattggacacataattgaatataataataagtacgacatttgcaaatttataactatgtacatgtatcatatcattaatatgccaaaaaaaattagattgacaacaataaatttttttgacttagacatataatttgttaactcaaaaacttcgttaacattgaatgaggctagataattaatactttaaatgtatataatctagaataaagcaatgaattctaatattgaataaaagacataatttttaatgtagttttgtaattaagtttacatatttcacgagtttgtgttatgtctaagattgttatgaatagagatacaaattggtagaagttctttaaatctgaaatttagtcatgtcttttacctctatgaacctgttatttataagaattagataacagttatttgattttatctatgtaactgtttatgaaacgtgaacattcctcgcgtttcatttattcacaaataggtgggaacgatttacaaccaacatttaaaataaataatctttattctatgatctggatctttattacatttcaccgagcagcttcatcttaatattttactcctcgaagaatacaccgaatgattgatgtatactgaatgcgaactacctcgcgaatcattggaatgaattaaacctttctcgttgatcgccaaaaaagtgaagtgtgggtgaaagatttacctcctcataag

SEQ ID NO: 44163 - DNA, 2309 bp, Cannabis sativa
tatacacctcagcaaaacggtgtatctgaaaggaagaatcgaacaattcttaacatggtgagaagcatgctaacaaatggaagagttttaaagagtttttggccagaagcggtaaattggagtgttcatgtgttgaatagaagtcccaccatctttgttcaaaacttaacaccagaagaagcttggagtgggcgtaaaccaacggtagatcatttcagaatttttggatgcatatcttacgcacatgttccagatgagaaaaggaagaagcttgatgataagggtaaaaaatgtgtctttcttggaataagtgaaacttccaaggcttataaattggtcaatccactcacaaagatgatcttgataagtagagatgtcatttttgatgaagaaagcacctggaattggaatgagcagcagcctactcaacttatttttgatatctatgatgaagaagaaaagcaacaatctctgcaaagacaaaatctgacagataatacatccgaatgtccaccaaatggagctactacagcttctgaaaatacaccaatggcagcagaaaacacatatgaagaggttgtttcaagttctcgtcgtgttcggaggagacccgcatagatggaagactttgaggtcacaggtatcccatctgaaaatattgattcaattgattcaattgcccattatgctcttttgtcaggttgtgatccaatttcattcgaagaagctgtcaaagactcaaagtggaaacatgcaatgaatgaagaaattgagtcaatagagaaaaataatacgtgggagttggtcaaacttccaaaagagcataaattcattggtgttaaatgggtttataagacaaagttgaacaaagacggtggagttgataagtataaggcgcggcttcttgcgttgggatacaaacaagaatttggtgtggattacaaagaggtgtttgctccagttgcaaagattgatactattcggttggtgttatccattgatgcccaaaactcatggcctatatatcaattggatgtgaagtcagcattcttgcaaggacaattggaagaagaagtttatgtcgaccaaccacttggatatgtgaagcaaggtagtgaagatcaggtatataagttaaataaagcactatatggactgaaacaagcaccaagagcttggtacagtcgtgtagctgcttatttccttaaaaatagttttatcaaatatccatatgaacacactctttacattaaatatggtctgaacaagaaaattttgattgtgtgtttatatatgttgatgatctcatttgtactaacaatgataaaactctgcttgatgaatttaagttgtctatgatgaaagaattggatatgacagatttggtgatgcactattttcttggcattgaagttgtgcaattatctattggcatattcatttctcaaaagaaatatgcttcaaaaatcttagacaggttcaaaatgaagaagtgtaatccagtcaccaccccaagtgaagttagtctgaaactttcaaagaatggtgtaggaaagaaagtaaacaccacaatgtacaagcaaataattggaagtttgatgtatttgacagctacaagaccagatattatgcatgctatcaatttagtaaacagatatatggagaatccaatcgaagttcacctcttagctgcaaaaagaattttacggtatttaaaaggtactgcagattttggaattctatacaaaagtggtgaaaaatcaagtttaattgggttttcagatagtgattatgctggagatcctgattatagaaagagcacatccggagcagtatttatgttgaattcaggagctattacatggtcatctaagaagcaacaaattgtaactctgtcaaccacaaaagttgagtttgttgcagcagcatcaacttcatgtcaagcaatttggttgagaagattgcttgaaatgttagactatcaacaccatggtcctactgtaattcactgtgataatttctcagcaataaaactctcaaaaaaatcttgtcttacatggaaaaagcaaacacattgaagtgaggtatcatttcctatgtgatttatgcaaagaaggagttattgacttggtgttttgcaggagtgaagattaaattgcagatattatgaccaagcctctaaagcttatggcgtttctaaagcttagaagtatgcttggaatttgctctctaaatgaagttcagaacttgggaaagacaaattaatttttaaactgatttatgcaatatatcagtttaaaggagggtgt

SEQ ID NO: 44164 - DNA, 1062 bp, Cannabis sativa
ggcataaaacccaacagtttaaccccagtatgtagtaataacttactcctttttctcaataaaagaacacttgagatcaaaagaaactttgttgattgagtttctcaagagctcttttcaattacaataataattcaccagagtttatgttctaaatgaatgaaatgtaacgggctcatatatgtagattaaatgaaataatctacattaattagaggatataaaataaatgcaataatttaccaaaatctcgtattttaaagcaccaataaagacctcatcttcagagaattaggactgatttcatggatctgaagccaattgtatcttttgtgcggcatggtccaccagattgtttacttacataactgtaatgaccgtataattatacatgaaaagttagtaattaattaaattattgtaatttataagaataattgtgtaattaaaaatgaaagtctattattaaaaaataggcaaatattatagtagtacttaattacaaagattttttagagttatgtgtgtgtcatatgtatatgatgtgtatttaatatgtttatgattagtaacaatagaaactcgatggattaaaaaaatgtcaaagtggtatagtttagctgtaacacttgatacataaggctgctacaataattttctaattaacgtgccacatttgctaattaaaggattttcttcgaaaatcttaccaaattaaaattttgatttaaactattatattttacaaatatatatatatatatacaaaaaccaggatcatgtaattaaacttttacaatcattatcaaaatatttttacaaacttatcgcacagtgactacaaaatacaattcaaggtgtcccgagatcgaacactccaagttgcatcgtctcgacatgtacaatcatcattcgagctcagaactcactcatctttaccctttgcctttcctttacctacacacgaaagtagaatctatgagtgaatagactcagtaagaaaagcacattgtaacaccctaactggcataggcgtgttgacgtgattttaaacgtactgtg

SEQ ID NO: 44165 - DNA, 1311 bp, Cannabis sativa
tatttcgaatcagtgctaatgtaacatgtaatcatatcaagataataaaatgctgcatattgaaattatgacaaattaccagttcattctaacttcctctgggctttcgtttcgaccggtaactgacatactttgtatatttattagaacaagaatcaacgataatggtagagtgtcaaaatggaagaaagggaagaagcctaactctcgacgaggcaacagatacaatacttttctgcagctctattgttcatgatctggcctacaaggctgcaacaatagcactggacaaggaaagttcagatcatccattagaaggctcgcagccaacagttacaatattgggaaaatccaatcatgacaaaaacgatctaccacatggcagaattgtcggccatcgcccttcgaaatttcaaaagaacaccaggaaaaggaaggtggagataggtgtcaaacctcctagcgtgatagagaacgacgagaacgctgttgaaccgttaaagcgcagtgtcgagcctcctaataaggtggataccatgaagcctccaaaactggaatcgaaatgcaattgcacaataatgtaagttcaactctaccttaccaacccctctattagcataattatacgaaggcgatggagccaagtccttgtattttgatggttttatgtttgaagggctgtttggatgttgtcaattaattgttcccatttatttgtaagaaatacccacgttgtgttggtgaccaaattgtaaagcttctttttttttctttttgttcatttttactttttttaggctaatattagttaaggcaatgaagggttctgtttgctccagttgccacattcttgttggttattctgatttggttcaataccttaatagtagagataagtgtgaattaaaaaaaaaaaaaaaaaaacctgattcatattcgttatgattgtgaagattataccttccatttattcatccatgttggggtcacaactctttttgttctaatttgtttttggttcaataccttttcagtagagagaattttttttttttttcttttgttgctgaatttctggaatcttggttgaagtattgaactgcaaaatctaagcgattaaagtcaacaacgtgccagaaaattagtaacacgtggaggaaatggcatttttacatggtatatcacagaaaataatagattattatattattattattataagatttgttattgatttgtaataatcacgatatatcatgttattaatcattatattgtaaagatttgttattaattaattgagatttttgc

SEQ ID NO: 44166 - DNA, 2923 bp, Cannabis sativa
agaggtatttttagattgtcacactttttcttttcctaactcgctttatttttattttattaattaaaaagtaaaaatataaatatatattttttaaaaaattataaataaaaaataattatattttttctaaaatgacaatttagtcgaaatttagtactttgattacttttttctaattattaagcaaaataaactcattctcattttatatttggacaatttattaaataatataataaaatatcatttttaaatattttatattttaaatctaataatttctcaaattaattattttgtatgaaataaccaccaaaatatatatttttttttgcggcaataactaccaaaatattagtatctttttctttcccaaaaactaatcataataaaaactaatcataatcttttttttttattattattattattatcattttaaagaagaactaatcctactcaaatattggtagccctaaaccaacacagaaaggcgccagtcatcaagacacgatcacatccgtccatttaaatcgaatctaagaaaattccatagaaggaaaatctgtagagtgactccaccgttggatcaaatccaattccacttgcttgcttgctatatattcccctaagctgccaaccaacgcaaccccttttgcatagaaaggaagatatctagagtgctgtagagaacgagactttagagagagagagagaacagagcgagaaactatggcggcaacagtctctccatggtccaaacctggggcttgggccctagactcggaggagcaagatgcagaacttcttaaggagcaggagaagaaggcagccatggaacctcttcatgatttcccttcgctttctgccgccgccaccgcgaagcctaagaaaaagaaaggtcagactctttccctagccgagttcaccacctatggaggccccaaaccagttgcccaacccactgcgcctgcgggtttaacccatgaagaccgcatggcactccctaaaggccctcgcgagcgtaccgccgaagagattgaaagggcccgtcatagcggctttaggtcgtttgatcgaggtgataggaacggcgacgactcgtcgaattcgaggtggaagagttctgataggaacagcaatgggtttggtaaggatgcgcctagggattcggggccttctcgggctgacgaggccgacaattgggcatcgacgaagaaatcgtttgggggtggtaatgatttcgatagaggcgagagaagagaaagaagagggttctttcccgattctcaatcgaaagccgatgattcagatagctgggtcacaaataagagctttgtgccgtccgagggacgaagatttgggtcgagcggtggtgggtttgagagagagagaaaagttggattcacctccaatggtggtggtgcagatggggacttctggggtaagagaagggaggagagtactggtgtaactgggaatgaaggtgggattgtgggtggagggaggccaaggttgaatttgcagccgcgaacgctgcccgtggttagtgatggaggctcgcctggttctggttctgtgacgggaactgtggcggctattgtgacgaagccaaagggcttaaccccttttggagaggccagaccgagagaggccctttttgctgaaaaagggtaggactggaaaaaaatcgatgagcagcttgaatcgttgaagattaaggaggtgaatgagaagccagagggtggatcttcattttggaaaatgagttttggaatcgggaaagggcgatctgatgatcgcattgagaagagttggaggaagcctgacacggaggaggatactggttcccaaaggtttgtattgtcagctatgtgaaaatatgctctagtttttactttttactttgtgaaattcagcaaggttgatactttgatcgtttccttgcatgatgaatgatgatatgaaaagttaaatagattgtttgctgataaaattcactgttgctagattatgttttagttcttaatatgaatattgattgttgatgacgtaaatcagattcattataatgattcgcataggcaaatgctttactttttattggcttaacagaggttttggactttctgattttggtactccttcggctctagttttttcatctcccatacctttttattcaagttagaaaattttcttttgggaaagtttgttcattgttgagtttctcctctatcaccttctttgaagacttggcaggcattaatacttgttatgtttatgaactgttgcaatttaaattataacttaagcaaagaatcttgcaaagtaattattacacttttctatgtgttagtttgtggtactttctgagctttcttggcctcttccaaggaaagaaatgtggttgcttgttgttatgaatctaacccgacaggacccctctaccccctctcttgccttcaagagaatatacataaaacttttcatgtcttatgtctgtaagtagatacattattctgtttgtggattaaaaggtacaatcaaagtactataactttgtgtcactgaaagcttgcgatttgcaatgaaattcaggggattcatttggaagatatactgtagaattttatttgagatgagcccataaaattgttggttctattgttttggtttagaattgtgtgaatcatttaaagaaactaattgtttgtcttatgatttatacacgataaactaactttagttctctggggtgcagtgctgagaagagcgaggaggatggcccatcagctgaagataattgagggcattcgccaattgccagaaaaaaaaaaggaaaaaaattgaagttgttagatctgtggattccctgagactgctgtttatttgtttgttctctatatatttggctgtc

SEQ ID NO: 44167 - DNA, 2145 bp, Cannabis sativa
aatatgtcaaagaattgaaatatggtttgttctagcagtgtttttgtgttatttctgtgttgcacataatgtttttttttaacacgtggtgcagatcccagggactatgttccagctataggggtcttatacctcatcctaccttacttgggtacttacacctcatgagggttcctatcccaaagatagtccactccacaacaagtcagctttcaagggtcaaacataatctctcacaattgaggggtcgggtgagagtcgaactcttgacccaagcaagggaggaggccagtaaaagccctaccactacaccacacaacaggtggtgtgttgtacataatgttgataatatgtcaaaatggtgcatttagagaaaaccaatgtgaacttaatgactcttctagatgacatacatggagatacattaatacaaaagaatataaaaagcatatagcttttgatttagaaactctaaagaaagaactcaacttagtgaaataacattcagtatatttaattcatcacctcagttcctatcaatgtacgacagttcatggacaagaagattttggagtgttgatgttagtcaagaggacctagttattttcatgtgaaatgtcaactaaagcaaaagccaaggaaaaaaaatcctactcacatggaatagcagaacccccaacacaccgtatgctaatggcaaagcagaatcaacaaatgggaataacagttccatatctggtgcctcaactgcatttggatccgtgaaatatttcaccacctctggtggcagtctattgatctgtttaacaaaaacatatgttatcagcaataattaataaaacgatatctaatagtagcattgagaaatatcagagagtctatacctgagatgcgattcctaattccacagaagagccgattgtaagaaggaacaacaagagagctattacgtattgccaaagtgtcgttggccctggttctgagacttctttctgcagcaagccaaagctaacacgcggccctccacgtgggtctggaccttcagagttaggttcttccaccataaagaggttgtacttgtctccagtggcctcaaccagctgactttggagtttggcaaacacttcttctcggttccctcttaaattcccaataaaaagaacaccctcgccaaggtctccaaaaggctcttctttggtcacccaaaatgtggaatacccgaagagcttatccttaatgagctttacatcagcaggatcaaccttctctggtccaagaagctccatcaatttaaaagagtcaacttggaaattgctgtaagctggtccaaatgatgatggtgttggaggctgaagaaggaatattttgatagattaagggtcagcttttcattccatcgtttttatatttgttgatgtatgcatacaaattcagctatcctctttctctcccaatgtactaattctcattattgatatatgattatatcatagagtaacatgtaggcatatcaggattctcagtgctaatcaattaccttgcaagaaataatcatgggcagtatatggtagattagttacaaccatgcttctcttggggataagaataactaaaagaacaaaaaaacatcacttactataacatggcccatgagaacaacttttaactaataactgaaaaaattaaacaacaataccatgcttcctctagtaataagagaaactaaagtgcatgactaaggggatgaggggtctctgggctcaaacatgagagctccaaccccaccctcgaatgttcaccaagaccctctgaggcggctcacccccacctacaatccgatgtgtcacatgagccccagccaagcactaggtgcatgaatggctagggtggcatcctcacatattcgaactcatgacttctacttcaggaaaccacttataagtaagcactttcacactacaccactttgggagtaagcactttaccactacaccactcactcgtttttcacaaagttaaagcaacataattttgctttaggctgctaataacagtgaaactaggtgcatgaggccattttcctcatatttaagactcccaaagaagccactcaacctcaaagaaacactcatgagtaagcacttt

SEQ ID NO: 44168 - DNA, 1365 bp, Cannabis sativa
aaccgcaactccaacatcttcagatctcactgatatctccgatttcagagtatttctcaagtttgaggagtttcgaaatgaaaaaaattggggggaaagtgtgatcggttcggttaaggtctggatcggtttttatagtgatttttaagtgcggtttcgaaaaagggtcttggaaaatattggcgggatttggcgcgatttaattcccgccatgcgtttgggaatgggatatgatttcctactgcccatctatcctgcaccttcactgttcatgccatgggttgcacgtgcgacgtgtgttgcatgtgagcacattcatttagactaagaatacgacatgtcgtttgttgagacgacaaaaatgtctcagcacatcatggttctctcacattttataactttttttttcttttatgaatatattttttatatgtcatccaatcatatctctttggccaaaaaacaacacttctaaaatcttttagtaattttatatttcatgtcaagcactatggagaagcatcgagttttattgaataagaaaatttttgccatacttgttgagttgaaaattaagcgaaatcaaatattcatagattttaaattcttaaatataaaattgatttgggatagcaacgagtagagcatgggttgggtacgtttattctacgattctatgaaaaaaaatttacacgtatcctaccgtatgaaaaaatttctacccatatcctaccttattatcttattattttttgcgggtagtgttatctgtatttttggatggtgacacgtgtaattccaaaagcggtacaacttactccaagcccaacaacaagcctaatcacaataatggatgacatccattaacaaaatcatgtctcccggatgttggacagatgactcatccaagcaatataaccctccagcatagcgtatatataaaaagatagtaattgacgatcaaacgttaatatgtctttattatccataaaaagtaggatatgatttgacaactaccaacaagatatagcctccacgtcagcatacaatcagtgccccatgggctggacttcaccagatgagctcaaagtcaatatattgtttgtatgtatcatatcagtgggcaagaaccctaccactataaatataagaaaatttatttgtgcaaagggttagaatctcaatcttggagtgctcatgcaaaatctaggactcaaacacttgtgtaaatcataaggtttttcctgtcttatagcaataatattgattcgtggattaaggctcattaatgctctaatcacataaaaactctggtttcattcttcattgattatttttctttagctttattatattttattggtt

SEQ ID NO: 44169 - DNA, 2940 bp, Cannabis sativa
ccaagtgtgtggcaagtatggacacttggcttccgtgtgctataatatgtatgatgatacctatatttgtcctgatccacaccagaaccaatctcaaggaaaacaagggcctgctgcttttgttgccactcctgaagtggtggatagggatgtgtggtatgctggcagtggagccagcaaccacatcacaccagatggcagcaacatgagtcaaaagagcggccatggtggtaagcatgaacttgttgttggtgatggtcatcccttggcaataactctggtattttatctacaaatgttccacacaaaactcttgttttaaaagatgtcttacttgttcctgaaatgaccaaaaatcttataagtatttccaagctaacaattgataatgatattctcattgagtttgactttgattttttctttgtgaaagacaaggtcacaaggaaggtgctgctcacagtgatgcttaaggatggactatatctaaattcctcactgtcaaagcctgtgtgtcaacaaactcagtcagccccatctactcatgcttttgtttgctctgctaatgtcaatagacaatctaagtttctttccaagaaggatgtatggcataggagaataggccatccatcatctagaattcttaaacttgttttgaaattctagcaatgtaccagtttcctttaacaacaatgaaagtttttgtgatgcatgtcaatatggaaagtctcatgccttaccttttaaattgtctaatagtagagcaaccaaaatgcttgaattaattcacacagatttgtggggtcctgccccaatcaactcaaacactaatttcaaattttatatatccattttcttgatgatttcagccgcttcacatggctgtatccattaattcaaaaaaatcagatgcccttaatgtctttaccttactcaaaacaatggttgaaaatgagtttgagacaaaaattaaatttattagaacttattggggaggagagtttcaagcttttgatcagtttttaacagctcatggaattcaatttcaccattcatgtcctcacacttcagctaaaaatggaagagctgaaatgaaacatacgcacataattgaaatgggtttaactttacttgctcaagcaagcatgcaacttaagttttgggttgatgcctttcaaacatttgtgtatctcataaatagattacctacacttgtcctaagcaacaaatctccttttgaaattgtttatcacaagaaacctgattatcatttgcttaggacatttggtgctgcatgttttccttgtttaagaccctatcaaactcacaaatttcaatttcactcactcaaatgtgtcaatctaggttattgtgagttatttaagggttataaatgcttgagcaccactgggagagtctatatttctaggcatgttgttttaaatgaaaaagagtttccatttaaagattgttttctcaacacttatgcctctgaacactctgttattattcaaaataaagcatggtcacaactccctaattttcatttttccactaatctctcatctgcagccactgttcctgctcctcaagcatctcctgttgcagcacctccaccacaagacctttctccactctccagcaattaggtttgatcaccttcacttgataacatgagtcatgctactactgatcatgttcacattgtacctgaaaactcaggtactggtgctcctgattcatcctcctcaacagcaaaatgttcacctgctgtacccctgctccagcacctccagttactcaaacacaagcctcacaccccatgataacccgtgccaaagctggcattttcaagccaaaggcttacacaagcacatctcaacaaccatctgctactggtgaacccacctgtgttgctgatgccctcaagattaagaggtggaaactagccatggatgatgaaatcgtagctctcaaatgaaataaaacctcggttatggttccttactatgcttcatataatcttgtgggctgcaagtgggtttttcgagaaaaactcaatgctgaaggttcatttcagagatgtaaggcaagacttgttgccaaaggtttccaccaaaggcctggtttggactttggtgaaaccttcagcccaattattaaggtatctactgttcggattgtccttaaccgagggtggtccattcagaaactaaacataaacaatgcctttcttaatggctacttggaagaggatgtgtatatgctgcaacctgaaggatttgaggatcaaatcaaaccaaatcatgtgtgcaagcagctcaagtctctctatggcttgaaacaagccccaagggcttggtttgataaactaaaaggcaccttactgagttggaagtttcaaaactcacaagctgatacttctcttttcttttacaaagatgacaaattcatcatttttgtgctcatctatgtagatgacattattgttacagggaacaatgaaggaaaactcaatgagttcatcacacaactcaacaaattattttctctcaagaacttgggagctcttcattacttcttgggtattgaagtaacaagagatgacacagggttatatttgaatcaaaggaagtatgttgaagaactactaaggaaggatgacatggtcaacatcaaaccgtgtcctactcccattgttactggaaaaactatttccttgacagatggagaagcactgcataatccaaccatttacagaagtcttatagctgctcttcaatacctatgccacacaacatctgacattagttttgctgttaataaactaagccaattcctcaaagcacctaccacagtccatttgagtgcaccaaaatgaatactaaggtacttgaaaggcacaataaatcatggcctccatataggatacagtgataa

SEQ ID NO: 44170 - DNA, 1916 bp, Cannabis sativa
aggcttcgcgacggagagagggggctgggtgggttaagccttcgggtccgagagagacgaagagagagagggggctgggtgggttaaggcttcgggtccgatagagggggctaggtggtcctcgtcgtcgtcgtcggaggtggtggaggtgacccgcggtctgtagaggtgttttggccgagagagagacaagtttagatttgttttggttcaaatgtgaggggtattatggggataaagtaaaagtaatcatatattacctatggtataacatttagtattagggaaataattgtagaatttattatgttaaaatttcaaatttcccttgtataattcttttaagtgtacactatagacgtagccattaactgacaaatttactattattatgttggctcttcatcgacacatattattacttgtattgatgttttaacattattactttttctttaaataaggacaaagtttttatattaagtcaataagtcatctatcaataaagttggcaaaataatatcctcttagattttatttctaaaaaaggagatatttttcacaaataaagtcacatgtaataataataataataaaaattgtttctttttaaggtagaaaagaatagtgccaaggcacaaggaatatggcatttttccacctaagatgccatgattctctttctcttatcatattttgtgaaaatattgagactctctctctcttatcgtaataatctatgtaaatttaaaataaaaaaacaaagaactcttaaatcaacacctcatatgtctaacattattttggctaaataaaatttttacccccaaattttaatatgcaccaaattatatttttggaatttttaagatcgttaaacatctcccttaaactattgaaatcggtacatgtcaaagtttgagagacataatttagtagatattaatgtctaaggagcatgatttagtacataaacaattaccgaattagtaaaattgaatgcaattagacaaaaatcattaaatttaacaaaaataattgagagagaatttttaatggccaaaaaaaattcaagaaacataatttaatatatatctaaatttaagagacaaaaatcttaattaacttattttttttttagagaagagagtcaaaatttaaacctacgagaaagagctataagatgttaaactatgcttatgactactagatgtttaaacctacatagtatatgtcttggttggttggacttttaatagttgcctttagctttttgaatttcaaaagcacttctgttgatggttgagtagctaatgagtttcaatttttagctctaaagagttttttctaatccaattttagtaacttttagctataagagcatcttcactgatgtttggagagaatgcttagtgatgtggcatagtgcttggaaagagttgattgttgaatgtgtttggatgtcaaaccaaaaaataacattgatactaaaacttgatattgatgctatactcatgttttttcttttgtttaatttaaaaaattcttaccattaaattattgttagaagtaagagtactgaaaatgatatgaaataaaaataaaataaaatgttatatttttaaataatgtgaaaagtttcagtatttttaaaaaatgtaacttttggagatgttctaatagcttattgagaaaccactgataaattacgcttgtgactattagtccaaaacctttaaaactattctacaatgcactattttaaaagggatgcaccgatgcacctctatttatttgttatctggaagaatattttagtttaaatttttcatagtcgtgtacgttatagttatttattttagatatcttacaaaattttgagactttcagagaaatttagtacgccaaaaataggg

SEQ ID NO: 44171 - DNA, 1611 bp, Cannabis sativa
  modified_base (138)..(142): a, c, t, g, unknown or other
tctggggagtatggtttagtacataaacaatcactgaaacagtaaaattgaatgaaattagacaaaagttcttaaatttaacattctcaaaagttcgggaaatttttaatggccaaaaaaattcagggggcacgattnnnnncatgtcaaaattcaaggggaaaaattactaattagcctacatatttttcataaaagaaatgtaatctgtaatctctttttgcttacttgaaagagaaaaataatcatagtagtaaggccaattccaaccggtcttcataccactaaatatactaatacagtgtgattttacattataaatattccaatggaacactataagtaatgctataaatagatttgtctatagtgtcccaccaaatttaatggttatggtagatcacaaactatatattttttttaataattatataatacttaaaaagaaaaaactaaatatttagtattaaaatatttttattatattaataaaataataaagaatataaaatttagtgtaatttttagtgttgtaattgaaattaaaaaaaaaaattagtgttgaaatagtaattttttattgttaatttaacaccaaatttaaattttatcattggagatgtcaacaataggaaaaaaaaaatagtttcatacctaattataagttttaatagttgaatagatatttattttttaaaaaaaaattcttgaaaagaattatctcaagataaaaaaaaatgtattagagagaaatgaatgatgcatgaaaactctttgttgcagttcccttattcatctctattctgtgtgtattcctttccctgtattatgttgggttgctttggttttaccttttttgggtatggaaatgcaattgcgatccctacctaacctttcctttttatttaaacaaaaacaaaaagcaaataataataaaaattaagagccttgggaacatgcacgatattttctataaaaagtaccaagtgcagtacagtgatatggaaaagaaaaatgctgcagacccatgattacacaacactggagcttttatttattaatatccaaattccaattaaacagagtattaggaatgaagtaatggattcaacaaccaaactcgtggtgagcaccctctcgatatgctttgaaatgtgaaaacaaaaaataatcagaaatacacgagtccactaattaaaaatcgttttttttttttttttctgaattaactttgtttagtattaatactagtaaatcaataaattaaaattttagtaactaaataaatattaagagtatgattaaaaattttatctttaaaaaaaagtaaaaccacacggcatcaactttctatcgaacaagactaggtgacattttaggattgtcatagttttaagggaaaagttaaaaaatacccttttatattaatcaaatttaatctaaacaaaatttaatttgaatatatccatttttatgagtttttacttaaattattctcacacactctagattgtcagagtctgagtagccaactacttctagattgtcagttcgtttgaacatcaatttgtaatccttagtaccctgaagatacctcattactttctttgc

SEQ ID NO: 44172 - DNA, 2005 bp, Cannabis sativa
cctgcagtttcctgcagcgcatcatttgacaaagaaacaatgtcttcaagcagcgcgatccctttgaggacaaactccgatgacttttctgagacgtggattagttgaagcaaggaaaagactaaaccggaagaaacaaacaatgggataatctcatgacatgttgaaaggttgtggagagtggctatggcatcaagcttggtttgaagactaatataatcgtttgataagtcttcattgagaaattcaaccaaaatttggatgaccccagatgaggcaattggtaacttatttgatttgcaagatgataggattaacatgaatgctacagtgagctctattaaagacttgttttggcattgaaagaggttcaataaagctgttacagccccggatttgactatacgcctcttggtcctgttacattggttaaaagattagattttactcaagtgacagaataaatcaatggggtgaagtttggccccaccccattgattgaacatcattttaagaatatattccacaaatgaaatcctaataaaaaaacaaacaaaaatgaaaagttatttctgaccatgtttttttgttcttccttgaatatttgataattggtataaggtttcaaaccaatgtagattgatgacagatagtgtttaaatataaaaagaaaagactaacctttcactgccataggcaagactaagcagagcaaacagagcagcttcaatggcttcataattttggtaatgaagcatagaaatcaaaggtgggattacacctctttcgactagtttatgcctttgattactaccaagattagctatttcattagcagcctcagtttgagcctctatatcaccattgaaaagattttccataacaacttgctccattaaaataaccaaagttgatatctttttcttcctcttgtttcttcaactcactcttttctctcttatgagttttgcttcctttctttgaaactgttattattattagtagtagtgtggattggttgcttgaagaattagtcttctgccctttttagggtacccagccaaatccattgtttcagtcagaagcaacttaccattcttttcatctctttcttttggtttgtttctctttctttctttttttatttttttccggaatatctgatttggaaatacaataacgattccaaagattgaatctttatttttccttttatagaagcaaacatcttcggcttttgataggttagaattgattacataaggcacgatttcattggtttttttaaattgggtaacataatcttcattataaatatatatatatatgtatatatatatatattttttatgtatctaatattaagaagttacacatgtaaataatttgagtgctactcattattaagtttcattatttaatattggttaaatattatttttagtttagttgttttgtaaaaattatcgatttgattttttattttataaaatgataaattggaatacgtatttttccgtacaatttttttaatataattaacttgaaaataatttttaatacgaataaaaaaaatatatctaattttattataataactttaaattgtgtttttattaacttttagaaaaaaaataaattaaaaaaaaaattaaatagtgttgtcaatagtggttaacttttttttttgtctttctttttttagtgtagggcaatgatattttacaattagttaataactggttttgagttcgaatccataacttttttttttttttttatttctcaactctctctcaccactaaactagctttaatttaaaataatatttttttaactttaaatagcccctatgatgaaatgtatttagttatgtcattattgatgctcttaggagtaccctctatttatatcatttatgttcgttatatattttttaatcagatataaaatttgttaatgttggctagtaggcattattatgctgccacatcagttaaaaaa

SEQ ID NO: 44173 - DNA, 898 bp, Cannabis sativa
ttcgagccccacggtgggcgaaatgattttttggagccagtttggttatagtgatctttcccatgagttatttttccagtggaatctagggaatatttctttttcttattcattacttaaaaatatctgggttgtctaatatattttcaccatccagtctacataatttatgaatatgaaaataaaggtataaattaaaacaagtaaagtagatatacaatctcatctagtttttacacttttatcgtggttaacacgatttaataatttatttaacattacacattatattaatataatttcttactgtaacgcagataatggtgattttttttctccccgagattttgtgaatccatgcctaggtggactccacctcctagagattagatcaaagtgaactgtgatgtcaaagtggtcatcgagaccagtgtgctacgaattgtgtctaaagaccatttgggtacactctcatctgtggctaccaagcggtttcaattttcctactaagcccgtaattataaggtccaaaacaataatctatttaacattactcattacatatatataaattttttttactgctatgcatattatggtgctttttttcttccttgagatttcgtgaatcctatgtcttggtggactccacttcctagggattggatcaaagtaaattgtgatgtcaaagtgggtcactgaggccagtgtactacaactgtgtctagagaccatttgggtacgctctcatgggtggctaccaagcagtttcaattttctgaccctcttaaaggtaaagctacaacttgtcttttggcgttggaaacgactctcaatcaagaaaatctttttgttattgtggaaagtaactccgaactatgatcaaagctcttaatgg

SEQ ID NO: 44174 - DNA, 2215 bp, Cannabis sativa
gagcgtcgcctatgcgttgcactactgcattggcctggcgcaaccctccaagcctagtctaaattttgccttagtaaaccccttggcttatatctaatggaaaacaatgcgttcttattttatatttagaataggatatgcacgactagctcatctcatataatgcttataatttgtatggtttttaatagtaagtagtccaaaaagctggaaaaaataatcaaatttattttagtaaatgatggcatttagaagaagaaaattcttgtgtggaaaacaaagccttttgcaagacattttgatcctcccaacgctcctgaagacccgcaccacaaatcctatcacaggtgtggctttaggaaaggagttcatacttttgttgatgcaacttgtaaaggtttagttggtgttggggctgccattatggttgatgtatctagttgtgtgatagagacactcatgcatggtggagtacacaacttcatccccgctagttgcagaaactactgctatgcttcatggacttcctaggctgtttttaaggggttggaaaacccctttttttcatttcttattgcccaaatttggtgcatgaggttcttctcaagcaagcctatgattggaaagaaactctgtttttctcgcatctcttttgggtgttggatttaatttctggtttcgagatctgttggttgccttgcagtttgtactggcaatgtgggatgctaacaatagtatttttgattgtttttttcaaaggaagtgaaaccttttgtttccacaatggactttgttcttcaagtttttgtgttaataaaggttattttaaagagtaaatgaaaaaaaaaaaaaattaaaaattggattacattatgtataattcatgtcacatagaaatcagaggttgtaaagttgtaacttggctattggtacttgttgcatttttaatggaaaatggtttgcaataaatttaatggtgttaatatttaggaaaatttatgtagggaatttatttattttcttgttttttttttctgaaaaaggagtgataatattttttttatgttattaactaacttgtattattttttactattattattttaaattgtgaacaattatgatattacaaattttatgaaagatttataaataacagtaattattttttatttttaattaaaacagaacattttatttgattaatatattatcaataatatgttcttgtttttaaaagtaaaattaataaatgtattttcttaagcatttcataaagttttttgttgtatattataatgtaattatattttttgtatattaattagtatttttttttttatttttgttgtattgttattatatccttaaaaaataaatataacaccacggtatatcacataatctgataagtaattatgagccattcaattaaaggaatgatgttgattttcaaaattggcaaaaacaaatatgaggagcagaaaaaaatggtgctcactgaatagataattgatatatatttttttgtgataaaagatacttttcatatattttaatttaatgtgaattatattgttttaatcaaataattaatctacagtagacaaaaaaaacacgagggttgaatgtatgttatgtgtggttcaagtccctacactatcgtttcttccaaggagtaccttcctccaccaaacactaaaccaaaccataaaaatatttaattattaatataaaaaaacgaacacataaaacaaaagaaaaaaaaaacaacctaagcattaccgaaacttaactaaggtactcatttctttcttctttttctacttttgttgcaacttttctgtttagtttgtctactgcttatggagttttcttcttatttttgttagaagcaatggaatccatgaactcatcatcaaagcgtgtctcactttctgcaacacaagggaccccattagtactaccaactcaaccttttgaaccacgtaagcttgctctttccagctcacttttgtcacctatttcactccctattagagcccctattactgttgatgatgattctgattttgagtccaacaatgataaatttgaggatactagttatggtagtagtgttagtggtaatgacagtggaaatgagtatgaggtttttgtgggtgggagggaagagtttgaaactgcgtcagagtcagtgaggggattagtggct

SEQ ID NO: 44175 - DNA, 3654 bp, Cannabis sativa
aattggtcttggtcaaaaaacttaagtgtcatatttatcataagaacttttaaaatatcatagtaagtgtaatttcctcttcaaaatattataggatgcctataacaaaaaaaatacttcttacactaatataattggacattggacaatgtaaataaataaataatttatttgaatatagatttcactgtcccataacttatttctatacaaaattaaaaaaaactttaataaaattgtaaatttaaaacaaaattaatgtaatttttcactctatgcaaaaaaaaaaaaaaaaaaaaaatagaataacttaatttcaataaaataatatacttatatatttgttataaaaaatattataattaattgttagtgatattataagataataattccagtaaaaaagtaattaggttggtaaataaaattacaataaatgataaattttacaaataaaataaaattatttttataaaattaaagaggtaattagactaatgatacctactctttcaagagaaaataaataaaaaaatttcctttagataaagataataaagtaaagtaataacctaatttaataaaataaaatatttaaatagttatagcataatattttagtaattcttagtctataatagacctcttaacacttagaccaataataagcttagtatgtttgttatccttactatacagaaactttaatcccaatttaactcataaaacgtcttaattagaaagattattgttcacaaagtttttatataattggaagacctttctaatgatacaaagattattatattggaagagatataactattttaccgaaatagtttttttgaaaaaagataaaaaaatttcgagatacaagatgaaaggtctacttttaaggcagaaatattctgaattagtgaaatatttctccataaatgttatagacaacggaataatctttcaaatagtacattaatattaaaaaatggatgaaaaatatgagagttactgcaactgtactgaagatatttttaccaagaatcgacaaaagacgacttatgtacgatagtataatgaagttactttttgacatagaataaatcagaattagttgaatgtttcttcaaaaaaaaatatatatatatcattaaattatatttttaacggtactaaatatcactgaaaataaataagtatagagagaaatatcatatttttaacaattatcataaaaacataaatttttgacactgaaggaatttgaattagtaaaaagtttcaaacataatttatcattaaattatttttaaattggtactagaccactaaagttatattactttaatataaacaatacataaatatataattcaattattacactctagttttgaaattttaaaatttttgaaagtcgaatccagtccaatttgcaacgggtgcaaatatttagctagtgataacgttagcaaaagaccgagaaaagtatgagtagaactattaaaattattttcttttatgaccctgttataactctgacccaaatacatgggacaatgtgggactcaagtagttcaattactaatgattaaaaatacctcctcgtgagttatcacactactctttaatataaagctataatacatatctgttttgtaattttttaactataaccttataaaagcaaaatccctatctacttcaaaaagaaaaaaagaaaaaaatcattctcagtaaagattcaatttttgtattatcgatcttgctgtgaaaatgattaagaagaatttatgtttttgtttagagatcaaatggtaagattttattttaattaagatagaaaaattatatgaagattaatctagttaggctcataataggctcaaggaatataatatgaagattaatattgcacaaaatatccctatctcaaatcttattattattcattcatttccttgtttattttgtttttcttatctaatgttttattttataaacatgataaattaagtcaaattaatttgaaagagagccataataatacaatttctgggtttttaaattcattcaactacttatatttattttcaacttcaaatgaagtataaagaaaagtgatttgatgactattgactatagtgctatatgcctttttttggtcatcctggtaatgaggattaaagctctttccctatcaaaaatgtcaatacaccaaccaaactttccaagattaggtttggcccattaacaaataataagttaattaatttgcttaagcataaaaatcaagatatcatatattggactatctttttaggcctcactttgtttgaagtgctataacaatatatatagaaagatccccttgattggacaacaccattagacactttttatgactccccaccaccataaaccacttctaccttgtatttatttaaccattaacaaggaaaaggccctttcataaaaattatagagctgttttcaattattattattgtttttcttactttgttaatcatcacaggtccatttcatgtgattgtatatataaatataaataattaaatcttttagtttgagtgtaattttttttaataagattacatggtgtaaatcttttccccactcattcaattttttttgacaattttgaatactacatacaaactataagattcttatactcaacctgttttaattgagtcatcaataaactactttaaaggtccccatcaaataaaatgacaccatttacatgatcaaactagccttgagatgagtcatgcataattccttttaaaagattgtggtgagtttcgaacttttgatcccaatgaaaaggatatctataaaaacagttccttctattataccacaaaacacaacgtggttactttaagtgtagtgtaatcttgtggctataaactcgtgaagtgtacaaagttaagtgatctcaaaggcatgaaaattttcgttgctaacttatgctgcaaataatttggaaactataaataaaaacttaaaaaggtagtaacacataattaattatatagatgaatcatgtatatagatgctttttttcagccaatttaggtcgatcttattgtctttgctctattttcttttggcatttactgatgaaaagggaacacaaagagatttattgagatagctatggcctacttattggatcaattaatcaaatcacttgttatatgtttatcactatacactattaatgtctatatatgtgtcattctgtgtgactttatggggactaattcatgtatttatttattactttttttctttcttttaaggtttttgaactatcctcacgtacgtacacttttatttttggaattttatgtttggttatatattatattctcttgttaagaggtaggatatgctattattttgagataactgtgtattactttatatttaattctattgagcatttcttatattttttttttacgcgttgaatatagtcacacatgattattaatgcagcaaactataatcggcggtaaaaatcttctcgaatcaggataactcatcatttaatcaaagaacatgtaattttaccaaaccataaactgcaaaacttttataactacctcactttttctctatttt

SEQ ID NO: 44176 - DNA, 2885 bp, Cannabis sativa
attgtattgtacaaaaaccttattctccgtacatatttatttaatttttcgagtatatacaatatatacacctagactatcttgatattgtagtcaaaatataatacaatatatacattatatatatagttataacgcacggagattggataggaaacataggcgaatagtattaacttgtatatatatccgtatatatattgtcattacaaaccctaatcagaaatagttcgtatcttataagaatatcccgagttctatcctctctttaaacctagtttaactcgtcctgatcaattttcataagtactatatattacctacacaatcatggctacgaattccatgaaacgatcccataaatttaatttaccaaaatggccatagcagtactcagtgccctagacaacgctcgtacacaatggtaccacgtcacagccatagtcatcgccggaatgggcttcttcaccgacgcatacgacctcttctgcatcacagccgtctccaaactcttgggccgtctttactatttcaatcccgattccgaaaagcccggtaagcttcctactaatgttaacaacgccgtcaccggtgtagctctcatcggaaccctatccggtcagctcgtcttcggttggctcggtgacaaactaggccgcaagaaagtttacggaattaccctcatcatgatggtaatctgtgccatttgttccggtatctcgttcggtcatagtcccgaaggagtgatcggaagcctatgctttttccgattttggttagggtttggtattggcggagattacccgctctccgccaccatcatgtcagaatatgccaacaagaaaacccgaggcgctttcatagccgcggttttcgccatgcaaggcgtcgggataatctttgccgggctagtttccatgatagtttcgaaaatattccttgtctacaatgatgctccgccctacaacggtggcgaattcaatcgcgtgttttccacgcaacccaacgccgattacatgtggcgaatagtattgatgttgggagctcttcctgctcttctaacgtactattggcgaatgaagatgccggaaacagctcgttacacggcgttgatcgtcggaaacgggaagcaagccgccatggatatggaacaagttttggatatcgaaatagaagctgatcaagctcaattggctcaactcaaggctgctaataactacaaattattctctatagagttttggaatcgacatggattgaatttgataggaacgagtacaacttggttcttactagacatagctttttacagccaaaacttaacccaaaaagacattttcccagctatgggtttagtcaacaaagacgttgacgtcaacgcccttagagaggtgttcgaaacatcacgtgccatgttcgtgatcgccttggttggaacctttccaggttactggttcacagtcttcttaatcgaaaagcttggtcgtttcatcatacaattagtgggtttcttcatgatgtcggttttcatgttgattataggaatcaaatacgaatatttaaaaaacgacaacaaatggttgtttgccgttttatacggtttgacctttttcttcgctaatttcggtcccaacagcacgactttcgtgctgccggctgagcttttcccgacgcggcttagatccacgtgtcacgcgataagcgcagcgtcaggaaaagctggggctatggtgggtgcttttgggattcagagctatactttgaatggttcgacgagtacaatcaagagggcgatgatgatattggctgcgacgaatatgttgggatttttgttcacttttttagtgactgaaactaaaggaagatcgttggaagagatttcgggtgaggatgggagtgagaatggaactgagaattatcatcataagaccactttcaatgctggaagattgtctatttcgtctagatcgggaagtactggtaatagaacgaattaataataacgacgccgttttacagtgattaaagttaattaaattcctaaagtaccatctttattgagatatatatatacacacagtttacaaatgtattagaataaaataaaagagtattttatatattttttatatacgtacaagtaagtcgattgctacgatgcccttcttctatgtgtatgtgtgagagtttattattaagtaatgtccaacaaataaatataagttaagtacttgagaagtaatagtgaatggattttgtcacaatcattttgatgtactaaatgttttgtttgatgtattctagactcaatttcatttactattttggcattcaaccgttagatcaattttgtaacactctacttaattataaaccacaattagaaccggtttagagcagtaaaaagatgagaaatgttacctatatctatataaaagtgttagtttttaaatacactttattattaaaaaaaatataaatttaaataatttttaaaaattattcttaatattctttttttaattttttttttctcaagatgaattaacataatcattatttataatatatgatatatttatttataaaattaaattttattattgcatattttattagtgataaaaaatttgaacaagtttgaccgagtctttacaattatagtgataaaaaataaaaacatatcacttttttttttatatgaatcaagtatttgtattactcaaaaatgatttatacaacctaatagcattctccaagtaagagaatctaaatatttataaactttacaaggtatcaaaccattctttttcacttttagttgctttttttagccatatacatgtaattcttttttttctctatgtttttcacttttacaatta

SEQ ID NO: 44177 - DNA, 1696 bp, Cannabis sativa
tatgaacctgtgctttagtgggttgtatagtaagtttatttttatctacattatctaagaaaggtaattctcatggaagaaattgcattgtttcttaggaaagagttgccgatccatctgcaaagtcatcacattacacagctcgatccaatgttcctccttacgctccgccgatgattcctgtggataatgatgacggcattcctttcaaaggtaatttcatttatatctgtttagtaataaaaaagacattcattaggagtaaaattacacacaagacggagtaaaattataactctcattgcagaaaccaaactaccaggaacgaataaacattcacgacagaaaagtaataaaagatcagtttaaaccccgtacaattacaataaagcctcccaaaaccattgagttttgtgactttttgcatcagatactctatacagtgattcttccattataatatttcaatatggaatattctaatgtatggtcgaaaatgtttcaccttaaaagcatatgcttccatatgggtggaaggtgctgtgaatcttcaactagcccatgcaaatatctatagtctgtgtgctggttgtgctttcaatatttctagtgtgtaaagacaatatccaattattaaaaaccctatgtttggaacacagattttagggaggaaaaagaatgaattgtaaagaatttcaatttcttgtatttggattattacaaaattaagagaatacaattttagaaaaggctagtgttaaatgtgagactttataaaatttagagcaattttaatatattcaagaagagaaatggttcaaaaaagcctataataaattttaggaaaatgttttcacctcagttttctctattgtttgccctcacaaaatgttactaaaccaaacatagtcaaatagagttgcagatatgattctgggcaatctgtattaagcattttgagataagatttaaaatctgtataacatagccaaatataaatatactaatatatatatatatatatttgcaattatatgcttacattctctctctctctctctctctctctgacagccattggtggtgccactggagagattctagagcaaacctcccaggtgttgaatcaaatatctgcaaatattgctaattttcaggtaaaaattttacatataaatttatttgacttaactgtagtcactaagcttccaatatcaaagttctggtgataaatatctgagtctattttagggttcttgactatctttatagccggtgaaatggtgaatcgatcacgttagtaattatgcattgcttggtggctatgaaatctaatttcctttctttatctttagcttatgttatcttgcctttctttatctttagcttatgttatcttctttctttttgtgttttccagatacaagataacatcaatcttttctgtcaaagtcgggacaacatcttcaagattctaaacgagtatgttgtcattcacaatttcttgttaggttctattttttttttacaagcatatgttcattctgtgtttatttttgtttggctgctttgcatcttgttcgtttatctgccaaattgccattataaagttgaggacaaagtgcaatattagtttgtcactttcttgtacctgttctttcagcaagttaaatttccgtggatctttgcatgtgtt

SEQ ID NO: 44178 - DNA, 4897 bp, Cannabis sativa
  modified_base (2254)..(2262): a, c, t, g, unknown or other
ggtcaccaaataataatattataaatttataataatatgaaaagtgaagaaaaaatcatatcacaatcccaactccaacccacacaataacgagaattgttatattggtgtttgtgtaattaaatattaattgttaaaatttatgaaaataatttttagtaaatatcattaattattagttgggtaccatttaaaaaatattgaacacaatacctatagtaatgttccacattaatatatgttataaatataaaaaaaaatgttatttttagtaataattttttagttacaacataaattttttgtgattaaatgttatttttagtcacaataaatttacttgtaattaaaatatagtatttaaatataagttgttacaataaattgtaatttttgtgactaatatatttagttaaagacttttagttaaaatataagaatgataatttataattaataacaattattttacttttatataattaaaaattttgttgtgattaaatgtaatttttttcataatttattttttcttctcttccaattacagcaacattttccaactagtcaaagtagtcaacaatatgtttatatcagtagtgttaataaatgctattcaaacttctgttatatatatgtcttatcgtttatatatagtagctttcatatatgtacacacgataaagctaattaataatgtagggtgattatatgtttagttttataaaaataatcctatatattataattatttaatactacttataaaatttaaattatttttaatattttacagtattaaaaataaaatttaaataattatgtatatatataaaaaattacttgaataatacaatatttaaactctattttcgatatctgtaaattactattcaaaatttttctaaaaaatttataaataattttaaataactatacacaatcatataaataaattaaattaagaagctaaatctccaaacatataaaaagtgtatcagaacaattttttcaaaagagtgtagattaatttctctaataatatacattaaattatggataacgatttgtaatatttaaatatttgtttacaaatttgaaaacattaattctaattttctaaacttgttgcaaaacaaaaatgtatttttactgatagaatataagaaatctatcaattattcctgtattctatcaacaaatctatatactttaataaattttgtagtttttaatttttttttcaacatctaatctaatttaatttaattataatgatctaaatatataatattcaattatataattggattgaatttgcttaatgtttataagttaatattaaaaaattaatccataatctaattactagttggatttgagttattaaaatttaagtgtattaaattggatgatcattttcaaaatccaaaacctttagaattggattggatcattagatggtaagaaaggttaattaaaggggcaattccataaatatagaaataaagctagtttagataaatatgataaggaaatttaataaaaaaaaatggtacttaaaatgaaaatttaatatatatatatatatatatatgtgattgaattaccataaaaatatcgaaattcccttcatatatatattttttaaaaataaaacaattgaaactacaatgatcgtcggagttgtcactagtgccggaaaaggcaccggagtttgctgtcggcatcgaaaaaattgccagagttgctgccggttccgggaaagtcgctgaagttactgtcgacactgaaaaagtcattgaaattggcattatcaccagaaaaatcaccgaaaaaataccaagaaactgaagaaaccagtttcttagtgatttttctagtttcttgatgaataaaccaatttcttggtgatttttccagtgacaatgtcaattttgatgaatttttggagtttgctgtcggtaacggaaaagttacctaaatagctgcaagtgtcgagaaagtcgtcgaagttgctgcctacgcctaaaaatcgtcataattggtattgtcgtcggaaaaattactggaaaaatttcttgatgaagaaactaatttcttcgtatttttccggcgactatgctaattccgatgaattttctaaaatttgttgtcggcactggaaaaattaccgaagtagttgtcagtattagaaaggtcgtcagaattggcattgtcactagaaaaattaccaagaaagtagtttcttcannnnnnnnncagtttcttggtaattttttagtaatttttccagtaacaatgccaattttgacgaattttccggcgtcggcagcaactccgacaacttttttagcactgacaactactccgatgatttttcagcaccggcagcaaactctagtaacttttccagtaccagtgacaaataaaactatctaaataaataaaaacattaaataagggatttgaaaacctaatttacgtatatatggcatatcaaataccataaaaagacttaaaaataaaataataccatataaattggtaaaagttaaaagtgtcatattttacataagaacttttaaaatctcatagtaagtgtaatttcctcttaattaaaactatagaatttgtagttataattatttagagatatttaatatcaaattgtataagattatacagtgaaaaaaaattggccaatagccacacaattgagcttattggttggcgcagttttttcttaagaattttatttgcacctaaaaatttataaacacaccatattataataatttttattttatataaattatattttttttttcttccaatttatattttttaaaaaatatacttataaaaaaattatattttaaatattataacaaaaaaattaaaaataaaaaattatatttcactcgctttattcaatgtgaacattcatgatgtgggaagtttatgttttttctgctatttttcagaaaaaaaaccatttaattactaatatagtaattagttactattttatatatttatctaattcttaattagttaacattcattgaagaaatttgttaagtgaattatattatattgggtataccctattatatttatacgataattaattagctttcaaaataataaaaaatatatataataattcctatagtaaagctgtagcttgttatattttatggaaactcattattaggttagaaaataatttttaaggttacataaatgtattttaaattataagctaccataatataacttaaaaataattaattaattactaaaatgtatacaaataaattttggaggtaatcaaaatgtatcttaaattatataacataaaaataaagtttctttctttttttttttattttttttttatataagtgtaactaattgatttttttatcaacacgaaaatttacttttaaaaatgaaagatttttttaaaaaaaacgtctggtttagttaacgtggtatgtcaataatagtagtatcgtaattattctaaattagatgaaaaaatatatattattgtaaactaagaaaaacgtaaccaaaatatgccaacttatttaggtattcttggtggtgtgaatgagttaggtgcttttcttctaggtacttatataaagagtaatataagtactcaatgtttgtaaaactatattttttttttaattttattagtacacactccgttttaaatttttttaaaaaatatttaaaagtaactgatactacatgttttccaataatttataatttgagtcttatatatgttctatttaagacaaaaacaacctgtagtaacaaaattgaaataaaattataattttataaatattgagtatttaattatacgctaaaaattaaatattaaatatatattaatataaataaaatttaaaatattaatataatatattttatattatataatgatatcaaaagaaaatatcaactcatcatttaaatatataattccctactctaaggtgataaataattttggtcttatcatgatcccatgctagaactaaaaaaagttagatacatacatatcatatccattcattctgtttggaagacggcaagagaggaagaagataatacctatttccaattatagacacaatacaactcatctcttctatactcttattggatttgatttgatttcgatgtgccttttatttcaaattgatagttatatagatatataattaataaataataattttagaatataatatacactaaagaatgttttggtagattaataatgatggtatttgttatagttatttaagattgttttaaaattttataaaatttcaagtagtttaatatactaaaataacgttcaaatattttgttatatgcgtgactatttttttatacacatgatatgtacaacccttgtcaagctcaaactcactgctcctccaacgtagccttccccttacctacacatggtagcaaactgatgagtcaacagactcagtaagatatgcatgagatatataacattaatgatgtaccgactttatgcttaagtcgtcctgagctcattaatcaagcccaccaaatggttaagaaagttcttatgcactaaagcaccgattctgtgctcatgttggtaggaccgaccactgtaccatatgcactagagtaccaacttcgtactcgtgttggtagggccaattgtactcccgtgagttaccgagtgttgtaccacatgcactagagtaccacttctgtactcgtgttggtaacaccgtaactactctaaaatcctacactgtactaacacccttaaactacatcattactagtgttagtagtccaaacaaataataacatacattca

SEQ ID NO: 44179 - DNA, 1154 bp, Cannabis sativa
acactggcatgaaccaacaaaaaatcttcatgtttttttgtaagttgcttttggatatagaataattaattgtctcaccagattttgaatcttcttgccatatagagagcctcttacaacatgttgtagttttggatatatgatctatttcatgaatttattcatcaacaaggcattcttatgttgactttgaatgtttaatactcacgacagtcgcataaacaaaatacttataagagtagccacaatacaaataattcttagacacttatcagtatgatttttttctagtcatatatgcaaattatttatcttgccttatgtcatttttatttcttttatttacacatatatcaactgtctaattttataactataacacaggtttctacttaaagttgtcaaatgtaatgcatattgtggcattgaggaacaatcaaatctaccgattacaatttttcctccaaatcaattaagtctacttataagttttatgaatttactattttgttattgataatgttcctaattattttgtgaatcaaaactatgaaattaggttatattacatgtttttaaggagttttgaaggtaaagcttgtacattgatagtcctattatggccatattttttttttcttttgttcttaattaactatgttagtcatgttgtatttacataatcatagtactatattttattatatgaatattatattatttttgatgtgatttgattaatagatttgattagttatcctgcatattgtatttatttttggtcgaaattatttggtttcagaacttttttattattattttttaaatggttttgcttcagttcataactgaagcaaaaaacaattagcgtcgttgcactggttttttgcttcggttcataactgaagcaaaaccacatttggcgtcggttctaaactgaagcaaaaaatatgactatttgcgtctgtggttattacgtcggttactctaaccgacacaaatagtttatgtgtcactttaaaaccgaagcaaaatgccacttttgtagtagtgtcaccaagtattctcaacttattaattccgccttgctccactatagatttggaattgaatatagtcttagttatatagaatgctctatatgtaccacgata

SEQ ID NO: 44180 - DNA, 1958 bp, Cannabis sativa
cccgccatcctctgccaaagagcctccctagccttccctccacctccaatttgcggcattccgcttcccctaattcctccgggcccgtatccgccaccaccggtggaggctgtaattgccttcatatctaatgccgtactcacactcttcaatcctatacccttgtacttttcgataagttgctccacagtggctcttagttcaccaagattgtagaaaacctgcaatccagtaccaacttcagcttgatttaaaccctccattcccctgttaagcagtttcatggcctcgctcctcaatttatcaccagtctctctaacccatttgagctcttcatcaacaacatcgatacccacgagatcgtactcattgtagagtgtcaagatctcacaatgtagctgagcagccttagcgagatcaagcttatcaggatcagccgcagacacggagatcagatcacgtaacttcttcgacaagcgaagtgcgcgaattgagtgctggaggagctccgtcgagcggtggatattggagagttgaatcgtttgtgtctgtatggatttaaggggatcagaaagctcagatcggacacggcggagtgaagcctgaagggaggagacggcagatcggacggtggcaagagtatgatcggcatgctggagagaagagagctgagagagaagctcaccatggcgagacagaacctcggagcgaagctgggactcaaggagacggatggcttggtgaagcttctcggcggtggaagctggagagccggaagatagagcggcggaagagaaggaggtggaggagaaatcggatgagagaaaagctgagaagattgggtctgaggcgaaggaatcgagcggagatgcggcagtgagggatgaagaagtggttgtaggattgggtgctgcgtttttgaaggttgagagacgttggagaggagaagaggaagaagtgggagatcgttgcattggtaaggccggagacgccatagctgaggtttttggacaccagaggacggtggtcggtgatagtttcttggaggttttggacagaactgaatatatgactgtccaaatgtggaatgatgcctatcgcaaaatccattcattcgtcaagtgtcgtttaaaggattttcatcaaaaataaagtgtcgtttaaaggaatactggaaacgacagcccgttttgttttcaagataataatataagtacaatttcaagtgcactcccaagaccaagagcttctgtcaaatttttcttttttttttttttattttacaatatatttttatattacttatttaaaatatattaccaaatttttttttttaattttaatatattttatctatttcaaatatataatattaaagtaattataatattataatctatattactatacaaaaataattattaaaatttaaaataattaataaaatatgtttagagatattattcgccgtttggtaatacttttattttttaaattttttaatcacaaaatgaaattaaaatttttattttaaaaaaatttgtttttgaaaaacaaaaatgcattctgtaacaatttttgtttttcaattttaaaaacagaaaacaaaagtgtgttgtgtagagtttatttttatttttattttttattttatttacgtcaggtctaaacctagagtcggattaaattcgccaaatgaagcacaacttgtatttagacccaaactattactgctacaaaatacaatgaggtattaaataaccgttgataaatggtatcacaaaactttttcatgtggtattaaacgatccaaatttcttttttctttttagcaagaaatttagatcacaataacaaccgttgcaatagtgtcattagccccattgttaaaacgacaatgattataatggtgtctaaaaacgacaaaagtttacatgaatacgacataaggtttacca

SEQ ID NO: 44181 - DNA, 1228 bp, Cannabis sativa
gataaattcggggcctggttccaagcttgagcgcttccatcaccggaattgttgcttaagtgttgttccaaccatatgccagatggtggctgaaagtgctgaccagcatagtttccttgagcaagatggttatggttgttatgatcatgcatcacagcacactccatcccggctgcaaccaatctgttccttgaaccattctgaggtcctacttccattattggctgaaccccatttcctatgtattgaggaggaggaaatggtgatggatcagagacagcaaccccgccaggatatcttgcgttcaaaggaggaactgaagaactcgaggttgcagaggcattaaaatgttggtaatttccagggacaacttcaggaagttttctcttgcacggacctcctctagcaccatcaataaagtgattagttcttccatactcatctgtagaaattccattaccgccaccgccgcctactccataattactagaagaagcctgcatttgatcagaggtgccgtgatttagaggaaccggtatcaccccaccaccactagatggtggcataaatgtgtagtagacattggcgggagcagcgacattcagatcaagattacggtgatggtgatgctgcacgccattgtactgtgtcatcccataaaaaactccattgtcgtatcgttcgggagcgtattggttatcgaaatttgagctactccgtgaagctgtctccattgtgtgaacgtttggctgttgaaagtttggtgtatgccctaaattgatggcgggaccaggatagaaatagccgccttgcccttgttgatccatttcaatcatctgattaatgcagagcatattcctctgccccatcaatctatgaagacagaatataaacctgctcttcaaccaaaacacacagcagaatataattaaataactggaatcagagtataaaagacatagagaattctcatatagacatagagatattagtaatcttttaatttactctcaactgtctaacatcaattactatcacataatcatatcttagcataacaattacctaagaaaaatgttaaaaatcataacaagaatcacctagagaaaatcaattaaggacataaatgatgcatttgataggaaaaacaaaacattgcaaagtttacagacagaaaccataagcataaactatccaacaataaacaaccaaactcaatccaataatt

SEQ ID NO: 44182 - DNA, 985 bp, Cannabis sativa
aaaagtaactaaaattataaaatacacatattttagtatttattacatcaattgtaataaaaatgtaagagtattaaacacgaattcaaatccgtataaaaaacagattgatctatttaagaaaaacaagtcagtccgaataaaacacttcacgaatccgaacacgatacgaaattaccgcatttgtgaactttgtcaggtctaccttataaaattattgtagaatacagcatgactcatatttttttatagcacaacacgacttaacccatatttttttatggtaaggcatgacatagtccgtaatttaaaaagcacaaattatagactgaactaacacgacacacacgtaattacaactctagatgagcctatgtttatgaatgggtggacaattgcatatttttcccaccctaaattttcatccttggtccatccttactcatactctaatcatagacttaacaataaatcacaaaattttcgaatatgaaaagttaataaaatataagataacatattgcttaatcaggtgagaagctcatgttcacacagaagatacattattaagctaaagaaaatgaatgagtaaactataatcaatacatatttaattcaaaaaatacataaaaataagatttatttacattttaatgcatagaaaatttctgaaagtgtaaattctgtaaattgttggctttcatataatttggttatgctatttttgggagctaaatttcatcccagcaaaagagtttgaaatacgcaccagcacctgtaccagaaaaacaaaataagtttaaaagaagattggttttgaatttagtcagacccataattttggggtgaccaaatagctaattgatacctacctgtctagagttacacaaatggaaagtacaggggtgtagccaagaccagctaattgttcattctgttttcttgttctcaagctcatacttaatttaaactaacagttctccac

SEQ ID NO: 44183 - DNA, 3431 bp, Cannabis sativa
atttgaatcacctgatttcatccacgaaattctcgctctttggtgccaatagtcctcttcctttgccagtaattcatccaagatcgattcagaattttttagagcctcaaagtggtgaggatctgtgctcaatgaattctgaagagctgatacatgttcatgagactctttaatttcctttttcaaattaccaaagtgcgaaaaatgccactgttgcagactagcagcacaattcgaaatattatttgtgatctgcagtaaagaatcgttggccccagtttgccaattggctagaatgatgtcggcacaatcagcttcccttaaccaaattttttcaaaccgaaatcgtgatcgaaaatgtgtgatctcaggctgattattgagagcagatactgatgcttttagagctctatgatccgagttatagaagtccaaatgtgttaaggaaggaggaataaaagtagtctcccaatgactattgataaatccataatcaagacgctctttaacatgtccattaccttgatgcttattagtccaagttgctctttcaccttgaaaagggattgtactgagttgacaagaatcaatagctgatctaaaagcagtaatctgagcttctactcttcttgggccaccaattttatcttcatgagaaaggacttcattaaaatctcctaaaaccagccaaggagatagtggcgaaatatcaaagcacctccgtaacagagtccaagtaaaatgtctgtgagcaacacaagggtgtccataaaacccagtaaaatgcaatgaaggtccatcttgattttccataaaacaatcaatgtgattttgtgagaaattgttaatggaaagtgtgacatgggccttccaaagtagcataagaccacctccgagtccttgccttggtacttcaatgccattaggaaaatgtaatgtattacgaaatctatctatactaccatattgcagcttagtttccattataaaaagaacacagggagcttgctcttgaacaagcaagcgtagatacctgaatgcactcgggttccccaaaccccgggcattccaactgacgatattcatggctgtgcgcggtgttgcggagcaacaaccgctgagatttcagactgaaactcttctgaatccaaattattaggcctggaaacattcggagttgggcaattaccactcggtgctgaagagtccgattggatatgtagagtatttgaacggcatcgtttaagaacattgcgaagagattctgaatcaagctgtctcttgaattgcttgttaggattaatattttccaaatcgtcatccgagacaagaatagcttttcctttagcatttgtcagaggagagtgtaatgttggtgagatatttgaggttacaactgtgctaaaagtaggcggattcagaggaaaagtagcaggcataaatggtgttcgattgggaggcttgactgattgtggattgggtggataggtggcaatcataggtgtaatgggaagataagaagggaatggtataactggtgttgtatctgaggaaatgagatcagaagttggtgtagtaacaggtaaaggaatggaagagatgggcaaagtaacctgcgtagaggagggcaatgtggaggatgatgaggattcttgaatggtcatatttaatggcaaagggagtgaaacctgagacaacttcggtatagcagcagtgaaggaatttttggcaagtctagtcattaatggccatgctccacctttgaaaaaatctgttctataacgatcatatccagagtcaggaagaggagagccaatcattgctggaccatattcaagagaagggtcatcgccattgtatacttgttcaagaaacttatgacatgaatcaaaaggatgtccaatggtaccacattcaaagcaaaactcgggtaatcgctcataacgaaattccaaccaaaattcatcaagtgaatccttgagtttcaccattttccctctgagtaatggcttagaaatgtcgagtatagcacgaaaccgaagaaaaggaccccatccctcgttcaaagagtcctcatggacatcaacataagtgccaaggagattacctgcccattcggccatggctttagtcttacttaaaaaaggcaatctatggagttgtatccaaaaaggggtaagaatcatagatgcaggtgtaggtgtttgaagggcagtgggggatgatagcacaatgagatgattttggaaatgccatggttccaacaggagtactttcttaagatcaccaaggcaaccaaaagtgacaaggaagagaccggagtgatgatcagtaatagtagccgggtattggcctttccaaaagccacccatcttgattctgaaggttttcctattgatatctctggaggaaacaactctagcatacaacacataattcggacgggagagattagcattgttcaatccagtagggagtgtttgaacttccctttcagagtcggtgaggtgaagtgtatggttcatatcatgcagtagatgttccatgaagttgcaaaggaagatcagatcacatgagtacggggcaaatcgcagaaattcaaaaggaattgatggagggaacagttaaaatttgaaaagggaaggttaacaggttacggtttagcagcagataaaaagtaaaaggggaaaattaaggatagagatgaatgagtttgatagttataacagttaaaaagaaaagggaaactcaactgccacagagctttttaagggcacacatgctcacaataataataattatctataattaactttaaaaaatagaagtatacatttttttaattgaaaaacaactccgtgaggttaatacattttagtgatttttaaaataaattaaataatgttattttcaaaaaaaaaaaaataacaataatttgtgttgtaatagaatcactaattttataacaaactaaagctttgatatgaagtggttacataacactctaaaattatatttccttctatttagtctaatatttttaccaaaataaattaaaaggaaattaaaaaatatatattttttatctatacttttagttaaaataatattttccaaaattttattttaatctacatttttgaaattaaattttaaattataattttagtagatatttaacctttatacgtttaaatctttaaatattagttaataaaacaatctacctaggcatataattatatttacttattattttctttaattttttttagaaaaatatcaggtataaatatactaatgggtgattctaaaatacactccttaaaaggaatgtactgatgcacacacacgtataaaataaaatagtcacgcgtgcagcacactacttaaacgcaattttcggcgtgttaaactttttcgaatttctt

SEQ ID NO: 44184 - DNA, 1860 bp, Cannabis sativa
catcatcactttcagaagtcctgtgtttgccacgtgtatccttccaattcctatcccctctgttctcatcataagagctatcgcctctaaatgtttcagctcttctgaatctcccaccaaattcctctctgttccaatatttaagtctaccaaagtcttctttttctgctgcttcctcagcagcccactctcgttctgctgcatcttctatctcagctatgaatttatctaactcctcctgttccttttcatcagaaggttccgacgattcaaaattattactatcttctagtgataatttatcctcttggaaaacatatggggttccttccttcttatcaattgcattaaaaaatgaagaagctactctctggatgctggcagttgcaacaggatcctcgggatttataccactccggcgaagttgttgctcaatcttctttatgtttagcttctgagattcaagagcctgctcaaatctggccttgaataatgcctgcataaaataccaaacagttcaatgttctttcctaactgcctgcatatcattatattaatcactcttccaaatagcacattataaattattttgacagtttctagcctaagatcctggagcaactaaacttcaacttacaatatagagaatccaatccaatagtttctagcctaagatcctgtttttaattttttaagaggaaggaagagtgtcagtcaaatacaacattggactgtgggaacatttcagtctggggactagaagaacatactccaggtgtttgtatccctaatcttggtaacagaaagtcacagacataaaaatattctcaatagttttccccaatggtaaaaatacataaatatcagactataccagcaaattatttgaatatgaattatagaatctattaaatgtatgcctattccaccaacctttctctttgtgagggtattgataggtatcaaattcttcggttgacgataattcctaccacggaacatgataattgttttgacattatgtatgtttatcacaattccaccacttagtcgggcaagcattgttgccatttccttgattctttctttgggaaagttatcacaacaaacttgtacggtctcatgaaacttccagtgtaaatgcatattttgaacaactcctccaaagactccacgaacaccaacaggaacataatttttatttttgaacccaatctttttgaatgcctgaagttgttcaggtgtaaatagctcaggatcatgtcgagggggtggcaggtctggaagctcatatttctttaacttttgtaagagcaatgctactttcctcttggcctgcatcagttcaatagtataagtgcgtatttgatcgttgtaaaagttaatgagattggattggaagtcaagaaaacaggatcaacacactttattaagaccaataaaagttgtaaatttctatataaaaacagtttaacaacaataacaataagcaaggaataaaatatgtttatgatcagaaaagtaaacatattcaacaaactggccacctccttggtaagtgataggattttaagcacatggaaaagaaaaatgccaaccatcataatttttttcacatctccttttgactttatataagaaaattcagattattagctaagcatagtttttggcatgaaacagcatctatatgccaaagatctccaacttttgaatcattgccttttcttctgaacataataaattgcaccatctggtgcagtattctattaccataaaacagatctaaaatatcaagtcaatcaaccaagagagaggtagctcaaacgatcaagcttgtggtttgctctgagatttgaa

SEQ ID NO: 44185 - DNA, 3589 bp, Cannabis sativa
atttaatctaattttattttaaataattttatttaatttaaattactaatttagataactctaaatataaatttttatagaatatttataaaatattttgattttgaatgctcgttttttattgtattttataaattttaaatatattaatgttgaagcatatttactaaacattgaaaggtatgaacttacatagaagaaaatattgtagaaattttttaaatttgttttgaaaattaagattaagttttattcctatttttatttttttaaaattttttactagatcataaatcaactatttgatatttttttaatgttgatatttgtgaacaatgtgctcttaaaaagttttgtggcagtttatctatttctttctttttaactgtcttaacctcttctaattccttttctttgcttctttatgttatttttttttctttgtaattgttccctccgccatattcaaacttgaattatcactaaaaatgtgttcacaccaccatgaccaacccctctctgataacaagttctgctccttcttaatcgctatactcttcccagtgttctgtttctgctctgtcgatggatcttttgctcgctgacatgaatcaaacattggtgctaacagattctgaacgagaagttcaaactctcccctgaattctctcctactggaggtgctgcaactcaaggttacattctctacatgagagtagtttcgtctcgagacattaatcagacaactttctgtattaaaatgagtggtcattgaaaaggcctataccctgttaccatcactaattaccactcaggcctgctcttaatcacttttggatgtgttggatagataaggaaagttctatttttggaaccttgacacttttagaatcatcacattgttttaagcccaccaattgctcaactaattacaatagtagaatccatacatctatctccgttttgggtgcagcttcatcgactaccatttcttagcaaattaaaggccatggctgaatcggttgggaatattgtaggtacctatattgatgttcatgaagatttactatatgaaggatggggaccttttctacgattttgtgcaacaattgacatctccaagcctcttctaacgggacaaatggtcaggattaaggatttaaaagacgaattctagcttgaatttcgttatgaacgcttgccagagtttttttttttttttgaatgtgatgtcattgtcatcattttaaggcttgtcacaagttccttaaataagtttacaatggtgttgacccctctttatcctatggtaccttaatgattggttccccactccctaaatcaggtcatgaccagcataggacaaacttttttaaagggggagtttggccgcaaatgaaaagattggcaaaaaagtctttctttgcaacaattccaaacctctctacaagaccattaccctacccaactaacttaacaaagggagaatgctctatcaatacccccttacaacctttccatcaatatgttgcttcggttaatacccaattcccaacaacatttacttccactcactactttctcctacagtttgtaccattaaggatttagtggtaattctataaccccccacatttataaccatcatccatgattactacctacccactaatatctctttcaggattgtccctcaaaataaaactcccatgtttaccccttaccaccggtgctattcttgtttgccactaatgtcgctgttattactgagaaagtggcaacctcgttggattttaataataaaaggaaatcaattgtaggattggataatggaaaagaaaactgcaatcctaattaaatgttcaagcaccaagtagattttgaatctctgcgaaatgttctcaaacattgttgatctaatcccattgctcggtctgacccttcagcatcaactgaccactccactgctctaccagtttctaattcttcattggattcgacccaataccagtctgaatttccaggggatgttgatgagcaacgccgtgctttgccatgaattttataagttagaatgcaggaagtttggggaacccgagtttgttcaaacatctacgcttgcttgtttctaagcaagctctctgttttcttttcatcatgaaactaaacttaagactggtagtatagataatttttgacttagattacatttttctaatggtttaaaagtatcgagacatggccaaagaggtgatcttatgctgctttggaagtctcatctcatgtcattgtttctctcaataatttttctattaatcacattgactgctttgttgaaagttgagatggtccttttatgcactttactggtttctatggccacccttatgttaatcaaagatctctcacatggattgtccttcgtagatgttttgatgtggccccgatgtctccttgtcttgttttaggagactttaagaagttatttataatgaggataaacttggtggtccacttcaatatgtaccacaaattgaagcctttcactctgttgtggatgtttgtcatctatcccaactatcctttgaaggtgaacattttatttagactaataaaagccaaggtatggggaatattaaggaaagaattcattaaggctttattaatgaatactagaattttactttcctcacaccaactattcagcatctgggtttttacaaatcggaacacaaagtcattaaagctcacatatcagcccttgcagatcagtttgaagagtaagtctttaagtcacggtttcgttttgaaaaaatgtgattgaaggaggaaacatgtgctgatattatccttaatacctagtgtcgaagtgacttctaatatctctaactatgctatcaaactccaatcatagcatcattcaaaatttagaaatctgaaaagacaaattaaaggatcatatgaacatgttccaactctccaaaactccccaagtactgaccaaaatcattttgaagctctcaataactcaaaaaccatcctagatgaattattggctcaagaagaaaattattagcatcattgatcaagaatttcatggctacaattgggtgattcggatacaaaaaattttcaccaacatgcaaatgctagagatagcaccaatcgcatgcgaaagctcaaagattcaaatggcaacactcaaactagcgttcctacaattattgatgttatcactacttactttcaagatattttcagaagtcaaggtgttgaacaacactctattgatgctatatttgcaacaattccaaccacaatttcaactaaatctaaaatggccattttagcaccctatgttgcaaaagaggcttttagtgcgttgaaatcaacgaacagtgataaaagcccgaatttggacgacatgtcagtcatgttctctacaaactattggcacattgttgactctcttgttaatgaatcagttttggatgttcttaacaatggtgtttatccaacattgtttaataagactttaatcactcttatccctaaagtaaagaaacctaaccatgtcacccaatactgt

SEQ ID NO: 44186 - DNA, 2302 bp, Cannabis sativa
gaaccagggtttaggtagttatgccgccaaaatttcgatttttgtggttatctgttacaaaccgtaaagttcagttagtttagccgccaatatcctatagaaaattaacttttaagatgcaactactaattgcctagacatgtcagcaagacatgtagatatataaatttgtccatgtagttgaatcacacaacaaattaaccttaatttagttactacaacaattggcagatggtgacaaataaaattcataaaaactattcataataactataaatttcatcaacacttcaatgttgaggagtttgagacaatgtttaaacttatgtaaggtcatacttttggtcaacatatcaatagcattgtcacaatgttgacgtttttcgcttgaacttgacctttttggcaacattgtttcttataaaatgatacttgatgtctatatgatttgttctttcatgcatcgtagggtttttaaacagatgtagagcacttcgattatcatagaagatgtccacactttcttccttgaaaccaatctcttgagttaaacccttcaactagagagcttctttgaaggcttcagttattgccatgtactcagcttcaaatttgagagagcaactaccttttgcatagtagatttctaactcattgtgtttctacacacataaaacactaaaccggtgagtgattttcttgtgtctatattggcttcataatcattgccaacatagccatagacttcatcttgttgatctgattttcttccaaaaacaagtcctaaatattttgtcccttagacatctctcaaaatccatttgaaagctttctaatgatcctctccaagatcaatcatgtacttactaacaacacttaaggcatatgctagatttggtatagtacaaaccatagaatagaacaagttgcctacactgttagtataaggtaccttcacctagatgtctttctatatcaacaatctgaattgagattacttgcatcgaataacaagcatcagtgaatctttctagtaatcgttgattgaagatttcataactttaatatattgttgactattttatacttgaccagtgatcttagttcttcatacaatacaagtcacaacctcatatatgaataaaaaaatttctgaaactcagtgttttgcaaaaaaataatttatttctccaataactgtaatttatgttgttgcatcctcccaaaatgagacttagaaaagtcatctctcgaagattcgcacttcttcaaaacttatcttgaacttattttatgaacaacaagagaacaaaaacaaagacataaaaacctaatggtacacgctaggtttttacataagaaaacactcttttcacaaagatagacatgaaaatatgaaactataagagataaaaagtttggttgctctccaggttctatttacaatcaatgaaaccctagaaacaaccacaaacatatttttacagctgttaaaaattgctttccctttttttctctcaatttacgaaaattcagaatattaaaaaaatgtgagtttattggtttcttattttcattttttaattttcaaatttaaaaaaaaaaaggggaaacaattttgttttctgatattgggtggttatttggtatttaatgctaactttctattttgatttagttatccattttattttcctctatttccttgtagtctaacaattgtttaattgtttttttttctctctacgactaattctcttattcttcttgacatgtctttctctctactctcctacttgtgttgtgctctttaaattttctcatcaggcaaagacaaagagcttaggtcgatcacggaggttggacaaaaacatgctttgttttctttcatctttgagttttttagctcttgagatagacaaaaagaaggagtagtaagtttttaatttttagtttgtgtgttcaactttggattatttttccatggagagttgagtttgttttgtgttgttattctttggttaaaagttagcaatattttgttatattttttatgtgtttcttagggggagttctcttcttgaatttgtgttcttgctagttttgttttgcagagttattttttaattgaaaaatattttgattaattaacgtgctaaaaggtgagattgtaaaatctttttttagcaatttagttgtcataatattatttaacttattttgcatatttaatagaaactaaatattgattttattttaggggaattaccccatgtactgttttttaactttttctttttaa

SEQ ID NO: 44187 - DNA, 2549 bp, Cannabis sativa
attcaggacatcaaggatatcaacacataaatcatttcctaggacaacccaatttttatgataaaaatgggcattaagatcatcaataccaggagttttttctcttgaaagttgaaaaagtgaaaatttaacctcctcctgcttagtgtaatgagaatttaaaagtatcaattactcactggtaacccaacttcccatacctaaaaggatgttattaatcataatagagtcaaaaccttgagaagtaaacaaagaggaataaaacttagcaatattttcagaggcaatacacttggctgaggtaactttggtttcattatcaagtatctgacttctaataatgttagatcttttcttagaagatgcatgctaatgaaagaatttagattcttatcaccagcttgcatccaattgaccctagactgttgatgccaatagacttctgccttataaagaaatgcatcaagttgggaactaggatccttggctttttgaaaatcatccctagtcttaggaaccttagactgtaaactttcaagggcatattggatttgaggaatcctagacttaaagtcatacttatgtttactcttggatttagttttattgacgcagaagctttgtcagtctaagaaactctaaagtgtattgggagcatcacaagaaccaaccccattccaagaacctttcactaactcaaaaaaaaatagctatcgtttagccaatgattctcaaataaaaaactctttttgaccattttactcttactgagaatcacatcatcagagaccagtttatgaactctatgatctgaccctaataaatctaaatggaagagagattcgttggaaagagatcaaaccatttttgattaataatgcaccaatcaagtccttcaaaagttttgttatgcttcctgttggtttttatagtactaaattaagtacacaataaaagaactttgtattatctgattatcattgtaccatattccaatagatctcgagatgtgtgtactttaaatcaaaacataaaattattaagtttagagtatacctcttgaagactatcagggtatcctcaaaacttctcgtaagttgtatcccttaatctagatgatgaggaaaccgcaattggactcacactagtgtcttctaaatcgatccaccacacacaaggaatagtgtgggctattagaataaagtgtatatgcttattgctgttgagttttcaacacatgagcaagaacagataagagaaaaaaaaaattccttttctctctttaatttcgaaaattatagttcaaattaagtgtgaagtgttttttgatttctcaaatcagacttctatttatagtagttaattttatttaattaaatcaaattgaattgtttaaataaataaatatctataaccaaattcagttactgatatttatgatagaatctctcaattacttgagagaatatctcaataaccttgaaatatctataaccacttttcaattagatatttacctaattaattaattaacccaaaaagacaaactccgtagggataggaacaatagtaggcgcctacccttatcttttaggacaaggttgtctgaaaaccccaaattatagccactactatatttcgacaactaccaaattgtgctccttttatttaatagaagttctgagatgtagcagtggtaaaagttcggggacaaaaatattatagaggtcatactttcagggtaaaattgctaatcgtttaacgaagtctagcaaaagtttcataatctactaagttttatggttgagagagaatttttaacattgctaataattcgaggatagtggtcatacttccaggataaaattgctaatcatttaactaagtgtaacaaaagactcataacttactaacttttatagttgagagagattagttaatattgctaataatttgaggagtatgattttattaagtgacaaaatttaaggggaaagattcctatttattcattttaatatgtgggttgctcttttgttttgcttttgttgggtctgacagtgtttaaatgtgtgataataatttgtgaatttcttctgtaatgtatgtatgtttgttggatttgtgttgtgtgatgattttgcagattgtttctgcacaataaagatagttgatggatcgtatcagaaacccgggcttccagttaatatgtttgctgagcatttcagaatgcttcctcatgtagcctcatttggagatataattcagctttctaatgttatggtattactttgcttgtactttgtagtagtaattctgctttttttttttttttttttgcttattatcataaatacgtgtagcttataaatacgaaagtgctcgaattgttgataaaaaaaggaaaaaaagaagagtgaacatattttttagatattagaatgtgttgtaaactgttttaaaatatgcatttgttgtactatttgatacactattgatccaatccaatacaatacttgaatcaattagaaaataggtattttattgat

SEQ ID NO: 44188 - DNA, 843 bp, Cannabis sativa
aaaaaaggacaaagataagaaagtttagaaaagagagtataccaggccaaaagcagaaattcaaagcgtccaataccaagaggtactgaacggtgagaggcccattatcaaaatagtgaatcccttcaaaatcccatttcactttcggaatcgaatcaattgtcttcaccactttctctatccctgtatattcaatacacacagaattaaaacgtaaaataataataatgaacaaattaaaatgtcgaaagtgtaatctcacttttctagtattaaaaaaataataataataaacctgaagagtcgacaacgacatgcgaagagtgagtggcgacccaagcagaggtggccctaacatcgtccatggttattaatcctttaaggttgggtgtattggcagacagagttgaaaccctagagaatgagaaagagaaccgggttgggtggcttttacatataatggcttgggtgcgagtgggactgagtgaggagtggtctatctatctgtttgtctgtccttctctttcattcgaagtttcccgcttttgcgtgcttataattatattactgtgacagtttgattccgccaattaagtgaaccatttatttatatatgaatatcataaacacgccgtgtgggcatggaaaatgggaatggaagaacagatggggagaggtggtcacgtgacatgtcagcctcgtctcaaacgttttctttgggtttggattgggcccaaaatataaggaaagagccgcgccttttgactcctgtgctttttttttggctgcatgccttttttttttttactagcattaccattaggcacaataaccattctcgac

SEQ ID NO: 44189 - DNA, 1347 bp, Cannabis sativa
gtttgtgattgggtgatatacgattgtttgaggattggaaaacgggatttaaatcctttggaaaggaagcacttggctatctctgatttggttgattatgacagtggggagtggagtttggaggctctgtctttggctttctctcctcagactatggcaaatatccaattgactaaccccttggatcttgcctcacaagattctcttgtttggaccgcttctccgagcggtaatttctctgtgaaatctgcttactgggctctcaacagcaagtcgttctcctctgacgacattatctataagcaattatgggaaagtagctttcacccgagagttaaactcttcctttggaagctctacagagatgctctgcctactggttctagactgtcgaccatctttggtaatgattggggtccttgttgcctttgcaatgtccctgatgctaattctactgcccatctttttggtgcttgcgacgtagtcaagaaactctggttcctctctaagtggggcattagaattgacgctttcgatctaagtgatgggaggaaagtgctcaactggatcttcaatgcccctttcaccaatgatttcgagcctcggatggttgctgagtttagagtgtatgctgcggtgctattttataaagtttggttcttccgaaatcaagcttttcataatggtggttcaatgcaggtggagatgatgtctaagcttttgaacagggattttgactctttctggaagatggctttggtttctcgggaagatagttctcccatccaatgtcctagtttttctcatgatccttcggatggtttccttgttgaagtggatgctgcttttggtagggaatcggtggctatgggagtggtggtcaaggatcaatttaaacaagtgatagcgatgtatgtgaacaagtgcaagactgttagtgtgattcatggggaactcttggcggctctgaaggggattgaggttgctcatctgttgggtctcaacaagggagtcattctctccgattgccaagcattaaccaaggcagtcaaagcaaaggtggtgcctaactggtccatggcctcttctttctcaaagtttctgcaagcaattgaggggactgagtttgatcttcattggatttcgagaacttctattaggggtgcccacgccctgctaagtggggtttaaataattcgagagttggttttgttagtttatgggaggtgaatccccttgtattcacctctatcctgtcaaactagtttggctctagggagttgcttccctttgtaagcatcagtttcttttctggtttaatgaagtttcctttttagcaaaaaaaaa

SEQ ID NO: 44190 - DNA, 2674 bp, Cannabis sativa
taggccttagacaaaaataaaattgggaccccagtaaaaaagtgaggtggtgagatttgaactctaaacttctaagatgttaaactatccgattaccacatagttgcaacacatatttgatattatgagtattattatttattttattactaactatattttattttatttttcaaaatggggcctgagcggtggggggcctaaggtggccgcctcctccgtctcacctcagggccgaccctgatgtccaatattaaacgaatataatatatacctacatgttatgtttgatgttttcgattacattttgatgcttatgtttaaatttatctttatactataaaaattaaaatagccacaagaaaagtaaaacttaaaatatataactaatccctaatctaaaatatttataaataaatttgtatgtattatatttttatgttcattttcttccatttatttttcaagtctctagcctcttaattctcttttagaggttgtttacaatctttaatgttgtcgaaagaaataataaagcaccttcataattacataatttttttgggaattaatattactttatttttgaaattatattataattttataattcatttttaatatttgacattataagtaatttttttaaatcgatttttagatggcgataactaaggatatcactatatcattcacagaagaatatagtacaaattcaaagttttgttattctgtttcaaacctgaacataatatgagattattttttattgtcttcttatcatttttttttatttgcttttatttattaaagtctagctttcatgggaagatttatgcagatttacaaaatttagagtatagatttataaagatactctaatttcttaaacacacattatttaaaaaagaacttacatgaaataaattatttatgtttgattggattggatgccgaaaggagatacggtgatgacaaatgctttgaatataatagtgactacaagtgaaatacggtgatgacagatgtttagaatataaaagtgactacaagtgaaatacggtaatgacaacaatgactttgaatgtagtggtgactataagtgagatacaaaattaattagaacaataactttgaatataatgatgactataagtgatgagatacgataatgataacagttaaatgtaggtagcgaatgcaagacgataattacattaattttaaaatatatgatcattttgtttttatagatttatcaattgttgtttttttttataagatctctattttatttaaggattcttcaattttcattctctttttctctataacaattgaaaatatatcttttttgcttttttttattagataagaaattgtataattgattttttacaatatttattaatttatctgaattcaaaaagtgaaaatttatattatttgaaaaatatatatataaaatataaaaatttgaaatttgatatttattattaaataaaatatacaaccatgcaaagtgtggtttgtttcataataatatgtcaatgatttcatccttataaataggtattaatttctctagccagctagagtattattgttctcatggattgaaaatgagtgtcgggtagtacttctcttgatcattaaaacaagaaatttaatctatggtacaattacacactaaaaaaaagagtattaagggccaaaattttaagaacaataaaaaattgttccttctaatttattattaggggcaatatccattagttgtctctaataattgtcctaaatttttatttcaatttatatatttggtaggaacaatatttaatatttttaaggaggacaagtcactcttaaaaattggacaataaatattttatttaaaatagttataaaaaaagattgaaaataatagttaataggctagggatgctttttaaaaaatttagggacatttcctaaaatttatttttcatttattatgattaattttttaatcatattcattattaattttcttaataattatactaatgagtaaattacatggttaattcaaaacatactaatccttagattttacaaactttgattatatataaaacaatttataaaaaaaatagtaataaaaacctgaattttatataaatatataagcaagtcatactacttaacaatagtgaagaccacattaattcttattcttctttaagagagtttcataagaagattaaacaagtggataataccaatcatgaactcttaattattctaagaatgttgttgttgtctctttacacctattaattctttcaaatcacattatggtgcaagccttgaatgctttgcttttctttttcttcggtttgggtagttcaaggacaactctcattgcagcatcaaagactcctttcacattctgtgtatatacacaagatgagtttattaagacaacaaagccaatttcatcagaaagaagggaaaaaaggttttatgttttcaaacctgttgtgttttcgagctgcattcgatataagcagatgctccaataagctttcgcaattcctctcccttaatgtgatagacatgttaatataaaaaagaaaaaaaaaagtccaataattaactaaactattatgtggtatttggttggaaggaatga

SEQ ID NO: 44191 - DNA, 2194 bp, Cannabis sativa
taattttttttttctcaaactttaatatgtactaaattatgttctttgaatttttttagctgttaaactattaagattgttagatttaaggactttgtctaattttaagaaaaaaaattttatatggacgaaagtttatgggcatgatttagtacatatcaaataggggcataatttagtagatatcaaaatttggcgagcatgatttaatacataaacaatcattaaaagagtaaaattgaatgaaattagacaaaattccttaaatctaataatctcaatagttcaggcaaaatttttaacgggtaaaaaaattcagggatatgatttgctacaatacctaattattctttttcttatatatatttctatataaataatatacttttttaaaaaatatatataatattctaaaatttgaaattgtttttaattttataaatagggatctaaaccatggaggtatactggggaggaagagaacatggatagagaagatataaaaatgttagtgaagaaatggtgggacatatacaacgacgagtcgttggactacaagaaaacgacaacacctggagtagaattacctccaaatggaacaataacgacagagcaagtgaatcttcaagcctttttggaagcactatcaggggctggtggtgtgccacgtgttaaagctccatccgcggcttagtcccactgccacacgtgtcaccttgtggatttgccaaaccaaaataacatattatctcggcttttattattttttttttttaatttttattatttgtcttcctattattatttggaagacatatacatatcatatattttcatttttatattgtatgtttaataattatttagatgtgtgagtgtgagtgtgagtgaagaaagaaaccctataagactaatttggggtttattttctttttatattgtactgatttatatattataatgtattaatgaaaatacgaaaagtatataaatatttttagaactgtcggtatgatatttttcctttagatttttaccatcttctctctctcttatatatctaaactaagcaacttgtcatattatacattatcgtaacaaaaccaagtattttgtcgtatcccatgtataatataggtcagctaatgtgtcctttaaatttatctctgaaccaattttgtctcactctcacaacttagagcagctctaatgttaaaatttatatttagtgttaaatcaatactaaaattgtactattttaatactattttttttttttacattttaaccacaacataaaaaattacactaaaaaatatattatttgttattatattattttattaatataatataaattttgattatatataaattattttattatttgttttattgtatataaagtagttattaaattattaaaaagtaaaaactttatactcccacaaatatagtcatttttagtgtttagttcattggttggagtaattttatgaaaaaactccactatatttaaaattttacagtaccatgagaagccctaataatcgaattaatataattataaaatgtattttattttatttgaactattgaaattaattaacctaacgaaatcactaatattaaagttttaatttagtgtcacgagaaaataataaacgtacggttaaattaatatcactaactatgaagatttttagtctcttggttagatgtaatgtaactaaacagaattggttatgacagttagtttaattagtttgtaagctcggattccttttctcttttcaagccactttgttgtcaaacacaagctttgtggtaaactctttcaataggtgaccatctaaaaagaatttaaaatgaaaacacactttgagtgatgagggtttgtaaaggatttgacatgtgtttgattgattgcctcattggtgacttgaaattgaacctcctttcatctttgtcttcttcaattagcttgaacattacttttagcattttatttatcttaatttgagtttactgaattgttattttaaatcaatgttcttgataggtattgttaattcaccacaatcacataacatgtataaattattgttagagattttttctattttaggttaatattactttaaataaacatttatactactaaaaacaaaaataaacatttatattgtttatt

SEQ ID NO: 44192 - DNA, 3274 bp, Cannabis sativa
  modified_base (1470)..(1477): a, c, t, g, unknown or other
  modified_base (1590)..(1598): a, c, t, g, unknown or other
atgttagatgtattggatttttaattagacaccacatccactatccgatccgatccaattggatatttaaaaataacatccaatctgatccgatcacaattggatgtccaatatttggaggtcgattgtaattagatcggtcggttctcattggattggatagatttttgcacacccttatgtgttgctattacttatagtgtatatatattctattaggataatattacctgaagtgaaatgaacctatacttcattatatttttaattttttgattatgcatatttttagttgtgtaattattatttttttatgttatttaagaaacaacatcattgttactaaaaatgtttaacttttttttcctacaatatgtattgacatcataatagtaattcttgaataaatataaatatttttgttattttattgtttaaaatgaaaacaataatagaaaaaaaaaaaaaaaaattagatacacagattaggtaaaaaacatgatgatcttctatacataattctttttacgatatatatgcaatagtttaaatttgaattgtaatgttaaaaacattattttatattgtcacatttaatataagataaaaaaaaaaaaaaatatgtatagtgagttttaatttaaattgtaatgtctttttaaaaaaaaaaaaattaacactttctgtcatatagtcacatttaatataatataaatattataagttgtaggtttaaatttaaatttcaatgttttaaaaattaatactttcaattacataaacatatttaatataataatgaaatagcgataagttttaaaagagtaataaccaaaggataattttagataaacatttttttacacaaccacataatataatagagataaatagtcacatttaataaaataaaaataatttataaaacaataataaaaatatattttaaatatgtgcagtagttttaaatttgaatcacaatgtttaaaaaaataataacattttctgttacataaccacatttactctgtccccaacattgttctctgacgatgtcccctgggcaaaaggggccatcattctctttttttcttcaatcgttccaatcagaataagtgggttggtttgttttgtccttctatatacgcaattttctgtcttcgttcgtgattatgttgggtgaaaggtagttgtagaggagtagcttacacatggagagtaattaaatgagagttacataagtaataaaagttattattattagctcctatctttctagagacatatagaaaatcgctcaatccttgagtttattttccaatagggtttttcctacaactcactataagaaattttatttatagtcacaacaaaacttgtgactaaaagtgaaaaaattgtgagtaattataaattatcattactatgttgtgactacaagatctttggctaaaagtattagtcacaaannnnnnnntttgttgtgactaaatgtagttttagtgacaatatatacttgttgtgactaagactaaattaatgacaatttgtatctaaatattatgctttagtcacaagtaacattttgtnnnnnnnnnaagtcacatttagtcacaaaaaaattatgttgtaactaaataattgtcactaaaagtagtatttttttgtagtggctatatatatttaaatttttttaacaaatatataaataattagttcatgtagtggtaacaacaatatagtttatactatcgtaattaaagtatgaccatgtcaaagatatcttctataggataccagtggtgcataacactaaagcgtcttaggaggagggtactaatgtatatattttatttgtacaggtaacctttttaggttagatcaaagtgaaaaggtggtttaaaaattttattgtttatcttaagggcatgcttaaataatctatgtgtcgcaacattaataaaacgattaacatgagagagagatattctcaaaaaattagacaataaacttatatcaaaaaaaaaaaaaaatcgcaactcattctaatacacaatagacaacttcaaagccaaatttaaggacagcaaattaatctgaatagatcactgtgataagtaaatcttggacccatctcattcttaccaaaagagctaaaacttcttctgaaagacatatgctacacatgaaaccatccataatatattaattcaatcaattatcgtcttttatatatttattatttttaaatgaatatattcaaagttgaattaatatgtaataggctttttttaaattgttccttttattgattaatgtgaagcagtttgggaaggtttatgcttttctaacaaatttatttttaagactgctcgttttgaaactacagaaggttattgagtaaaggttgagcaatatcatatatgaaagggatatatatacatatttatatatattacaaacaaaatccttgtaggccatacacgcttggacccaaatatcttgtatacagtgatacgttcacatgaaccaattggtttaccgctctacttttctagttgaccatctcccgtacgcggtttcttttatatatttagaccaattaatttaattcttcaacaaattctatatgtaatattaaattgactttcatatatataggttgactaatagtaataaggtatattaagtgtataatttttggatggctatatacctccaaagtacgtatctaaagagccaagacaaacttattaactaaaacaatatttggttattggtgtggttcatgtaatttattggtataagtaaatatttgctctctagctgagctttatgcttcacttcatataaataaagtactataaaattaaaagagaaagtgatgaaaaaagaatttttgatgagttgaatattcagtttgtaagtacatgcgcattaacacgtggaaggcagggattgatcgtgttacatattaattacctctgtcactgtctaaagacatgattataattcatgggaggttcaaacaaaaaaacatataagcacgtgattgaaattttaaacaatgtgttttttttttcatataaattgaagaattagaatttattatatttatattataatatggccaacctcattaagccaacagaacatttcatcaccctttgttgttgcatcactcattttcattcttggtatcctacctaattctcatcataagtgacttgtgccaatctttgtcttaataatttgtcttcttctaaattaattg

SEQ ID NO: 44193 - DNA, 1413 bp, Cannabis sativa
ttagtgttgtagtatgtgccctccttcatgtgaagccttgtgcaaaattcttcacacgggcctcgacactacatggtagtgttgcagcatttaaagcttgatttttggcagcaagcttcctagtgcgacgactgataatattttagtcataactctttaaatattgctcaaaattatattagtcaaaatgttttaaaaagttaaaaaagagataaaacttctatgttttgactttctccaaaatctgatcaaaacataagtcaaattttttaaattttagctttattttcttataaaattttctttattttgtagatcaccatttctgaaatttgaccaacttatacaattcaagtgtgaaacatgaaaactcatacaaattagatctaaccaatttttgagactgaagaatggtttgaataatgcttgttatgaaattttctcactaactccaaccaaaactcgtttctcaagatgaacatcactgcagtataacctcaaagtattaaaaagcaggtcaaatagttaacaacaacaaaattgggttatgctttcttcacttgtgatacataatctttgttacatagtttaggttgatgtttcttaatatggtaatcttactaggttttcttgctgccaaaactttatagtcttcagaaaacattatacaatacaatgatttggcttcttagttcaaatgacagatgcctagagtaaaaaagggtccgtctaaaactgcacattaatctaccttagctaaggaattacacagataatcctttcataagcttactttaccagggtcttgggttgtgggtgactttgtcaggtggaaactggatgagtttcctacctttgaacttgacttgttagccttcaccaatggaacaagggactgcacgacatctgccatcagcggtctgtaatctgcctctggttgtacacacattgcagcgattgccgccacctggataacctccttcatcgagtattgaccctcaagtgcgggatccataatctgtacaaccttctccctgtctgtaagtcggggcaaagcctatcacataagtgaaaaaaacaacagagaaataggattagaaatgggacttcatgggtatttaaaggactgaaaccaaaaacaagaagcggataatctgctaagtaactcagctaacaattttcctaagaactgaagaggagagctagaaaaacttacccaagtaacaagaacaccttctccagaaggtcttttcatatcaactggaactctgcctgttagtaactccaaaaggacaaccccgtaactatacacatctgacttggttgtaagatgccccgttaatgcatacctaaatgacagcaggaattgcaatacaacttatatgggatgcacaactaaaataaacacttgag

SEQ ID NO: 44194 - DNA, 1598 bp, Cannabis sativa
  modified_base (525)..(527): a, c, t, g, unknown or other
tataatggattgtagagtaaattatttcttaaatgggcaagtaagcggcaacaaagttaagtaactaatatactgaagcacgggttcccttaccttgatggccaacaaacaaaataaaaactaaattcaaaagcaacaaactcacaaatctaagatgaaaaccaaagtgttgggtcttgcagctctccatcctgtccaaccaagcccccgcaataatacatcaagctacccaacttcctctctcaaacgctaataaacacaatgctggacacacacaaacttttaccagcaatccctcccccaaccccaagagagagcaccacgaccaccaaataatgagccaacgagccaatagtatactgtagcaagaccaaggccatacggtactacatgaggtttcaatcccttttattttgcattcttattaaaaaaatttatacacgtaccatttggtaataattatgttttttaattttttaatcacaaaaattaagtagaaattttgtttttaaaattttgtttttnnnaaacaaaaatgcgttctataaccatttttgttttttaattttaaaaacagtaaataaaagtgtattctgtgaaatttatttttattttattttttgattttatttaagtcgagtctgggtccggggtcgggtccggatcgagtgctaggttcagcactagggctagggccgagtttgggtctgagtcaaagtttaaaacattgataaaaaaaattgttttcacttttttaattttaaaaattaaaaactaattaaaaaagtattaacaaacgacatcataaattatagtttaattgaacattgctatattaaaacatacttttaaatttattattaatctatcgaaacacatcatatttaagtgcatgcatgattaagattacagtgtgcaatttaaatgtacaaattaaaagcgtaatttaatttatcttgatgaggattatttgtacatgcgggcacgacatgcaggacaatacaccaagtcttcttcatagtcaaacaccaagtggttattgcagacaacacacagaggatgagaaccctgtaaacgacaaagaaaaaactatgttggtgattaatgaattgtacttctttctacgcattaaatcgtatactaattaataagagaaatactaaagggtaccagtagtgtttagcaccctcttatgtgttaataacgctattggtccaactaagtatcggatttcatatatataatataatagcttttagggagtatcgctagttaattgcaacgcgacatgtcgcaaaggtactagacaccactagtgtctaatagcaatgctcaattaataataagaatgatcaactagaattaatgagtgagaaaaagtgatgaccatgttgtattgtgaaaaaatggccgaagaggagcgagaaaactgaaaagcagtggctctttgttgttgcttcatgttcatgctgcttgatctcatcatgaattcattgttaggagaagaagaaggtgctgggatgttataattaatcggaggagccaggggaaccttcctcggttcactacttcctcttcctctactacgcctatatata

SEQ ID NO: 44195 - DNA, 2728 bp, Cannabis sativa
gctaactaggggtgttcataaaaatggaaaaacagaaaccgaccatcaaacttcatcaccaaatttggcagtcggttttagttacggtttttttgacatggggatggtttttgaaataaaaaaataattaaacaaaaaaactgacaaaaccgtccaaaaccgttcatactgaaaactactaaaaaccgtacagttggttttatacggttataatttctaaacggtcggttacggttttcgtaaaataaaaaccgtaatcgaccgatcggttataaaattgtaaaaactgaccgattttcactaacattttttcagtttagcctgttatatggtccacagtttcaaatatatgctttagtggcaaaatttaacattctggttttgcctgctagattttggaagacaagcctgatttatcgcggtggtcactgaagtataaagcttttggccgtgatattgaattctcgtggcttgctaaaaatatgcaggcaaggatcatatccgcccctccctttatttttttttctttataattttctcctggttgtctcgttctgaaattttctttcctatttgttgttattaatataactatggtatgtattactttcttatagcccattccaaatcagaaaatccactggagatctatggagggtcttcctaacaggtagtagcatacttcgctctttaatatcattttttctcaagcataattgtattgatacaaaggtttatgaactacagcagtagtgtgtaaacaattgggagaacacctttgcaccttttaatagctagggtacagtattgatttatttgatcttagagctaagagtccatttccattcttgtagtaagatatgggaaataaaaaatgagtactgttgtaaactaattatactgattggccccccaaagagtcctggatttattaaattatcagtaaccatatctttcctgcatttgtatttgtgtgtgttattgctttatatgcttatctcagttaattagatgctaatgattgttcattttactgtctataattagatgcttaaaatcttgataaactgatttctttcattgcagaggtgctgttcgatttttcccaaaggatccttcatcatgcacagtagaagtaaggctggtttatacaatttccaaaaaaaatttattgttttgtattaataaagtatatgatgccgttcttatatttttttttggtcccttcctcttatctcttaatatttccctttcagttgacagtgtcctacgaagtacctcaaattttgactccagtagcatcagtaagcaatattctaactctattttttaatgtgctcaaatatttcttttttgggatttctcaaatggacattataggaggacaatttaccatatgatgaatttgtatgtactcgtggagtttcctgcactaacgcctttttcttgtttttcggtttcaatattattcaggctctgcaaccatttcttgaaagcttacttcaacgcggtttagaacggtttgcaacatttgtgaaaagctatgtgtgaacatatacggaaataataataatttcaaattttctattattcaaatctatatatctctatataagtcattctttagcttttttaatttatctgtagttattaattaattaagaaaaaactatccgtaataataaatcaatacaacaatgaaggtttcatttttttttttatagtaataggattagagttttagaactcgatttcaagttcaaatatgattagatattgttgacgtgaactaataaaatcgcaaaacattagatggacaccaggaatttatagaagttcacccccatatcgcgatggtaatggggttacgtctttgattagatacgacacactagagttatgttctcaagagtgtgcggctaaaagtacatcaaaagatttctagatgaaatcttaatcgagatttatgaatgtaaggctcatgggagacttgattttcataaatttgatctaaattaaaagttgtaaagtttttgggaacaataaaccaataattcgtggaaaaaggtgtgtatcaatggtgttttgaggtctggtgttgcctgagtattgtggactcaatgaaccagatgaaggaagcaatgtggtgttcttggttgcctttaagtgattttctaggagaaggtttcagagtagaagatccaaaagagagaaaaatgtctcaaaaagaagaagggaaagagaagatccttttcttagcctcctacttgatgtatatataggctagagagtttgttagtgatccctcatacatcgggatatctcattaacaaaatctcgtctaccactcttttttatgaataaaatattacaggaaatatcaataacaatctctttctatctaggtaaatattccacaaatatttaacaattagtaattttcggttgagggtgcataaatttgaaatggagtgctgaacacatgcgttttggactgccaatgctcgcgcacaacgcgacataggctatggcggtgtgccccaccaaccctcgcttagctgcatttcccaattcttgagtaaaatgcacaagctttccttgtaagctaattttggacctgataacttcaaaattgagtcatagctatcatacacactttgatccgtctcaaaattatctttcccacgcaaattgaaccatgtcatttggataaaaattgagagagtta

SEQ ID NO: 44196 - DNA, 1691 bp, Cannabis sativa
ttattattgtgacatttctaaccactccgtcgagcttccacggtcatcgggcccgaaaacattttattccaaaaatctctgtaataaaatctcttttattctaataaaatctctgtaattaataaactacgctttaattaatcatttactaaagtcacactaatcaaccccagtaagatcataattttacctcattactaaataattacatttttaataaaacatgtccaattaaatgccatattattttttgagatattacaaccaagtagaaatgtgagtcaaaatctggaaatgatctagaaatccttgaagcttcgaagaaaacttggagatttgatttttttttttgaagtttttgagtctcaaaatggctaaaagattgcaaatgaagtccaaaaccccttttataggttatagagagggtattttcgtaattccacatctcaaattttgggttatccccccaaaaggtacgatcagtacgcataggggagtacaaccgtgaacatgcgacccaagatgcattttttaaggtgaagcattaaatgttgaggtatgaaaagacagtttgttcacctatcgaggacgtgtcaccttatttacctagagtgtgggctgagcaagtccatgtaccaacaaaaagttctcacacagacttgaggggtaaatcttacgtggcatccttctgggtgacacgtggagaatattttaagacttggacaggtggcaccatcctcgggatgccttctagagtgaattattccttaaaaatagtttgtttgaagagtaagctggaatatccaaacaggataaataacactgtccaacaagtgtcgatctcgcagctagctcgcttgtaccgctaggataaatgcgactgaaatctttagagatacttttcttatttattttattaattgaattcatattttaatgggaattccagacgttattattgtaaaataggaaacattcctattttcccttattatttctcattttttttgaaacctaattgatgtatttcttccctataagtagtgaattcatttcattattcagggattcgaattatattattcaagagagtttttatgctgtaaaattgtaaactttcgagagagatcaagaaactcaatcacttctcttctcacaagtaatacaagtaaaatgagagtaggctattaccactatcacgaggccgaatctctataaatctctatgttcttattgcttaattattattgatttttatcattttagttgactcagcatcattgactaaaagagatgtcaataatataaaagtaaatatatgttctcatagttaattagatatataataaattttattttttttacatataatataattaattaatgtaaattatataaatttttgcatataatataataaattaatataaagtatataaatttgtaaattttcttatatttaaggaataattacatagagaaaaattatatttttactttcaaagatttttttttgtatttatacggtgttttataaaaacaataggaaaacaataagaaaactacataaaagtagcagaataataatattcaaagaatatcaaaataacaacaaaaaaaaataacgtataaataataacaaatcaacaacaaatttacaagagtgcaacattaaaatgcataaaagacct

SEQ ID NO: 44197 - DNA, 2437 bp, Cannabis sativa
  modified_base (906)..(908): a, c, t, g, unknown or other
gttgagaatcatggggttccattttaaaactaattggcaatgagtggagtagcccatgttcttatatatgtgggacaatgttctccaatactaatttattttctttttcatctcaaaaaagtaaaattttaagataataattaacaatatatcattttttttttaaagaaatatacatgtttataatttttggtactatgggagtatatgacggacacactcataatggtgtgggggctatagcccagtaaaagaaaaatttaaatatttttctttttattaataattatagtacaaaaatttttaaaaaaaataccacaaaaataaataaattaaataaaataaacctaatttttttttaataacaattaaactcccacataataaaatttttgtatccgtcactaaatatatttaatggtaagtttcattttattttatcagtttttgttttgtatgaaagaaaattttttcggtgaaaaagaatttaaatcaaggtgttgtaagagtattatttagaaacaatgtgtcattaacttatacgttagacagagaatgtggtaggctttttggacacaggatccgagtccaatttcagattgcacagtaatataatagaattatttcacaaatacacaaaataaacaaaaaaaaaaaaaattacaaaaatatgattttaattttaaacatttttataatttttttgattttattttcagaaaatatagtctttttatgttgtactattattaattttttgttgattttttattatctgcatattattttttgttgttacttagatgttattttcatattatgtagttttcttgttgtttttgtgttatttttatggaaaaccgtaaaaaggtaaaaaaaattttataaacgtaaaaatgtaatttnnntacaaaaaaaaaaaaaatagtatttcgtgtaattatcctaatataatgttataccattaattaaaatagtgtggttagccaaagagtcatatatataagtttttgcagataaagcaattttttgtgttaaataaagattaaagagaatgcacaaattagttgcttctgcgtgatatttaagcagaagaatcaagaaaaagaatagtaaaagaatagtttatagtgcatgtgatttgtcaaacgactccaaagattcgtatagtatattagtaagtgcttcgcgataagtttaataaataattatgaaaggtgaatttggccactttgttcttataagttgatttgtgtatctttttggaaaaatatatttgattctcttttgatggaaaacgtagctgctaaaacaaatcttcgcagccttaaagcttggaaagaccattcagtttgtttgctattagacatcactaaaatttgttagacatttcatatgaatagatgaaacatatgaactgtgtatatgtaatgtggaattaaacgaacatgtacactatataattataggatcgaaatatttccagctattaattctttgagcttcaatctcacacgagctttggatcggcaaaagaaaaggaaattgattagtgtcagtaattgggtttccaagctctctctaccctctttaaatggatttattgtattttatagaatgagcaaattcgaagactgagaccctatatttatataggtgaaaccttccatcaaggtctcttccacaattaattgttagaatattttgacaattaattctaaaaaataaattagataacagaaatatttggaaattgaatctgaccataattagaacattttaattaattatattttataaatcaaataaaatatttgatttgttactatataaaaattattttaatattctctaacttggtcaatatttaaattattttaacacttaaaacccaacgtttctcattacataataaacatataaattatagcgatatgtccacattatatgtcgagtattatcttccatgtattacgatatattcattatataacaattgtacttaatgtgacaatgtactttagcaaaccatccataaaccttatgtttattctagacctcttacgataattttctcagataaaattaaggtgcacataaatatgagaaaatatcgaaattagagtttcatttaataagtttagttgtacaaccaataaactgtataaggggtaactgaatcccatatttactttatgatccttgaatttgtgttacggcatgaatttagtcaaggatatacgataatcaaattcagtttgcatacttaatgaccacttatcacgtctctttatgactaaacactaaatatcgatatgctagcttcgaccaataatcttatagttcttcgctataattattgtagctgaatttttcgcaaaattttcttaatggcctaaaatataattctgaactctaggcctactatgaaactcta

SEQ ID NO: 44198 - DNA, 2452 bp, Cannabis sativa
tttgttatgtgatgtttccaaactgcaggtcttataatgttaccctcaatataggccaaccaccaaggccttattttctggatcctgacacaggaagtgatcttacatggctccaatgtgacgctccttgtgtccactgtactgaggtaaatcagatccaaaactcttcctgtaatgccctctaaagtttttcaaacaagtttcttgaatgattgtgattatacatcagattcccaagccaaatccttttttagctctcttacaaatttgcaatgttaggtttgtgtttgttttcatgtcaacagtttcgattatcgaaaaagtcatgttatactcaagtcaaaacaattttatacatttaaattgtagttgattataggtattaaggaaatcctaattggaattggttgttttgcttcacagtcacctcatccgctttatcaacccagcaatgatttagtggcctgtagggatcctctctgcctagccttgcactcacccggcactcccagatgtgacaatcctgagcaatgtgattatgaggttgagtatgcagatggaggttcatcactcggtgtactcctcaaggattctttttctctcaactttacaaatggagtccaactaaaacctcgtttggcccttgggtttgtgactttgtctccatgatttctcactttgatcatcctcataaattagtccattcaaacaaatttccataccgtgcttctcaatgtgaaacttaaatgcaaatatcattattgcagaatctttaaactttctgattagcaatggtgcaaaaacagataaatttatatcttttagagtacgttatgagaagatagtaatatttttgttgaatgttatttctctagcaaacctaaggaagagttgttcagagggaatatccttaacaaggccaggcattcagttattgccatgtttgattttctattcactggttcttatgttctgatgaatgatgatctgctgtcttcagatgtggatacgatcaacttcctggttcgtctcgtcaccctgtagacggagtacttggcattggtaggggtcaaaccagcgtcgtgtcccaacttaacaatcaaggtctggtgcgaaatgttgttggccattgtttaagcgggcgaggcggagggtttctcttctttggggacgacctttatgattcttcacgtgtgacttggacaccaatgtcacgtgaatacacgtaaatcaacccttcgaattctcattttttattttaagcaggaaatctttcttttgatccacattttaaatttgactactgtttaccaattcttcttcttttatgccagcaaacattactcacctggatacgcagaactcaaatttgatggaaaatcaactggtgttaaggatttactcacaatttttgacagtggtagctcctacacttatgtcaactctcaggcatatcacgctttgacagttttggtgagtgcgtacttactctttcccaaaacacagaaaaaaaatgcacttaagcatagatagtttcctatattaaactcatacaataaactctatgtgacattgaagatcaagagagaattatctgatagagtcttcaaagaagcaccagaagataacactctgccactttgttggaaaggcaaaagaccatttaagagcattcgcgatatcagaaaatatttcaagaccatagcattggacttcaccagtggtagaatcaccaaaacttacgaatttccacccgaggcttatctaatcatatcagtatgtctcacttcttctgtatctattctcatttttgtacctggttattatgtccctccaagtagcaattctgttatacaacacataacacattttctttcagtctaggggcaatgtatgcttgggaatcctcaatggtgccgaagtgggactgcaaaattctaatatcattggtggtaagatttccttatagatacacctggcctggtttggagtctacaattttttagcaccctattgattttctttctgaaaaatcactttgttttttcttctcatctatagatatatcaatgcaaaataagatggtgatctatgataacgagaagcagatgattggatgggtcacttcgaattgcgataaggtcccaaaaacaagaacatggagcatctgatggtacttccagtagtctccaaccatttctttattaaacacaagatggttatagagcattcttcaaaacaaaataaaaacataaaaacagtataaaatatacgtggcaattgatagaattctattacatataagcggtgtttgtatgtctgtatcatgttaataatgtattgtgtatgtatatattcattagtattgcgctttagatgtgtcttgattggctgtgaaaaagttataaatatttatagttatatttggacatgctcttaatgttattaccta

SEQ ID NO: 44199 - DNA, 1191 bp, Cannabis sativa
ttgatagcaggagagtagtagatcccgagtctcctggattaaggatggctggattaaggatggggacaaatgttctaaattctttttcactatgccgctatacggaatatgcgtaacattgttaagattattttgaataagaacgagatttggattgtagagagttctcaaatttcttgggggacatcttctctaaccttgtccaaggcccctagaatgccttgactctctaattgatgatcaccttacaccgttagagcaagatgagttagaaagaatcccagggcatgaggaaattagacaaacgctcttctttatggggagtttgaaagccccgggcccgaatgggatgtctattctttttttcaagcactattggaaatctgtcggggtagatttttgtgaggcagttgcttttgagacggggatgatccataggggtatcattgctacgaatgtggtcctaatccctaaggttcctaaccgcaatagagtatcccagttcagacctatttctctttgcaatgtggtttataaagtcatctctaaaatcattgtgaataggattagattgatcctcccccggttgatctgccctacccagactgcttttgttctaagtcagaatatccaagacaacaatgtgttagtccaagagattattcattccttcaagctcgagagagggaaagaagatttctttgcgatcaaaattgacctggtcaaagtgtatgataagttatcctgtcaattcattgatcatgttcttcaaagtttcaaggctctgaccaagatttgtgattgggtcctccaatatttctcgacaacttcctttaatatttgcccgaatggaggcacggctggtaaaattactcttgagtgtggcatcggacaaggtgatcccttgtccccttaccattttatatgggctgcagaaatcctttcgcatatcttagagcaagctcttaacaagggaactattaaaggtatcaagttgagtaggttagagcctaggctctcccatctcttctttgtggatgacttgatcttggttggtagagcaaccttagataaggctaaaggtctatggcagtgcctcaagaagttttgtgcttggtctagccagagaattaataagctgaaaaacttccatcttcttcagtggcaatactagtgagggtatgaagtgtc

SEQ ID NO: 44200 - DNA, 1706 bp, Cannabis sativa
  modified_base (1604)..(1605): a, c, t, g, unknown or other
attaaagtttaacatagtattatacaaaaatatgatatataatccaattcaatataatacaattcaatacgacttaatactacgttccaaaagagccctaatatttttaaataataagaaagagtttatcaatatatgtgttcgcaatgcttgaatgtagtaatgaaggtagacaatttcctaggaatgaaattgtgagacagttcttatatatatatacacggacaaaattaatcatgttaagtattagttaaaaattaataatttttatttagccattaacaattaaggtgatgatggcatgtaatcaaattaagttaagtaaaagtagaacagagcggacattcagtaaaactttgaaaaataaaaagacaaatcaaacagtagttaatttagcgttgtgggtcaaaattatagtctccagcacgtttcctcaaatcttgaatagtaggatcatcttcatcatgaaggaactttacgataagctttgtgaccttttttccattcgatgatagagagataaccactttacatgttcgctatcatttgtttgctgttggttatagtgttactggttaatttggtttatttgtttggtagcattgtgatattttagggtttggttaaaaccagtttctatgcgagggatgtttagttttgttgaaactaatttttctgtgtttctattttagtgttgttgtatattgtgtttttcttttgtgaaaatagtttttatttagtgtttgtgcaggtctattatcagtatatatatatctgacgatgttagtgggtcataactgtcagttcatactactcaaggttggattagataatgttaatcctgacaaaaagattaaagtacgcattaaaaaaaataagcatgcatgatgaattagagtatgtgttatatttttataaaaactagttttaatgctttctttttgtcaaatatgttaatgatatttgatggaattggtttcaatacttttatttttgtcagttatgcgtgctatttctttctttcaaaattaaggtggttccatggtacacttttttttttttttaccattatcttttattattgtttccataaaattttacaaacattttgtcaatttatgtatgaattttgatattcgtaatggttttttttttatcaagaaaccgattttgcatctctctcttgtaaataactagttattacaattagtttacttatgtaattttttttagaaaatttacaccctgtatttttttttttttacaattttatttttatatgcataaatttacattttactgcccattaatatattgtatactgtattttttatttaaaaacaatttgttccattttgttgaaaggtggcaatccaagatttattctaatcaattttattatattttaaatttgtaaaacttattaatttaattgggcatgtcacttttgtgacaatttttttttttacttaaaattgatgatgaaaagttgaaataccttttaattcatgttcttatttgtactttttttttatatctttttttattaaaaaaattggacaagcccacgtgatctactcattctcaatatatatatatatatnnatatatatatatatatacgtgtttatacataaatatatattcctcttaaattaatgggtgaacacaaacacattatttattgatttgattggggatatcac

SEQ ID NO: 44201 - DNA, 2824 bp, Cannabis sativa
tttttttgaaaaaaagaccattatattaataagaagatattacataacaatcataactggaggtggaaatttccccaaccaagaacaatcagtatctaccgtaaaagcaaacttagccaaaacatcggcataagcattagcagatcgcctaacatgagagagccgtgctcgtgggaaaaaagatactaaatagtttatatctttcaatattgaatgaaaagcataattacaactatgagcagcttttaaaccttgaaccaccaataaagaatctgtctcaatgaagtctgtagataaaccaaggctgacaatccatttcagagattgagcaagagccatagcttccatttcttcaagtttgaagtaccctttgattggtttggatagagcaacagtaatgaatccttgaaccaattatacctgaagctttgttgcaggctgcatcagtgttcaatttaagttttcctactggtggagcagtccaaagagtttctggtggtgcttccaatggaacagcatcccgtgtgacatctggtgtagaaatagcagaggagtgcattgacggagcttgagaaaattgatatctcgaaagatactcagcagcaaaaacccagaattgcagcaggcctctttgctggcttatcatgatattctgcattgcgttcaaaccaaatgctccaacaaagaactaagaaattctcaaattcagttgaggaagtgttagccgagacatagagcaagaattctgcaggtgtagtagtagcagccattttgaaattagaaactagtggagattggcgccatacttctttggctcttgtgcagaaaaaaagagcatggtttatggtttccttgtgagctttgcataaaggacaggagttccaactatgtgctttcgatataactcagcagctacaggcaaagcattatgaaaaaccttccaaacaaaaatgcgaagctttgatggtattttcagtttccagaattttgtccaccaagtatcaagggtagagctggtgtttgtgtcctgtgaatcagccattgagacaacaaactgataccccgattttaccgtatagttccctgaagtggtaccattccagatgagaatatcatcagtaggataaatgctgaggggaatggatagaattctgtcaatatcagctttcccaaagttagcagagatagctgtgagatcccattgtctatggtgatcaataagatcagcaacttgaagagaagtatcagatactgtgaagcagaatggagtgaaaatagtatgtccaggaagccatgaatctgccttacaattaatctgtgcaccagtacccactctccatcgcaaaccttgaactaaaagttctttcccccaaacaatacttctccatgtcaaagatggagtagcacccagacctgctgtaaggaattgaccatttaaaaaatatctgtggtgtaaaactcggccgaggagagaattaggagattcaaatagtcgccaagcttgtttagcaaggagtgcctggttgaaatgtatgaaattttgaaagcataagccaccatggatcttggctttacaaagagaattccagtttttccaatggcttgcattaccagatgatgttgatccccattagaagttagacatcatgctttcaatttgattacacaaagtgacaggcaaacggaagcaactcatagcataagttgggacagcttgcacaacagctttcagtagtacttccttaccaccagcagaaaataattgttctttccaactactaagaaacttccagattttatctgtaattccactaaaaagcttagttttatctctaccagcaaaatacggtaaaccaagatattcctcatgacaaggctgaattggcatattaagtagatgctggaaaaaaactttggttttgaggtcttgtgttgggagagaaagaaagcacacacttacctgagttaaccgcttgacctgaagccctaccatagatgtctaaaacatgcttaatggacctggctgattgatgattagcccgacagaaaagcacactattatcagcaaaaaagagatgtgacattgaaggagcagatcttgagacttttaacccatgcaaagacccattttcttcttcagtttgcagcagccttgagagtccttccgcacaaattaaaaaaagataaggtgagagaggaccaccttgttgaagacctcgtgtgggaaccaattcaccaagcacttgtccatttaaaaggaaagaataagtaactgactgcaaactgcggagtatcaggttaacaacaacggatccaaatcccttttgcaacatgacttgggcaagatagggccactcaacacgatcaaaagcttttgacatatccaattttattgcagcatagccttgtgtgcctcttttacgattcttaagagagtgtagcagctcaaaagcaacaaggacattgttagttatcaacctttgagacataaaaacccttttttttttttgctaaatgacataaaaacactttaatattcagaaataaccataggtaaaaaaggttgaattcgcaacacaatttttttggagaccagtttataaagtacagtgcacaaactaatcggtcggtattgagtgatgaggtgaggctttttaacctttggtattagtgtaattatggttctgttaagaagtgcaggatccacaccattgttgagcacatccaatattgcatccgtgacaagagagcccacaatgtgccaatagtttgtgaaaaacatgacagacataccatcaaatccagggctcttatcatcactcat

SEQ ID NO: 44202 - DNA, 2371 bp, Cannabis sativa
tgcattgtagaattttcctaaaatgtatagcaataaaaaaaattataaaaatatgatatttgtactatatatttactaacttttacaagattgtaacattaaaaaaaaatattgtaattactatgattttgccattatattttacactttttttttttctttcgggtttgttaatagagatattttcatagatattttaaacaaaaaaaatgtacaaaaatatgaatttacagtttttatgtatactaggtaagattagcacgtgcatcggctcttcttgctatattttatttttatttttgtttgtttaattttaatactgtaaatatttgtaacaaaaatctaagtttgacattttaattatagtgcaaattaaaaattataaaatacaaattctattattgtacaagagtaagaaattgactttttaaagatgtatatatatatctcagtatgttacactttacactttattagtattaatgtaattatatattgttgtaaagggcaaaagtggtatggtaattagaggtgttcatcaaactgcccgtacctgtaagagcagattgaatggccttgatttcggtgttaaactgtaattcaacatatgctttaaactgtcgaaaaataccagcaacttcagattttgctttcataggatacaaccatgtaaatttggagaaatcatcaatgaagctaacatagtatctgaatccttctattgaactataaaaagagggtccccatacatcagtgtgaactaattgaaaacaagaagtagttttaggtgtggaactactaaaatgaacactatgaagtttgccatactgacatgcttggcagaaaggtaaagagttacatcttgttttcagatttagagtacagagaacagcctgtaatattcttggtgatgcatgcccaagacgatgatgccaagtttggacttcagagaaggatgcagcctgattgttcttgacacagttgaaagcagcaggtgttgagaaaacacttttatgtgactgagaggaagtgcgtgtggctttggacagatccaaatggtacagtccgtttttaagatggccctgaagaagagcctgccccgtagtcttgtccttaagcacacatgtatcagaatcaaaaagaagagttatattattatctgtagtaatttttgaaatacttaacagattttttgtaatctttggggcaagtaaaacatcatttagcaataatttcttgtttggattagtagtatgaaaactagaatggccaatatgagagattgaaagttgagagccattaccgactgttatcttggctttgcctttgtagtcagtggtggtggtgatattttgagaatcaggggtcatgtggtgtgtggcaccactgtccacataccatccattatcctccataggcgtgtttgaatcagaaatgagagcctgaggattatggccagggttctgagatgttgaggaggatgcctgactgtcattatcatatctatgataacatttgtaagcaagatgcccaatcttgccacaaatctgacaaacaggtcgagaacctcttccacggccattggaggggccacgacctccattttgagaaccacgaccttgagtgttgccacggcctgtggactgacccctgccagtattggtgcgattggatccagaataatttctgttgaattgcgcataattggcctgaacagaatccaaaattggaggagtagtttgctcaatacgcatttcttgattttgaagcatgtattggacttcttgaagagtgagatcatcagctcttgccgtgagtagaaccaccacagtttcatattcagtacccacacctccaagaatgtacatagccaattcttgatcagatagtttgtgtccagcagctgcaagagaatcggcaaggttcttcatcttcaagatatattcatcaacactcatagatcctttcttggtgttttgaatggccaaacgaagttgaagctgtcgagcttttgactgagtggcaaaaagacttgcaaagacattccatacaccagcagcagattcacaatgaaggacatgtcccagcatagcctcagagagagaattcattagctcattaacagagcatcacagcgaatccaatgatcaaaagcagggttaacagtgttcgtacctgcaagaagtggctcaggccgtggagttgtaccaagaagaatgccatgaagaccatgagcacgaacagatggtaaaatcagagagcgccaataagaatagttgtttcgatccaggcgaatattcagagggaggagattgtttggaatatgaaactgaggaggaggaggaggtggtgcggctgccgtgtgaacgat

SEQ ID NO: 44203 - DNA, 1544 bp, Cannabis sativa
atatatatatatatatggttctctgtactatttggtgggagatgtgtaattaattaaagaccttaaatgccaatgtaatgacaaaaggagcctacaaagtgtttcatattctaccattttttttttgatgaagatattccacccaattcaattcacgaaaatgagaacaacttcaattatacccactagttttttttttcttcttttttttttaggtagtccatgatttaagcacaaacctttggattttccaaggccatcagaacccaatataatatacaacatgaagtttagaaagaacggaaaaacacacacacacacttggaatttggtggaatatatatctttcattacaaatttaaatggatatactattgtttaatcacccaatatatatgtttattggatcacatttaatatttttaggcgtatctaaatttgatctaattatatatatgttgtattgtaaaaatagttgctgcaaaaaataaaaggaacgaatttaccgaattagaatctgggttgagtcgcggataggagtgttcattggatcacatctaatagatttggacccatctgatccgatccaattatttattggatattagattttgccatccaatccaatccaattaaattgagtcatctgatctgatccgatccaattgatgtattggatttgatcggttccatccattggatactttaactgattttttattggattggattggatccaaccaatggatctaatctattttagccactatttaggcagatttcattagaaagaaaaaaaatatgaaaaaaacataatttaaaatctaataatccaacatagataataaacaatagtttaatccaaatccaacctaattttcatgatcccataataaaaatataacacaaatctaacttaataagcgcaagtcttaataaacaagtccaatacatcaaatgcaaatattatataaaatataaaatcaatcactatcttgagtttaatctttgatggtccaatctcacaaaagaagatgtttactcaataattaaatatataaaattataaatattaaatacaattggatgtacattggatgatattggattggatcggttcggttatttattggatcggatgtctcatccaacatccaatccgatccaattatgattggatatccaattttattggatcggttgtgattggatcggtcggttgtaattggatcggatgactttctgtacacccctagtcgcggactaggtcgctctctttaagacgttcgtgacattgcccaaatatgtgcaagcagactatcagtctcctcgtcccctgggtaaaacaacccagtcaaacacactgtatcggaactctattgcacgatagagaaccgtcgaaataccacaccaaaaaactaactactgctcgtgtaatgaccgctctagtaatttggattagtaagggcaattagcactaatttttagtattttattattttattattatttgtgaattaatttaattatggaccccaatattt

SEQ ID NO: 44204 - DNA, 1184 bp, Cannabis sativa
  modified_base (487)..(489): a, c, t, g, unknown or other
  modified_base (969)..(969): a, c, t, g, unknown or other
aaaaaaaaattactaattaaccataaataaaagatgaataatattgctgaatagaattttatgaattgtgttgtgaatttagttgttatctttaagacgttcgcgacattgtctaagaatgtgcaaacacttagaaattgttggtcgtttctaaaataaaacagctcaaccgaaataccattatattgaagctctactgtacgaaaaacctacacccaaatactactacctgaaatacttgtataatataatcataaatataaactgtaaaggatttttctcatgtaataaaagatgtgtttctcttgttggttatgatgcattatataagaaatctacagaaggtagtaacgagaagaaagacgttgatcatagtaatgttaagtgagttcgtgaaaacgatgttaaaaataaagaggagaacacgtctctttttaccaattaatttaaatacgtttaaaaaatattttaattaattaaataaaannnataatttaataaataaatttttttcaaaatataaaataacacctcacccgcctacatgcttggtacagtcagacaaacagcaattgcaactgcgtgtggtggtccgatgtataagtcctcaccaatacatacaaaactagatacccttaaggccacaacccatgtgctaaaattatacattatatatacttctaataaaatatatgaatcccatacaaaactcaatgcagtcacatacttcacttctcatacaataattttgtaaaattatcactaaagttccagcaagaacaagtcccactgcatttacttgttttgctttttggtgccgttttcaatatttaacaactgttttggtctaacttttagccactagatgggcccattttcaactttgtttttatattgggattatatcacaaatacacaaaaataataaaaatatcactaaaatgtgatttcacggaattttaaatattnttacgatttttttttattttatttacaaaaaatacgatatttttatgttgtactcttgttaatttgttgttgattttttgttttatgcatgttattttttgttattatttaaaaattattttcatattacttttatgtagttttctttttattttcgtgttgtttttatagaaaaccataaaaataaatataaaaaatttgaacgtaaaaatata

SEQ ID NO: 44205 - DNA, 1682 bp, Cannabis sativa
ttttgaaagaactacttgttcattgattaagaaaatagatgggaatcacaaggggattaccctccccttgatacaaaactgctaactcgctagaaactctagcgattttagctgcaccatccgcgaaaacattaaaactacggtttataaagaaaaaacgacaactaagaaacttgttagataaattaactatattataataaacatcagccaccctccaatctggaacatctcttgccaacactgatgataatgcttgaacagctatcttttaatctgagaggatatgaacttcttgccaccctagctcaattgcccttgaaagagcaagaaggatcgctttcaattcagcttctagcaccgagtctgtctggatcttttgtgtcttaacgtgacagcaaccagtggaaatctcaacacttacagctgcaatacctgcatctcccttgaaccatgaagcatctgtaaaaataacattgcacctctgcctgtttagtaatccatgatgtccctctggctcttgaatactgggagtgcatcttgcttcagtacttccctccttctctgatgtgaccaaattctggagttcttcaaaactcttttcaattctaccactgcagaggagagattgatctctgcattctgaatgcagaaagcattcctttgaagccagatttcagagaacatacatccaatgtagttaatcaattcattcctatgaactcctgtcaccatttcgattttaccttccaacatactaatgagatcgtttcttgggatgtcatctattctgaaggagaatcttcctccaaaccagatagctcttgaaaaactacaacttctaaacagatgaaaggcattttcctcatctgcttcacaaatgttgcagattttatcatgcagaaagtgcaaccggttctttgtaggaatggcctcattcaagattctccataatagcaccgagtttcttggatggattcccgcgtctcaaatccactttcaaatctttttttccggagcaaatctcggagtattttccacactataagcagctttaactgagaactttccagtctgattgtgttttcagaaaatctgatctgtaaatggggcaggtatcctaggaattttgctgatgcgagaccccaactcaaagccgaaaacttgtaatatcacctcttcattccaatcattatcaattgaaacatctctcagagtttgaattgtatatcctcgaccctgatactttccatcagctccacaaattcattaaaatctagctaagggatccaagactgatgccagaaattaatagaacaacctgaagctgcaactgaaatagagcctttaaaaatcgcttctctgctttccaaaatgcctctccactaaaaagaatcactgcttttcttcttgacactacttaaaagtatgtaaaaagactatatttgtcttgtcatctccaagataaaaatgcgtcactcgaatctctatttcaagcccgtcgaaatacaatactcaaaatattattactcggaacatatcataatataattataatataaaactgtttacataattaaagtttaagaagaggagtgtaaattactaataaattaatttgtgatataaatatttaagtttaattaattcttagttgtaaacaaatatttaagtttaatttt

SEQ ID NO: 44206 - DNA, 1772 bp, Cannabis sativa
agggcacaaaacccaacataatccccacggtccaaatctccagagttgtttagcaaaaacatattgagaaaacaagtgaaggggagagtgatcactatcattacaaagaacacaagtcttaccattaacgaaaatttgttgagttctgcttccaaatagaagaatatccttagcaagttttcaatgaaaatatttcaccctttcatgcaccttaaacttccaaataagacccaacaagtcatccacaacaccataacgagcacagatacatgccatataagcattcttgaccgtaaaggagccatcaatagatgccttccaaatcaattcatcctcatcatcaatagccagccgcggtatattcataacattcttgcaaagaggaggagtgaaccactccccaacagcttcagccaccgagtccccattctcacttgcgaacaaagaatttaccatcactcctctctcccgaattcttcgattgaaggaagcttcgtactaatcctaagacaacaatggaacccaaggagaatgtgatatatcaactgacaagccattccccactaaatagtaggcttcattacggatgagttctctagtgcacatgatacctttcgccctaaagggtattgaatttcgagaaggggcagaccagaaagtaaggccacacttaaaatacttgtcacaaaaaaactggcaccacagagagttggtctcagaggcaagtttccaactaagtttaaagaccaaggccatatgaaactcttcaaatttcttaaagttcagcccgccccacttccttggcacacaaagggaatcccaattaataagggcaacaaaatgactcttatctgctgaacctatccaccaaaaacgacaaattattttatccagttctagacaaatggatcttaggaccaaaaaagtagacatagtgtagatcatggtgctcaaagccaccgattaaatcaaggtagattgccccacctgggaaaggagcttcgtcttccacccctcaatacgcctagtcattttatcaatgagaaaattaaagtcaatgactttgcttcctaagaaaagaatcgggttccccaagaatctatcacttcccaccatctcgcgaaacccctaaaactccttgatctcaagtgtaacatctgtgtccacattggaggagaaaactagagccgatttgttaaccgctgtcctgacatgttgtagtaaaggttcaggcaccactgaacttccgtaacattctccaagttagcttcacaaaagataaaggtgtcatccacattcattaggtgagagagggaaacaccatttttggagaatctaaaaccatttaacaagccatcttgttcaaacttcatcaataaactgcgagagcatttcactacacattataaacaaaaatagggagagcaaatccccttgtctaagtcccctagccggttgaaattgcttcaaaggacccccatttaagagaatagagaagaacactgaggacacacacttagccactaattgccaaaacttatcacaaaatccaaaagtctccatagttcattccaggaaactccactcaattcggtcatataccttagatatccaactttaggccaatgtagcctttacgacctttcatcctcttaaaagaatccaaaacctcgtgagcaatgatgccatttccacaatccaccttcccagaataaacgccgattggacaagtgtaacgtcctcgcttcaagcctccattgggtccttacacc

SEQ ID NO: 44207 - DNA, 1737 bp, Cannabis sativa
catttgcatattagtatagggtaggcaccagtagtacttagtattttctcgacatgttatgttgcgatagattgatgatactccataaaaattattatattaaactatatgaaacctgatacttaatttgactactagggatattaagacatgctagccactactagtgccctttaaaacacctaaacaaatatattatgaggttctactagtgccacgttttatttttcactctcatctgcattagatagatgactggtttcttatttattacttttcaaatgttggttcacattcaaaatgatatatttgaagatattgttgggaggtatgagaaagatggttggtttcaagcaaattaacttttgaagttttgggtagtttttattaagagatgaaaatatacattgttggtgaaaaatatcgtttttggttcttcaaagacatacaaaaaggagagattaacaaccggtcttcaaataaaaattaactaccggtcttcagggggagtaagttaaaatgaagtttttttttttttcttttacattagtcttatgaattcatctcaaaattctgagtttgttcaatgaataaatagacaatcctcctgtctctaaccgttacaattaggcacaatatttggcatcactagtaagtgaatagtgaaaagtcttgtccttgtgtccctatgccaactgtcaatcattgaaatactcttattggtcacctgccttaagctacaccaactattaccaaatacaaatacataaataaataaaacatggaacacttcaattaattataatatttttctactttgtgtatgtaaaaattagaacatttatcaagcaccataattaataatatcaaatcaaaacatcacaagcaatacaaaatctaaaaattaagcataaaaataagagacaaaatttttatatggaaacctaatgtggaaaaaaactacgcagaccgtagttcgattaaatcatccactatcaccaaagtttaataatgagattataagttttttctttagtaaaactagaggctcgcaacaacattaagattaaacaattttagattactaaaacaaccatcatcatcatcttaaaaaataaatacgaaaaagtttaagtcacaccaagtgaatattgtagaagagcaccttagagagaacaatcgccaaatatgaacggtagataggtagaatacctttcaatgatttaccacatgaaatttaagttaaaatagatgagaatcaatcacttgatctccaaattaaagtgtcaaaacctactttctctctctagatttcttctctcctttccctctcttttttctttctttctctctctactggttgtgcttgttctccatgacacacaccaaaaacaaccaacttctcattttttttaattacaaatgggttgttgtctttattttggtccaaggcccactaaatgtggtggacttaacaaatctccccttctgccttaattagtgggctcaactaagtccgctcttcgcctacacgttttaagcttctccttaggcaaaacctttatcaacatatcggaaccattctcattggtatgcactttttctaagtgcaactctttcatattaaggacatcacaaatccaatgatatctaacatcaatatgcttggatcttgaatggaatgttgaattcttggagagatgaatgaaactttgactatcacagtaaataatgaaa

SEQ ID NO: 44208 - DNA, 1557 bp, Cannabis sativa
caagtgtttaatcgctttcacatgcttagagttttaaagctacgtatggatgcatgcaggcgaacattaccaaaagaaattggaaagcttattcacttaaggatgttaagtattgaggccgatgtgaaaaagatcccgtcttctattggtaatttgagatgcttgcagacattaaagttaaaatgtgggattttggaaaggaaaatgcctaatgtaatatggaagttggaacaattaaggcatttatacataccctcattctctagtaaatggttgaggttacctaaagatttacaaacattggcatgtgttcaaaccaaataccttgttaggaaagattttctgcaattgaagaatctaaagaagttacatatttatgtggacaaaaactttgggagaatttttcaagatcctccaaccatcacattcaaccgtctttggaatttacaagtattttctcaatcatatgatagtattgatattgttcctatgttattaagctgccctcaaatttataagctcaaattgtggtctcctgtgataaaattgcctgaagacagccaattctctccaaacctaatcaagttagatttgagagacactcgtcttaaggatgatccaatgccaacccttgaaaagctaccaaatttaagagtcctttgttttcgagcttatagcttcaaggggaatgtgatggtgtgctcaaatggaggtttccctcagttggaatctcttcacattgattctctatcttacttaagagagttgaagatggaggaaggggctttgtctagtctttgcttttttgggattaaaagctcggggttcgacagtgttccagatggattaagatacattactacacttaaggaaatcaagattgaaggtatgtctgaaatattcaaagagaggttaaaggaaggaggacaggatttcgacaaagtcaagcacatcccatcccgtctacttctctagtgatgattaaggtaagagtacattatacatataagtactttttcattccattttgatagtaatgaattttgtatacaatgatattactatgttaatgcagattattgtatcattaaatttgaggtgttggacctgaagctgaattcttctcatttgttggctttggccaaagccagcacacagttcttcaaggtgttggaactctggcttagtttttttacttgttactttgttacttttctcatctgcaatatgaaactcttttacaagatgcagtttcaatagcgcttctgaaatctttcatccaagttggatcgcagggagctcattgtgctatgaagctgctatggccattctcagagattgttgactcattaggacaactgaaatctaatggtgttctcacataactaccttaagttttagttatgtgttctaagctgaattcccaaagataaattcaccttttagtctttaatttttgttttggttattcaaatcaagttcagcaggaagaagtgtatgaggtgaagttggtttgatctcctccattagcacatgaaagacttctgaggagaataa

SEQ ID NO: 44209 - DNA, 2495 bp, Cannabis sativa
aatcaccaccaccatagccacaattaaaagagaaatatttagaataatgattcttaaaataaacaagttcccaattatctgtacctgaaaaaccttgtacatgctagctttcgttccgccagaaaaagccgaaaaaactaaaggacatggcttaatccttagctcctgcaaatgacaaaccccgaaaacagaaggatataatttacagacaacttaaaattgaagtttaaaagagaatatctacagcatccttgtatcaatcttatcataagacattctcaaaaaggtagagtaaaacttacctcaacaagctcattgagaatcacaaaggctgacgacatggctcgttcaggataaaatctgcaaatactttcattgccagttaacatcccaataaaacctcaattcattggttttgataccatctactttagcaactataataaacaaacttagaaccaattactcgtaacattagaacccaacaaaagcaaattcagaaccatataattcaaaaccaagtaagaatgatcaaagattagtactttagaatttagttcatcaaattgaaagaaatgaatgattaaaaaaaaaaaaagcttacgcatcgagaaaatgggcatggcaaacaagagaattccaaccgagagaggcatataaatcgatatagttcttcaagtggtggtgatgaatcgaaacccaagcgaaaagaaccacaattcctttaaagtcggatacttcttttcgtccccaatagataccaccaccactactaccaccgataccaccccacataatttggttttttgggggtaaattcagaggtggataaattctagggttgcgagaaattgagcttgaaaatggagagagagagagagagagagagagagagagaaccactcgggcgtgggtagtgaaaatctgtaatggtggcttgtggcttggatggtgggtcccattcccatccgcaagatttacttaccattcccacgtgttccaaccaatacggcatcgtttcgttattttatattttttttttaccattattgctattaggcacttatggtgcctaatacgtctaaaaatttcgttttgtgattaactattgatattatttaaaaattattacattaaacaatatgaaatttgatacttagttagactaatagtgatatttatacatagaaatgtactaagcattaccagtgcattttagcatttctcttataatatattctgactttgaatatttacaaatgagaattgttaaaaagtatcacttatctagcactttttttggtgtcataagtatcggatcccataaaacttaagaaaatagctttcaggaaatatcgctaaccaatcctagagcgtcacctataaaaaaatactacgtgtacccaaatacaaaatttaatatttttattaaaaattaaaataataataacttcattattaatattattatattaaaataaatttaagattgccataaaataaatataaagtaataaatttattgtgatgtaaattttgtattatttataatttaaatttgaattaatttttattatgtgacaaatttgaatcaatttttgacacattattatagcaaacttttaaagtgagttatattttagcagtaaataatttgaatctccatcgaaaatgttctaaaccaacaaaaatttaatgattttagacactaacagaatctatgataataaagttggacgaaattatttaaagtatttataccactaaaagaattattgaatatttataattttcaaactcaaaaatttaaatccttatgccacaaattttcccttttttttttttgagaaattatggagaggtttaatgtagagtacacttctttcatgcccgaactatagtttggtgtctactaggcaataaatgtttttgttacacattcttaaaatggtgttccaacaaaaattacatatttaagacacaatagtaaatttggggacctaagtgatacaaaattgaatttgggaacacaagtgacacttttgagaaagatttgggaccactactaatataaacctattttatttttatttgtactaggtttttgcatatttctaattgggtgcttataatcttattatatatatatatatctacaatggtatatacattttttatatgatagtgttatattataattatttaaaatattctcttaaattttaaaaaaattaaaataatttatagtatgaagggtaagatttaaggaatatattttacacgcatgtatacacattaattaaatataactgtaaaatatttttaattgataaatatatatttttataattaaagtaccaaatataatttcacataacttattaaaatcaaatctctaatgcacataataggaatatgacttataaaaataggtaaaaattaaatagtaataaaagaaagataataattaatataagtaatgaaaaatgagtata

SEQ ID NO: 44210 - DNA, 1880 bp, Cannabis sativa
ctggcatatgtattatgtccagttacttttttactagtgtagcgtgactcattttggttctgctactggcattgtcctttcaggtttcttttcttcgatatattcagcagtggaagaaaaaagttgtgtttgtcttgaataaatctgatctctatcgtaatgctgatgaggtttgtcaatggattatttaccttcagctttcattgtccaatacctataacaaacttgtactgcttgtgcttcccaatcaactttgttttgtcccattctaatttccatgatttattgcagcttgaggaagctatgtcattcatcaaggaaaacacacggaagttgttgaatgctgaagatgtaacaatatatcctgtgtcagcacgatctgcccttgaagcaaagctttccaaaaaccatgaccttgaaaaggaatatcaagaaatagcactatctgattctcactggaaagacagtaccttcaatgatctcgaaaagtacttgtatagctttttagatgggtcaacaagtaatggaatggaaagaatgaaacttaaacttggaacacccattgcaattgctgaaagactgatttcttcctgtgaaactcttgtgagacaggactgtcgttatgctaaacaggacttggcctcgataactgatataattaacagtgtaaaagattatgcaatgaaaatggaaggtgagagcatatcttggagaagaaaagcattagcaacggtaagctcgtataactcatattcttaccagttggaagcacatctgcatgtgttccattgaattaatgatctacacttgtgtatgactgcagattgataaagcaaaatcacaagttatggagctcatacgtagtacaatgcaattatcaaatcttgatattgttgcctcatatgtgttcaaagggggaaattcttctacatttcctgccacctcaaggattcaaaatgatgtaatgggtcctgcacttgtggatgcacaagtaagataatattaatattttttccataaacattttcctttttattttctgctgtttgagtgagccatcaaaacgacgatgcatattatttgtctgaactcggaggcatggatatgatgcttttgttcttgccttctatcattgcatcatagattctaatataacttatatttattacttgtgtttcccttgtatcattttatctccagaattatgtgattctttttttcaactcaatattgaaatgttagcattttcttgtcgtatagaatttccttggagaatatgtacagtggttacaatccaacaatattcgtgaagggaggctgtacaaagagtcgtttgaaaaacgttggccgtcatttgattacccaaacagtcagttgcattttgagacatttgaatctctaaaaaaggttgatgaacttagcttgggagtggtacggaacttcagtggacctgctgcttctaaattgttcgaacaagaagttcgagaagtggtgagttttttaggttaagaaaaaaaaaatagaaatcaaagaactaaatgtcttttgaaagaaaataaaacaatttctcaaatggagcggtggcaggaatatattgaagtctttacgagcttatgtattattgcactgaatattgtagtggcaggaatgttaaggattatgtttacctaaagcatgtatatcatataatatattctagttgactgtattaatcttcttgttgacttagttcctgggaacgtttggtggacttggagcagccggtttatctgcttcgcttttgacttctgttctcccaacaacattagaagaccttcttgctcttggcctatgttcagctggcgggtgatatttcttatctaattctctttctcatgatt

SEQ ID NO: 44211 - DNA, 1598 bp, Cannabis sativa
  modified_base (1364)..(1376): a, c, t, g, unknown or other
ttttaacaaatttaacaaattaaagttgactttattaaaaaaaaaaaaaaaactctcttattaagcattggtacatttattttgcctataatttttttcttgtgttttggtttttttttttaattttttcttcttattttctaattagtaaataatagtgtagaaaattatatgagtttaaataatatttagtttggtggaatagtaatagtaatgtaatagaagaagaatagattacgatatttatttttttttggaataaatattaaattaagtgataaattcacaaaataatttatactttaatttttattcttattaaaaagaaagatatttgagtttttttacttttattttatttaatatttgtgatgtaattcttattgtatagtttctacactgtaataaaaattttattgcacaatataattatcattacattaaaatcttattacatcacttttaaaggaaaattgaaaattataacagcaattatgattttattacatcaaaccaaaccaaaccaaacatgaacttacatattatattaatattcttatattattttattagtatataataatagaaaaaaattatgaacttacacttaaatagcatgacaaataatatactttatcttaaaaaaaatatgtatcacactctttttatttaaacataattaataagaaaaaacatatataattaacctttaaattttgatcgaaagtacagacacaactatacactagtatatatttataaatatatatattatttaacaacccaactcatattatatatttttaaaataaataaagtgtgagaacgtgggaagtcagttgaagttgaatagaataatagagtaataaataaataaaagaaagggagggaggaaaaggccgaaccggacggccacatcgtggggctaagtattgacattcttttttttctttgattccgacaaagtaaccgcattactcgttctctgtcttcttctattgggcggaaaacctactcaatgccgctctaaaaggccttaaagcccagtgtttattccctaccacttttattttagaaaatttacacaaatcacctactttccttttaattttttttaaaaataattatataaaacactatttttttgtaaaaaaaattatatttttacgtttacacatgttttttttacaattctacggtttttttatagaaacaatacgaaaataaaaaaaaatactacataaagcaacatgaaaataacatctaaataatataaaaataacaacaaaaaataacatgcaaataacaaaaaatcaacaataaattaataggagtacagcataaaaagaccgtattttctgtannnnnnnnnnnnnaaatatttaaaattccgtgaaatcgtatttttataatttttttattttgtatgtgtatttgtgaaataatcttttttttttagatttttttttccttttatttttacatacccttattttttcagtttttttttttaaaaaaaaaaattcactattattataaattaaccatcatttacaacaatagcaaaaattattagaatatttctaattaaggaaata

SEQ ID NO: 44212 - DNA, 3796 bp, Cannabis sativa
aataatatataaataaataaatatataatttaaataaattatataaaattaaaaaaattgaaatttgggtatatatggcgttggttattagctaggaacagacgccatatatacccctatggcgtcagttcctagctaataaccgacgcgataggggtatatatgtcgtcagttaaattaaatcatatagcgtcaccgtgatcagtgtcggtagtgaattttgccaaaactgacattgaaagccttaaaaaactgcctctaaaggtagtttttgtagtagtgaatagattcgtgcactaagaataattaatgcctaaaccacgtaaaactatgtatctactatttatgtaaataatcggtctttaaaaatctcgataaacagtcttaaatattttttctagcttctgccttgtacgtatatatatatatatatgaatatgagaataaatatataagattaagaatataaataaactataataacaaagaaagtaaaattaaaagggttcttgaaaattatttcagctaaataagtatatataaatatatatttagtgtatcctgtctttaaagaattcaaaaacttaaacaaataaaatttatatggggtaaattctcgtgctaataacatcttatagaataatatagaatagataaagaaatagaagaagatagaagacaaagagaataatagaatgaaagaatgaatgagatttttctcagttatttattctaataagataaatttctatttatacaacaataaaactaaaataataagaaattaaatcaatataataaataaaaatataatcaaatatttattgtggtaattaatgttttgatttggacatctatcataaataatattttataacatttgtaaattttatgtgaaaaatgtggttgtgattcttatgtgtaaaaagtgtggttgtgatttttatgtgtaaaaagtgtttgtaatagccattctcaaataataataataaaaaaaaggatacaaagctatcagaagaaatctcggtgggtttccaaaagaagcccggtcataaatgcaataccattaagatcaatataaaatatatatcaccaaaatgaaagaagtgcaactttattataatttagagcaaataatcgtgattgtaagatattttatttatataagtagtcaatagatgcgtttagcataaaaaagtaatattatcgaattaaaaatattagtttgtattgcatgtatattgctttacgaaaaaagaaaaagaaacattagtttgtaaattttgagaggagtataggctgtgtaactactaatagatgctttgtgtattaaggcatgatagtgttgagtctgttcactgctgtccattcatcgttctgcgtgtcaaaatctggtcaaacaaaatataataagaggaacttcaattattcggtgcaatctttaaatcgcttttcgttttagcataacctatcttattacttttctattattatacaatgatctccattataattatttagagcattaggtaaattttaagaaaattcttatagttttgaaatcggtttttaaacaatctgatatatatgcatagaataacaaagacgagtgatatttcaaattttacagagtgatgtgacatctaataaagtgacatgtagagaatactctgaaacatggatgcatggtatttccttcaatatattgttctgggtgatatatatccaacaatgtatgaaacattcaaactggttaaatgttactgtcgcgagtactttgcgcatagtaaatgcgtagtgttaatcgtccaaatttctttcatttgataagatttgaagagatcatgtaataattttttattatcaaataaatggaagttattttagtaacaacaaattcctatcaataaatgaataaagcgattaattaccgttcaaattatgacaaatttatatatcatggcttgcaaaattttaggtatttatttttaaaagtcatgaaactacctacaagtgtactaaaaggtccgtcgaggaaccaagttcgagcagacaattattgagcactcaagttaattagcaagtgaccaagagtctaacagcctgctcggtcatttgggggcaactacaattgtaagtggacatggaaaatacttgagcaattttttaaaatatgaaaatctaagtatatatgctccgaatagacataaaaaggctagattaaagcccaggattaaaggtcgcatggttagccatgtgtcaacaagaaaagtaaaccaagttaaaatgtcgctctatcggcatagtgtaataaaataaaggtctgtaggtcgaaaaacgtattaaaagaaaaaataggtcattatataaaggatgagaattagtccattggagttgccaagtttaggtcttttgtggtcgcaacgtcgtcttgatcagtgaccgagaagttttatcagaaagttgaccagttttctttgtcctaggtaccttaacttactcctcaaccttcatctccttgcactattacaacaaggaatcacaacagttctcatccatgtaattaaaattggcttcggggttggcctttcaaaagtcaaaaaagagctccatgccgatttctgattacatctcaaggtcattggcatgacctttaatttcctcatccaaggcttcctccttggccactgtgggtatttttccttggctactttcgaagtccagtcttcgacaatctgctccaagtccttgaccttctgctctaaattctgaatgagtgtccgtagagtagccctctcctcaactagcttgttaacccgccaagtctcaacctcgaagtcagcctttaatttgtctacctaaggcgcatcaaatagttggttttccaatcctttaatattcttaaaaaactcaaacaacttcttgttgactttgccaatggcagtttccttgtctttaacttggccttaaactttttccagtttggccttatccatagtggattgggcagctacaacttttgtctgagagtacaaatagtcgagctatagattcacctaaaagaatataaataagtaataagatttacatggtatagtctaaactaaaggtaagtagaattgataagaaaagcattaccttagtatgctctttcagatgggcgaggctaggagatttatgggcatcatatctgaccccttctacttcttatttagcttagagtggacacaatcctgatacaagctaatcatgtcatttgcctttttcatctcagaagtaataggcataggtgttttctaatttgttttacggatcaaaggagcgggaggaggctttaagctcttctttgtagggggttgaacaacaaccacatgagtagagacgttagtaacaataacctcatctccaacgaccaaaggagctgggggcggagccaagggaagtttctgcttggactgacccttattgtctttcttttgaacctttgccagaatctcctacccaaaaggtccaccgaccttccttttcaacatggaattaagattggacaacatagctgcacaaaaaaagtgacttagttagttttcacaaaaatatatagcaaaaggcaaggtaaaattctcaaaaagtataccctagatctccgggggagcaacttctcagactaatattgaatgggctcgtattgggttttgtggcctaaataaaactcagttcaaaataataagatttactaattaataaagatcagaaattattttatattgctgggatcacaagatttatttcatgatta

SEQ ID NO: 44213 - DNA, 2122 bp, Cannabis sativa
ttttcatacatgtatgaaattttgagtgttaattagtcttgtaaactaatgtggtttgtaacacttgttttcaggaactacctttcacttatattaagtggagagaaaacagggagactaatgaaatatgaccctcaaataaaagaagtaaatgttctagctgaaaatctctcatttccgaacggggtggtagtaagcgaaaatggcgattttctcttgattgcagagaccacaacttgcaggatcataaggtattggcttcaaacatctaaggctggaacttatgaagtatttgctgagttacctggatttccagacaacattaaaaaaagtcctaggggaggattttgggtaggaatccatgcaaagcgaaaatggatattcaaatggattctttcacatcctttagttgcaaaattctttcttgaacttccttttgatataacggaggcttatacacgtgtatctaactggagaggaagaggattaataatgaggttgagtgaggaaggtgttgtattggatatggttgaagatgaaagtggtgtgaattggaaggctgtttctgaggttgaggagaaagatgggaatctttggattgggtccatacataaagcttatgctgggaagttcaaattaaatgacacaaattatgtgaccttgtaatatatacatttaccataatttataataatagttaggcttgggtgccaacacaacaaaacatctatgaaattatttaatttcaataatcatgatgttaagaatattggtttattctctttactttttgtaattataattgatgtaatccttaatatatgctcctcatgatcaacagagatttaatacaaaatcatgttgaatctatatgccaaaagaaaaaaaaaaaactggaaatttgagttgcgatagctttaccacaattaataactgttcctaaacatcaggatatcatgaatattttaaaattttaaagttaataaattatacactgttctgattttactaaatgttataaaagggtagattttggctaagaaaagatttaaggaaagatttaaagtaaattggtgtattacttaagcagattaattgttatgttttatttaagatgaattggaatctaccaatttgcaaattaataggtggaagtttttgaaaattttattaattaatttctaaggatataattttaaaaattaattaaataaattgagtggcaataataattagaagggctttaatattagttatggtaagtggcggatcaaggatttaagttgagggggagagactttttttttataagtgagggggtgtcttttttttttaacattgtataacatgttaaaaattgatgcaaatttttattttagtattaaatatagtataaagtaaaaaagaaaaaaataacaataaatatagggaaatttacatggtttactaacttttcccattttatttcaacaatactgctacacgcgtatttttacttttatactgtgtatgaatttattattttatacggagtatactaccattggtacaaattttattaatactttgtggcttacacgcgtcttcaccgaatttcgtcacttcattttttgaattttttttcttcaaaaaaagctttgatttaacgtgggtgtcactatttgtgacagtgtgcttccttttggagttttgatttattttaaaattatttataaatatttcaaaaaagctttgatttgacatggtgtcactatttgtgacagagtgcttttttggggttttaatttattttaaaattatttttcaatatttttaaatgttaaataatcattactaaaatcccactctcccatgtttcctattcatcttcttctaatatctattttttcaagcgtttatacagttttttgggtggtttattttttagttcaatttttttttttttcagttattccatattcataatatttccctcttcactccccccccctcccattttcattcttattcttctataaatattatttccccttatttacaatgattgttacacaatcatcattctcctatgttgctaaaaagcccaaaaaaaaaaattgagcaacaatgggtaagaagaatt

SEQ ID NO: 44214 - DNA, 2310 bp, Cannabis sativa
gtgactaaatgtgtttttagttgtaactaaacttttaactaatgtgattaaaatattgttatcaaagataatttttatttgtagtgatagtttcagaattaagttgtaatagatcacactaaaaaatcattatttttagtcactttaaaatgttgactaaatgtaaaaaaatattgtgagtaaacttatgttattattcttaaaaaaaaagaaaaaaaattatattgttaattaattaaaaaatttgtagctaaaagtataactcacaaaaattataatttattttttgactaagatcaaaatagtgatgatgatatttaagtactaattttttagtctataaaaaaaattaaattgggattgaatgattgtcactaaaaagtaactattttgtagtgtgtcatattgagtttgaagtttagtatagtttgattttattataaaccttctaattaatatttaaacatgtatattaattatcagtttttctgttttttttcaatgatcatcttaattcggtcaatataatttcacatttatgcttaatttatatacttatttatgagatagagatatattaatttgatcaaaatttgaattcttgcagtttgttaaaaattcaatgccagaaaatttttgtgttgggcacaacaacaatggagaaactccagaagccatcttcacaagagaccacaagaagctagttgaaacgggtagcgaatggatgagaaaaaccgccgagtcttgctccctcgtcgcagccctaattgccaccgttgctttcgccacatcaacatctctacccggcggaactagtgatcaaaatgggaaaccactaatggcaacagagccagcatttcatgtgttcgcggtgtcatcattaatagctctttgcttttcggtcacttctttagttatgttcctagccatcctcacatcgcgattttctgagaaagatttcgataaagttttgccatggaaacttttgatgggactcacctcattgtttttggccatagtttctatgcttgtttcgttttgcgccggccatttctttgttctacaagatgctcttaaggtagccgcctttccggtttacacggtcactttcatcccaatttctttctttgcaatagctcaatttccactctatattgatttggtaagagcaactttttggagtccctttggtgatcctagaaaattgtttgctccaagtgaatattaattcattatggcaaaaatgttttgcaataaatatacatataaatatatatatatatatatttatgtatcactaattagtactctcaaacatatgtaatggattataattgtaataagaatagcactactacaaaataggttattcccaacggtttaaaagagggttaattatgggaactatgttttattgtgcataaaaatatttaattagattactgttgatggaatcaaatctgaccagctaaagaagctcactcactcacaaacacatacaaaaacacaatatttagaataattaaaaaacaaaaaaaaaaaaaaaagaaaaaagaaaaaaatgacaccaaaatataaaagcatgcccacaatcaccatgtgaaaatttaatttaaaatttaacccatacatgcatgcagtcccataatattaactttaggttttgatagggtctgctcttcttttaatttttatatataaataatttttttataagagtaagttgtagtgtatggtgtacgacacaattattctggtcaaactcttttggttgttgacttgacttactaaaattatacttcataaaacttttgtcagcatatttttatgcttgtaaaagctgagtattatattagtaaaatagattttatttttgctagtacatttttatggttgttgacaaattattgatgatcatcacaaacaaactgaaaaactaaatgaaaaacaagttaaaatagagatccaaattaattcatcctcaagatatatcttcattccatctcgaacttacatcttcatccacaatatatatttatccaaaaaatataaattaaaaaagaaaaaaaatactaaaagttaaactttttagagatatgtgtataggtatattaataaagtagtatagagagcacaaaatagaaaatttaatgtatagtttaatatataaatttgatgtaaaaataaagaaagtgaaattttaatgtattttaaaagatttaagtacagaagttgatttgagtgctttagctccaaagtagaatatttagtacaaaatatttatcttcttaattcttatcttcacaatag

SEQ ID NO: 44215 - DNA, 7453 bp, Cannabis sativa
  modified_base (7306)..(7311): a, c, t, g, unknown or other
tctcttaatttgacaagggaaacttcaggcctgtcagtaactcccttgagcacctatattacagtaccataaataagaaagaaaagaaatctactaaaagaggcttataatatgtaaacaatatgaccaagtacatacctgaaatgcttcactttccacacgtataattacaccgaaagtcatattactgcacaagattaaacaaataaaatattttacaattaccattaggggaaatgtatccttaatacaaaaagcaaaaacaaaaacagcttactccaataacacaagatcatgaagttcgtagtccccaattttggtaacacctgttgtgacttctgagctctccacaacatcatcagcaaacacacgaatctgagaaaaagaatgctcgcatcggcacaattacagttataaattaacctcaactccagtgtttgtaacaaaaactatttccaaataattaaaccactcacatgctcctttgttgtatcagatataataatgagcacatgctgctcaaccttaacaaccataccagttgcaccttcctgggtaccagacacaactttgacatgattgccaggttcaaagtacttgcagagctctttctcatttacagccaacgttttctgcaaaaaaaaatgatatgattactgtcataccatatcaaacattttaccaaatttttgggcaacgaaatgatgcagtcaaacaaataaaggaaccacttctaaaaaatttataacgtaaaaataaataaaagcatatattcttactggaaggcctttcatttctggtctgatatgaacgttatcttcctcaactttctcaacccatcctttcaaatttttaagatctcccttgacaacaataactgcatcgcccttcaaaaagtgccccttttttctgtttgcaaataaagtagacagactagctatatctccatcaccattctcgccaggtttccggaatttctcaagctcatcaaaggtaggttttatattcattgcactaatggatttcatcgagactgttttatataagaaaccatctttaaacagcatgccaccaatattctcaaagtaatcaccagtcattgcatctcgccgacgttccaccctaatatgaagctctctggaaatacatgtatacgtatatataagtaaaccaaaacatgactaaaagagagtaaaaaaataagataagttaagtttagttcagttttacctcgcctcatcaatattcataaaacgtggaggaggaacaaatgccttcttttttggaacttctctaccctcctgtatcacagagcagttatcttaaaatgacatgagaatcaatcactgatacaattgaagcctcacatgaagaaagcataaaaaaaaatacaaaatgacactaatttcatttataaaacagtctatagaatacgactcccaaaaaaggttgtcaacctcaccaatttatttgcaagagcctgcaggtctatccttggaattagtttcactgtaactctctgtcgtacattatccacatcaactacctgaagaaacagagcttgatggtgagccataaacttgaggccaaatgaagtcagcaaaacatggaaagtgaaatcaaaagcgaacaaaacaacaattagatccatactttcgcaagatcccctttgtatgtaccaatcttcatcctgacccatgtatccctagaaagatctattgctttgctctcaactgaaagaacatccgtcatttctctaattggaacaagcattattttctgggcatataagttgcggagacctttgcaagcctaaagcaaaagcaaatccttcagattgcagtttaacaaatatcaaacatttcaaaatgcacaactctctaaacacacgcctactgtcatgaacagagtcaacttaaaacatttgaaaatcataaacacacacctccttcacatgtgcttccttgtccgcttcaatataaatgtagttcttcagatgatcaagtgcaattacagatctgatttgcagttcaggtcccttatcaatgtacttttgcattaagcaagcagcaacttctcgctctttaccaatctgacatgatcaatagataaaatttaaaatactcatccaacaaaggggcaaagttcatatttggagtgaagttctaaaagtagtaatcataccgcacatttcaccatccacaacttcggatccctaacagatggcaacaaagcttgttggtctacatcagtggtttcctcatcatattctgtgtggctagaccttgcatatctttcttgaattcttctctcaagagcttcaacatcttcttgatcatcctcacgtggaagcaatggacggcggtgcatccttcttccatcaccttcgtcgggtaagtcagatgtcccatcgactataaaatctgtatgaagattctggttattagatattggtgaagcaaaaatgatcatatgcatgcacatctagcgaaaattttcacacatcctcacacacacacaaaaaggagcaagtgtgaaattgccaaccaatatgaaatgcctgagagtttaaactgacagtattgttcatcaatataaataaagggttgtgccttttgaatcatattctaaaatggccattcatcactttttatttttttcccaaagggaatgtgtgtccaccccatgtcaagaaaaaaagtcacaatattactcttgcttgtctaattaccagcacttgaacagagaaagttgtcagaattattaaaaacgaaaaatgtgaaatgtttaaccaatggttcttctgatgaaaatacaaataatgattctactgtccacaatattttactttcactgcacatttcaacgtaaatttgaatataagaaccatgtcgatagtagactaatattagcacacattcaatgaaatattctaaataacaacagtgcataacaaacaatatcattgtatttgttcatagtctgggtagacttagaagctaagttcagaagactaagttgccaaaagcaccaaaattcattatatatatatatacacattttaaacttcatctgagtaaagatgtattgctatattaagaatactgctgagttcagatgcaagttcatctaaaacattggctacacctcaacaatgttaatgcaaaactctcaatttgtttcctccgtattccattctcttgaaatttaccacaacattcaactattacagattaatgtgctattataatagaaaatactttctaacactaaatcataatggtttcctatagttttcattctgtcatgccagaattgatttcttcaagtaccaattaaagccctcaaggagttaacacaggggaaatgcgtccctcaacaactttgtcaatttgaaaatataagaacccatgtccatcatttcgatttctttttcaaaaactagaattctacgattcagaaaatcccaaatatgtttatattctagttcttagcaacatttccgctcaatgaaatcctaatttgttcttttgtcagcgaaaatatcatttccaaacatatatatgaactaattcatttcaccaaccagtctaaaccctaaatccacgaaaaaacccaaaatccaaatcaataaacgtaaacttcaaaaagtaacaaaattaaaaggaaatgggcataccgtcctcgccgtcatcttcttcctcctcatcatcactgtcaacttcagcttcgatttcaaaaaatcgagcaccagtgttcttgtcactgcgtttcttgctacttttacttccaccgccgccgccgccaccgccaaattcatcttcggactcgtcttcttcctcgtcaacgtcatcctcaataaattcggatctccctcgcttccgagtcgaagcgccgccccctccacggtggccacctttgctgacaggttcatcttcctctccctcctcgtcagaatatccatcatcaagttggtcgtagtcctcaccataatcctcgtcagggtccatgtcttcatcttcctcgacgctccgacgcggcatggttgaaaaggatcagcaaagtgggggtaagaaccctagagagagaggagagggattacgttactatcgtatattccttcggttttagagagagaaagagaaagtgactctgatccgagggaagagagggtgaggacagcccactcctataaatactgtacatttatacatagatatatttttcttaatttttttttgctgtaatggttgcggcgttttgttattgggctttttattgggctgcactaaaagagaaaggtaaaattagatggtataccctttttaatttggtgtctctcaattttacccgtaattcaaatttttttaatttataccttctttttcattgtttcttccaattatacccctccattttcacacttttctaaatttgcattaacttttccctttctgacacttccaacaaaaaaaaacaaatctagaacttcatagtcatgtccttccttgaatctttactttttaattctctctcaaagcttcgcagccatcaatagcaatcggagccatcttgaggttcaaaccacaccgtagccataaactcccttgtgcagctgcaacatccattagtgttgttgtggttgtctctcttcttcgccgacccttcctttctctcaagaatttgtatggtggagacgtagtgtcggtgtttataacagaggcggtgatgatgatgtagttcaaatggttgtagcagagtcggttccgacaattgttgtaaaggtctagtactactatatctgtattaagtaaagactgtagaatttggtgactttaagaaagaaggagaagagttgtgttgcaagggtagtttaggaaagttaattaaaaaaaaaggtaaaaattaactaaaaaacttttgagggtaattttggttaattaacccaaaaaagggtaattatcaacttatcccaaagagaaaagagaaaagagaaaataaagtagtgaaaattggggtaaattgaaaaatgccttttttattaatcaattaaccaaatttacctttaatttatatttaattgaaacatacctcttttatatgtattgtacctaaaataccctgacataaaggaaccacatggagagtatcttaaggtgagaggggcaaaattggtacaatgtttaaaaaaagaggtaaaaatgatagaatttaaaaaagagagtaaaaataaaagaagacaatataaaaagggtatagagtctaatttcctcatgaaaatttgatgaaatatgagattttattaaaaaaaaaataaattaaaaaaatatgagcttgtttgccactcttttatggtttttttttttttttaataaaaagaaactttttattcaaaagaacaaaccaaatataaattaaggccggaggcaacaaccaactgccacaaaaaggaaaagagcagctaccaactattcactatgctcaatacataacgatcttttctcttttgactgatacattgaaaaccaaaaacgctagccttaaccatacatttaatctctttgctaagaaaagaagcagaatgacaaatagcattaaagagaatcatttctatttctccacagctggtagagagtggctgagaagacagcattcaagatcaacaatgccaagtcgggtttggctgggaaaagtctctcttgcaagtcactaatgctcttcggccagctcaagttacctgcccaatttttcacccaatcaattaattttcttgtgaagatgcagtccataaataagtgactatgggtctccgaagcatcctcacaaaccgcccaaagctctgaaggaatgggcagaaatctactcaagagatcttgggtgagcaactgctcgttgatgatttgccagaaaatgaacttgtgtttagggacaatgaacttatgccaaacagtagcagcataagaagtcttcgcagccccaattaactcaatatagaacctgctcactttgaatttattcccttttgtcgcctggttcagcatgccaatattcgtcacatttctgatcttcaaaagcttcttgaagtaccaactaagatctaattttataggacaagaccaaacatcctggtcctttaagttcatggaattgatccacttaacacaaatgttgtcttgtttgcttgaaagcgcccataaatgtttagcaaccatagccaagttccacttctttccttccctgaaaccaatgccaccaaattgtttaggaagataaacgttctcctaagatgggaagtgaagcttgcttctattaccattcgtaccccaaagaaaatctcgacacttcttgtcaatggctgctacaattttttggggtaaaatgaataggctcatccaaaagttccgaattccaagaagaaccgagtggattaactgagcacggccagcaaaggataggttcctgctagcccatctatttaacttcagactaagtttatccaagataacaccacaatccaaggccttccacttagtcgatctgagaaattttatggtatttatttatatttaaatttttttatggtatttgatatgatatatttttgtaaacctaatatttaaactcatatttcatgttattttttctagcctaattaattgcattttagggtctttttctatttgagatatttacaccaactactaaatttttgtgtgttgtgactgagttaaaaagaaaaaaagaaagaaaataacattatagttcaagttgtttgtgtagaattatttatatacgtgctaattgtattgtatttaatatatttaaaagaagacgataatggtctcaatttctataattgtaatttgtaaagctattattcttagagctgtgcttcttcttccaattgagaccatgaaagagaatcaataattgtaatgtgataatctcaaactcattttctcgtagaaaaacacacagtcgcaagtaaaatattgaccctaaactcaattgtaaaactaaaaactaatagtatctcatagtatgtatgtacttctaattaacattaaaattcaacacataaatcgttggttagtaatttttaattttataaattttttacacttaatttataaaaaatagtaataagtgaaaatatagattttatttcttcttccctaaaatgtgcttatctataataaattacagaaatggcagctgctactactatcttcttctcttttcttgttggcattgcttatgattttctcatctatcattcatgacttctctctctctctctctctcnnnnnntctctctctctctctctcatgtgttgcccttggtttcttattcactctctgaaaaaagtgaaaaaatagtattgctaggtgtcacgggctcacctttttaggcagcggaatacacgtgcggcaccttgacttctctaagcca

SEQ ID NO: 44216 - DNA, 2130 bp, Cannabis sativa
taacagaatgtgattggactaaagttgatgggccgaccaataatggttatggtagaatcactactcaaatttacatacgtacatacctacctaatcttctcttttgaatctttaccaaaacctatccttgttgacacttaagtatccagccatgacttttcccccagtgttcctcattccatctatgagaaagcaccaagtggaaccaagtgccccaatgaaaaagtcagcttctattgccatcaagaagttgacaattggataatttgtactagtttccctaccgagactggcttcataagcagccatggacgtgttcccgacttgtcttctcacatcggtgtagtagaagttccagtgagagtaccctgtggacttgtcaataacttcctgtaatccatacattttttttttaaaatactgctaaaacaatgctaaaggaaataagtttgaaccaactatgtacctgcatttcagtggagatccagacgctgttgaggtgtgggaagcgccttctgatgcggtcggctagactcatgtattcttcgaattcaacaaccttcatttcgcatgctttgtctcccattctcacatgcatgctcagtaatggccgagggatccaaggcttatgatttgaccatacaaactcttcaatatctgatcttttgtcattcctaacatcctgcaaaacaaagggtcttcagattagcatcttggttgctgcacaaaaggaatgaattggaatgaggtgttaatggttagaaatctaataattttattcataactaatccaatcagacccaattttcatataattagataggaatttattgtaagttaggccagtaccaaagggtaaataataattttgattagttcaaaattacacaagtccaacataatcataagtcctaattaatatataaatttactctagttcaacatcaattaaacaaacaataactaggccatcagaccatctgcaccaagagcaattaaaacaagtctaacaaaatattaaatattcattatacaaatccatcaaccctaaatcaacatatatatagaattgggttggtcaattttattggattccaaaattatgaatccaatttttgacaatcggttatgagaggactagtcaatttggtcagttttaattggatatgaattgagacctataatttctgtgtatctgtgacaagaaagaaataattaagacagaaacctcttatgattgtttgttttgttcaactaccaatacagagaacaaggactagaatttccaaccttaggccactctccagcaaaactcttaagaaccatagcggcagcttccttcccgaatgctgcatggcgagcattgttgagtaagccgcatgtgtactcactttcaaatctcattaaatagcgtactgcctgatgcaatcaaagtatatcaacttatcatataatgtttctattttttttaacatacattttgactagatgttccagggaattcattgaacaaaaactcttacttgtgctctccaccatctccgatccattttgcgatgatatgccattaaagttccattaatttctgtagttggctgcagattattccaaggatcaccccatatcctacatttagtaaaatatttaatgatattaattaagcatgatatcattggtgtaaactcaaccaaaatggtttcgtatgcattatgaaaaagaatgtctattttcaccaattgtactttatctttcttaccttggagtatgtccagcccatatttgcttagagctataattttgttttactcttacaattccttcctgccatgcttgtttactctcaagaagctcaagcgctctgtctcggcaatcttgggatgtttctgggagaaagtagcaagaccagctggagcgagaggagcctgtgaattcagtaaacatatcagagataagattgcagtttaaattataagaaactagtatattcgttgccatgatatgttaagacatactacctttgcaaccatcatggtcagctcggttatagaagttggtcacaaggactcgtttttcattgattgcaagggcaagaacaccagccatttcagctagctgagctccaataccgaa

SEQ ID NO: 44217 - DNA, 2607 bp, Cannabis sativa
cgtattttttatgcagtattgtgcggtgcgaatgatttatacggtgtggacaatttaataaataccccatctttacttagttttgagaaaataaaataagatacgagataaaccatctaattgaaaaacaacatatacaattcaaaactgattaaatcaaaattattacttatgtattttctagaagaaaaaaaaaagaaaaggaagtaaaagagacacataggaaaatgaagtcaataaggtggtgtttgatttgaaataatgaagtaaaatagaaaagaaataattttattctatttttttgtttggcttcatttcaaaatattagaatgttatttatattttaattatgttttcattcattccaacaaaataccgtctaatgggatgtttgttatgtaaaattaaattagagagaatagacttgaaaaaaatatggaacaagtgttagaagagattaccactattttaatttgaaaagtgagactcacttaaaaatacaaactctttctaatttaaaatttaatttaagtttgacattgtcattgccatcaaagtttaaacctcgtaccaaacgcagaataagagagacacaagtcagtcaataataatgtttgatctacatttgatatggtataaggtacactctctcatatacttgacatttacaaattaagataagagacaatattaaagaattagtctccatctgttcaagagaaaacccaccatccccaagttagcttttctctgaagctcaatatccaaattgatgaattctaaaccccattagccatgccctattcagtcaactgtggaaaaaaaaaaggaaaataagatgtatcaaacaagacaacctaatccaattacacattcctataatgatctcgtttgttttgttcgccaatccgattgtgagtcatttcgttgagacttgtgcacaccagacagccatgaacgagctctggcgtgtcacgcaatgtgtttcttagcaaatatatagtatgtagcccacttcagacaactactcgtcatcaggttcagtcgaaaagtctggttcttcaggttttcgtagctttggcatctcatcctttaccttttgagctcctcttctggtgttagcagcaaaccttgaggccaatattgtaacaccaagattcattttcgtctttgaagtatttgcacgtctagaatattcttcctctccttcttcttcttctccttctcgttcttcttcttcttgttcactctcataggttacttgctcttccctagcaaatgattccttcatgcttagatcctttgtaagcttccttttcttgtaccgacgccaagcagcctggataaagcaagcagcccatgttctccaatggtgggagtaaaatcggaaggtgtgctgaagcttcttgctatgtaggcgcctaaattggttggcaacgaatttgagatcttcagctcgtaatgcaaaagcttcaacttcattcagtgccttgactgttctagttgaagaaggcaagtttaaggtagatttaggaagcaaagcccatgacagtaattcctctccacaaaaatcccctggtctcaatgtgattgaattgaagaaaccggttcgacctccattggtagtagaactatccagtgtacctctaatgatgaaaagcatctcggtaacagggtcaccctcacgaacaatgtaggttccagcagtgcttagggaggatactagtcgctcacatattgcatcgagcaattgatcatccatctgtgaaaagaaaggtacctgtagaatgataaaaaattgtagttaacgacaaatgaatcagagtagtgatgagaatattttcttcatcacaggtgagaagctcatatttaatagtaaacaatgtcacattgaataccaggaaatatcatacccgtcgaactaaatctaagcacagatgacgttgaatatcccgactaagatcagcaggtaatccacgaaggatggattcttcatcaaccccacgagttgcaagccacttgtattgaacaaaacgcctaacacgccgtcttaaatcttcggggagttgacgatgcctcatccattcctcagtgtctcttcgtttaagcctccactcctccagcctcacagtgatcgattgcagataggtctgcattaagaaacaactcgactgttcaatatcaaactagcaagaatatattatcatgagagaataaacaaactggcaaaaactgtaagttactcccatccctacagttcgtctaaaatagtcacaaaagtaatagatttcagagcccaacatcattagagagcagatagtacacttgaaatagtaaagattatcatttcgtccaccaacagtgacaaacaacgtactaaatactcccacatatacaaaatgcagtagtacaaaaatattttcaaaatgttccttgataataaatgtttagcagaaacatacaaagccgtccaacccagtttgagctagagaaaatcttagtgcaaacagtttcaaccagagtacttaaacttctagatacaatttactgacgaattgagaaattgaaaaggtccaaatacagtcatccaagagaattataggatca

SEQ ID NO: 44218 - DNA, 1970 bp, Cannabis sativa
gtttttctctacttatttggttttcaggtatttttgaacgattccgtggaattcttcatgaaggagaaatagacaaaagggttcaattcttaattgaaggcttatttgcagttcgaaaagcaaagtttcaggtaaaatctactgctcccatcaagtttggtgtatgcaggtgcagcactaattttataggacttattgtttttctttctgatatgtgaatctacagggttaccccgctgtgcgtccagaactggaccttgtggaacaagaagatcagtggacacatgagatttctcttgaagaggagatagatccagaaatcacacttggtatgtcttgaatcttataatttttagcagcttcttgatttacatacatatgtgctatatgtaacaacttcactgtaatttcagatattttcaaagcggaccctaatttccttgagagcgaaaagcgttatgaagagctaaagaagaacatacttggagaggagtctgaggatgaagaaggttcagatggtgaggatgatgaagatgaagatgatgaggatgaggatgagtctgacgaagatgaagaagagcggatggaaataaaggatgagacagagacaaatctcgtaaaccttcgtaggacaatatacttgacgattatgtcaagtgtggactttgaggaggctggtcataagctgcttaagattaaacttgagcctggtcaagaggtaagttaaagtttgtcttccaactgcttcaacattacttttgataggtgggattgtggttttctttcagggtaggtaatagtagttatctctcgtcatttcatttttacaatcgatcatcattaccttgttaaaactgtgctgtaggcaagagtgtgattaaaaaaacttggtacaatttttaattcctttgatttgttgcagatggagctttgcatcatgcttttggaatgttgcagtcaagagagaacctacttaagatattatggtcttttgggccagcggttctgtatgataaacaaagttcaccaggaaaattttgagaaatgctttgtccagcaatattctatgattcatcggctcgaaacaaataagctgcgcaatgttgcaaagttttttgcccatttacttggtacagatgctttaccttggcatgtattggcctacattcgtttaacggaagaggatactacttcgtcctctcgaatctttatcaagattctcttccaggtattaactcattgcccatctggttctttgtttaagaagtttttatgggaatatttattgtgaatggagcaataacttggtatttgtttttcctttgcaggaattatctgagcatcttggcatccgattgctgaacgaacgactctcagacccttcaatgcttgattcatacgagtctatttttccaagggataatccgaagaacactcgatttgccatcaacttcttcacgtcggttggtcttggaggtatcactgagaatttgagggagtatttgaggaacatgccgcgccttattattcaacagaacaatgcagcggactccgatgatgaatcatctgatagctcggagtctgagtcatcaagttccgagtcagaatcttcagatgagagtgattctggtaaggatgaaaagaaacggaggaagcgccgcaggcgataaagaaatcaagggagttattttgtagaattgagatttgtcttggctgtttaaattgtaaaatttggatacttgtgaaatgtttgacaaattttgtttcactaatttttgagagctaaagtatcaaatatgcctagtgataatagagcaagagtttgattagaatatttgaattagtaattaatacaacttaacgataataatataatgtttagcttaccaaattattctacaaatttaatttatatgttgtttatgatttcaaggatgatcattaaaaagagaatcatctttggtattttt

SEQ ID NO: 44219 - DNA, 3309 bp, Cannabis sativa
attattattattattgatgtataaataatggttgatgctttgtaaaaattactgattgaattttttattttgttaaatgataaagatgttcttattctttttaaaatagtataaatagtactttgaccttaatttttagcgatcttttgttatataataaatttgaagataatttttactatgaacagatacgtaaactgttttgtcataatacttttgtattaaattattattaagttttattttaataaaaattaatttaagatatttttttttttgaataaaagctgaaattttaattaaaacaattcttgcacaattacatcactaatgttatttggaatagtatcaatcgaataactacgctcatcatataaccatgagattctggcaagtcaatgagccacacgggttagcagattgtttaacaaaacgtaaacaaacatgattcaatttatcattttataaaatagagaatttaatcaaaaacttttaaaaatataaaattttaaaataatatttatccaataaataataaaaagcaaattaaacttgtgtgatttttaaatcaatctgcacatgatactttattgaaagttaaagcaagataatcccatcagtaagaatatgagaaacaattatataacttataaatgagaaaaagttgacaataataattaatgtataacaaaaatgaaattcttttttcttcttaagttttaataatgataatttttttaaaatttatctcaagtaaactgtaaactctgaatttttaaaattcttcacgaaaaatgatgaatatactattcataataaatacaatgactatttttaagagaaaaatagcctcaaaaaatatcgcttaagagtaatacacttcaaaaattgagaactaaaaatatcattgataaataattataaactcaatagtgataaaatatttattgttctatatataatctagaaataaatataggctaattataatttttgtccttgaactttgacatgtattaaataatgttctctgaacttttaaggtcgttaaaaatgtctcctaaacttttaaggacgttaaatatatttcctgaactgttgaaatttttagatttatggacttttgtccaatttttagttaagaaaatctaacatggataaaagtttagggaacgtaattttgatacatgacaaagtttgaaggacgtgatttagtagatatcaaaatttgagagcataatttagaatataaccaattataaaattagtaaaattgactgtaattagagtaaagtccttaaatcaaacaaattcaataattaagatgaaattttaaatggccaaaaaaaatttaggaaacatgatttaatgtttttttttaaaaaagtcataattagtctaatatatatataggtgctctaaatgttaatatcattattttggactaagatacttggttgtagcttgggaacatacaaaactttcttccaaagaatttatcattcttaatattttgaagcttcactttccattaaaagattaccaatctccaagaaatttttcaattttgggttcttttagaattaagaattttgaattctatttctaattataataattgtattgtaatacacaaaaattgcacacattatctacatatttaattaatctttatcataaattaaaaataatgtaatctccatataaaattatttacagtaaaaactaaaaatacatttttacctgtaaaaattatctgcaatttttgtgtctttagcattattcttgtagtttaaaaattttacaaaagaaaaaacatcctaaatattttttttttaaatttttttgtaacaattcattgcaaatttttctttcttggaaaatcatttttgatttttctaactattagattaattctttctttttcaatgtttacaaactcaaaggcacaaaaacacacaagggtaagtctataatatatccttttaaagaattattttagtagatttttttattgcttctgtatttaattagaaagttttttatttgatttttttatatatattattattgcattgttatagctatataggattatatttcacatgtaaattttttagaaaattttgaatataatactaaaaataagatttaaataactatttaaatttttttaaaaattagatgtgatacaaacataatcataaaaataacaagactaaaaataatcataaaattaaagaatctattagaaatttcttaaattttattcttttagctaagttcccgaagtccaactacggttttggactattggttttttttttttttttttattttacacaatttttgaggtaatttgtttgtccaaaggttaatttccttaattttatatgtaatttttgttaagtggaaaaatgcgtgaaagaataatagtaattacaattagtagcattcatacttgatagcatagaagtcaaaaaagttgactctaatcccaaagtcttgtctgcaccacttacacttatttaactcaaccactcttttttacccaaacccaaaacccaaaactccacacattcacacttattggccaattttgctcttacattacatttagtcatttaccacaacaaaacccatctatggaatcacaaacaaaactcctaaagatgtgttagcctcattaattaataccaatacccattttacaagaacactttacttcaactctaattaatctctatcactttctttgtttccattccaaaaagcaaaagcaaaacaaaaaagctctcttattatatacattattatagctttagctttcctttattaatatttcaaactatgttgttgtgtataaaaaacaaagcttacaattattatgaccaattctctcaccaaacctatcccattttctttctaaaattacaaagaaaaataccattacatgaagaaaaatatgcttaagggattttgtctaatagcatcatgcatgatgtcataggaagtgtttatatgtaaaaattaaaaaggctcgagtaatttacagtataaatatttaaatttaattttaacagtaataatacttattcattttaatataccactaaaaaaataaaatgcaaatattaacatatacatacattaattccaaaattataaaatagttaaaatatttacctcccaaattgctctaacaattattttaaagtaacatgtaaccatttataaggtactaacaatgctataattcgaatgagtttggtttgattatcatcaatcattaatcattaatcatcaaat

SEQ ID NO: 44220 - DNA, 1648 bp, Cannabis sativa
tgatattgtagttaaaaaatgtggcaactgacattcttctaatagtttatatagctgacaagaatagaaatgaaatagtagtatgaaaattcgtttgaaatgaccctacctaagaggtccacatgatttaagaccctttccccataaaacgaagtataacgccgttatgccaccatttattatagaaggcactacctggaaaatagtaaacatactaagatatatgtacaacaataatcatatgagctgaaattgtttcatgcaatttctagtaaaggtaacaaattcaaagaacctgtgtatttgagagcggtctacccttccaaggcttttgcaaaacaaggaataggatggatgatgggaccagacaagtgaatagaaaaagaacaacagaagtacctgtctgagacaagtaccggtatagagaataaattgaccatattctcatgaaattgccaataatatgaataatttgcattggcatgtgtctgcaatataacaagatcattggtgcaattagtcgatgtttaaaagagcacgtaatgagagcaaatgaaatattaatcctactggaaataagaatgaagacacctatgtaaaaaaatacaataaattgtacactatgtttttccctttttatttctcttctcaaagaggagaggggttgaaggagagtgaggggaatgaaaatgaaggaaaaaaaccctgaaaatgttaaaaaagaaaaaagctgtagaagcttgaaaacacagccaagtagtctgagccacaacagctcgtgactactacaccaataagggccaagttcctcatccatattagaaaagataagagaagtagaaaaacacccaaatagctgtgttgtactccttatgacaacttctgttaacccaagtgttaatagtgccccttattagttaatacaaagaacatgtacccatcactgtgtcacaagattacaccaacctagaaacactattttcatgaggaaaggaacactaccggaagaatcttgactagcattaaaataagtactagggcttaacaggtatagtaaatcaagatatcgacatgtgttacgaaactggaacattacatcttgctgttaatatcaaaaattttctcgagaaacaaacagaattttaaacataaactacaatgcaattaagagaaaatagcataaccggtgattgataagattacctgaaatgaggagaagatcgtcgatcttcaggaatttgtccaggagacatcattttcaaaattaaaaaagttacaaaatcaagttttgattatgcatatataatctttgcgtccattacagattaccagagcttctgcttcggtttcttgacaacgaagaagataatagcaaacccatactactttgcaaagttgatttccccattcctctctctccccccgtctcttcttcctcaatcagctatgggccgctattttgagcccattatcagacggagctgggctgcatctggcccaatatgtgtggcccatttactatttgttgagataaaaggcccaacaacttgaaagttgatttttgagggttttggagtaccccgaacaacttaccttcaaaccctagtcctcatctagttgctccttgctccttgctccttgctccttg

SEQ ID NO: 44221 - DNA, 2634 bp, Cannabis sativa
atatcatatcatatcatatgagaagtcaaaagtgaatgagaagacctcccatgggagctctatgagggattccctttcttctcttcccattacttctataacttaaaccagttgttgtacccttcaaactactcatcttattacttcttctattgttgttaaagtagttgctgatattgctgctactactcccaccagactcattttcaacctcaccttcttcttcttccacttcataaccatcaccaccccttttcttctttctcccaacaatctgtgaattcaattggatattagtatatatataagcattcataacataatggctaattatgacttttgactctgaattgaacttttcgggccgttaaaaattctgggtttcttgtccaattttactatgattaatttggtatatcaaaattcgaaaattgaatcggattagacagaagttgttaaatctaacaatttaaaaatcataactagcattatatgaaaagggtaagagagattgaatgaatgatgaccttgcaagcaagagagcagaaagagaatgaatcaagtagtgttctgtgacaaacaaggcatgtattggtgacacctttaccaggcctaggttgaggcctttcattcaagaacacaatccttgcactgttgattatgtatgtttgtactccacttatatccacatgtttctgaatctctgatactcttatcacatcatggtaagaagacctccttatctgacaaaaacaacaatcaaaccccatcaaaccaaagaagaagactacacatgtatagttatagttacatgtactactgttaatctcctattacagtaccgaaattctgtaactataacgaatactgctatttcagacgtgaaaattaactaagagattgtaattagcacttatatatacctgaatggtattgtgatttgaatgagaagaagagagacatagagagcaaagggcaccaaggtgtaagcaatccaagcagaacatattacattcactcttgtgtgaatcaacatggattttacaaggaacaaagaatcttgtttgaagtaatggtttaatccatggaggccatttactactacttcttcttctaatcaattcttcttcttcttcaagtgtttcttcatgtttatcttctggtcttcctcctccctgtcaagaatcaaactttactcataaagatcatatttttattattaagagacaaataaacaaacaagtagtgaacaagatgatgaaattgattagtaccatgattcttctgcttttgggtttgatttctctgactgttggagtaggttcttgatcatgatcatcatccatgtctttgtattgggaaaaacaaaaatgagaaaaaaggaagctttttattgtattttttagagaaagaaaagaagggttaaagggttgtgtgtttcattggtttgagtgtgtttaaaagtctaatgaggattgggggagaaatagaatagtaggaatgaatgtgttttgttttgtttgtatgtgaaaatattgctataagttattagtggtgtctaatattgttaagaagtgttgttttgtgattagttagtgagattttataaaggttattattttaaagggtaaatggtgacgaaactcttttattttaaaagttaaatattaccgtcaaatattaattgaataactattgtatacacctatttatacatgacagtaaaactttgaagtcaatacagtagtaatcgaattatatataattgacgccttaattttgtaaaaaaaataaatataaaagggttttgctaataaaagaaaaagcgagttaagtgtataaaattaaaatataaagaggtttcgcggccaataattttattttaaattatgtaagacccgatacttaattgtacaataattataagatactttaattggtattagatactaatagtattttttagcatttgtgaaagacattagtcatggtctagcttcttcttatttttttattatttaaaataataaataatatagaataaatagaaaaaggaatggttggagaggagagaagagaataagatgagaagagaacaaatggtagttgaataaaaggaacacttggaagttgaaaagagaaacacaacacaacacaacataacataacactacacatgagagatgatataatatgatatgatagggagtaagtggatgaatcactcttaaagtcccatcccacacacacaccataataataaataaattattaaaaagtgatgtgtgtgatgattcatcacccaaaaaacaacatcactacactacaaataaatgccacatcttttttttttttattctttttattattattgtttagattttgttaatagaaatttataaaaatataattttttaaaaaaattatttaataaaagaaattaaaaacaatataaaaaaaatagcataaaatacttagttatccttcttatggtaactcgttactcctctgattaccataagagtacagagttactcttacctaattttttcatatttttttaatttttttttttcaattttctataaaataatatttttgaaagaagccatatttttgcacataaaaaccaat

SEQ ID NO: 44222 - DNA, 2871 bp, Cannabis sativa
tataaaagaaaaaaaaaaggcttggacagtaaaaaagaaataattaccgtgtggcagtattattgtaaaatttaggaaaaaaacagtatttttgtaagtttcccttcttattgcactttattttaccaattggatatatgtatattatctataagtacactttttattaaagttaatctcactaaatgggtgatagcattgataggtagatattatctgattatttcatgtgataaattattagtaaaatatgtcatttattattttttttcacagggctcaatggttgattagagattgagaatgagagagtaaatataaagaaagggcattattggaaattcagaaagttaaagttgatgagagagaagggttggaaagtgagagcaggtaaaggtaaccgttgtgcaagaggtggatttgatgagttggaggccaggttggcagcccagccctacgtgacacatctgtgtaccccaccacagaggattactccctccctcacatggtctcgctggtcgttttggtacccactacaacagtctctctaaacaaaaataatttgattccgaaaatacccttgcactatccattaaatgcaccattttctctatcatcttcctcgttctaacatcacactcgctcaaaccctagagctctctcccagtttcagaacttgaagcgattttgaactaaagacaaaacaatgtcgaaagaagtaagtgaagagggtcagactcaccaccatgggaaagactatgttgacccaccaccagctccactctttgattttggtgagctcaagctctggtccttctacagagctctcatcgccgagttcattgccaccctcctcttcctctacatcaccgtcgccactgtcataggctacaagaagcaaagcgagaatgaccattgcgggggtgttggcttattgggtatcgcatgggccttcgggggcatgatcttcgtcctcgtttactgcactgccggaatctctggtatggagttaaacacttttaactcagtgtgaaatttcaacaaacggtatcgttttcttaccagctttattgaaatgggaattttttgttggttgtctacaggtggtcatatcaaccctgctgtgaccttcggtttgttcttggccagaaaggtttcattgctccgagccgtgttctacatgatcgctcagagcttgggagccgtctgtggtgttgggcttgtaaaggccttcatgaagcatgactacaacaaattcggtggtggagcaaacaccgttgcccccggttacaacactggtaccgcccttggtgctgagatcatcggtaccttcgttcttgtctacaccgttttctcagcaactgaccccaagagaagtgcacgtgactcccacatccccgtatgttcatcttctcctcccttcatgtcttttctttttctttttctttcaatgtcccttgcatggtgaaatcttcacttgtgaacaagtaattaactaactaattacaataataaacatcaggtcttggcccctcttcctattgggtttgccgttttcatggttcacttggctaccatccccatcaccggtaccggtatcaacccagctcgtagcttcggtgccgccgttatctacaacagcgaaaagtcatgggatgaccacgtaaggatattagtcagaccaatatttgtattttaaagatctgaatatgttataatattttacagtgttttgatacatgggttcttgttttgttttgagcagtggattttctgggtcggaccattcatcggagctttggccgccgcggcgtaccaccagtacatactgagggcagctgccattaaagctttgggatcattccgtagcaacgctaccaactagaaaattaattattaaattcataatttattttgtttggttgtgtgtatgagaggttgatcaatgtttaatttttaatttttaattttttactttttctttttttttttcggtatcatctttcatattttaaaatctttttttttttgttagcttgtgaacctgtgtattatttgttcatgagtagtggtgatcagaagaagtgttctttttattctcttcttgttcttcttctcatattatatattatccatttaattaatatttatctcttggctaattatactccctatttcccagaaagcaaacaaagtaatttattgtgtttcagagtgttatttaattttgtcgtttttcacaaattaataatgtaacccagctgttaagtctcgatccatctggaaaggtatttccttcaaaaactggcaaaacatatttaacaagtgttttttcttattttagtttaatttcaaaacaagagtccaaagttagaacgaaaaagtaaaaagaaaaaagaaagctgagaacggtagagagagagatgaagtagacatgataggaatcctgtgctgtgaaattattgaacactagacacgtgtcgtacaggcagtgtgcttgcccgtctgtttgtcattgcctcacatgggtgggtgaagcttgataggtctggttcactgcttttatccactgaatcttaaaatttacaactttatttaaaaataatgatattaacaattaattaagtgaatggattgggaaaaatgataccgagattgttatcaagaacttaaaagtgatggttctatttgggagattgtgaattatgtgcgctattgcaagtttctctctatttttatgattaattgtaatttttcttgtatagttagaaattgtaactacgcggcctataatgtggccaaataggtatttgctaataaaattacgggtataatagagatatttaatatcttttgtaatgaccatgaggt

SEQ ID NO: 44223 - DNA, 2123 bp, Cannabis sativa
  modified_base (692)..(696): a, c, t, g, unknown or other
aatcccaattaattatgataatgcctaaagggaccttttttgtatatatatatatatatatataaaaaatacccttttacaaagttcaattgcaaatgaaggtaaactaattggttgattcaatcaaagactcttgtggaaatgtggaccataaggaaagactaaagaaagagacatcattttatggttcaaaatgggtggcttttcgttttgaataagagcctcagaaagaactcacacacactaatgatcccaaaaaatgacccaacccacttgttttttaatttttatattgagattgtcgtagtaaatgtttttgttggatttaagaccatctaagttttataggtttatttgtagtgtttatgttacatttaatagttatcaaatttaactctaaatagagttttgataattgaataattattatattttgtatggattctatatagttttaatcttttaaattttttaaatggaataatttattgaaaatatgatttgaacaatttattgagcgtttatatatcttttttctttgtatgcactgctggagtgctaattacaacattttattataattttttagtcaactttcatgtttgaaatcatatggcgaaatgtttttttctaatttttttttcacagcggtattcgttatagttacagtatcatccctgtaaatttttgannnnnttcgaatagtttacaataccaaaaacatagttcctgatattccagtttactacgcgtgttcaaaaaactttaaacgtatttttcggcactgtaaactattcgaaatctttcaaaaatttataaggatgatgttgtaagcattacaaacaccgccgtgaaaaaagaaaattgaaaaaaaaaatattccaaatatatttttaagcgtaaaaattaataaaaaagttgtaattgacggttttaaaacaaagtatttcaatctgcaaattatttatgtttctcaaaatttctacaaaacaataatcataatataaatcaatatacatatatataaaataaataatacatttttttgggatatactctagaagctctttgtatttattatagacaattttaaaattggtggaacgttgtctatacggcgttagatgagacctgtctagaagtacaccaacttagatatatataacaaggtatagaaccactcttctttatggatgtatgtgaacttgggatgaaaaatttcattcaatgactgatgagttttgtccttaatttaataatcttatgcaaattacatttataatagaatataatttgtctctattcaatcaagaatagccaattcaataagctcgtgatctaaatagtactcacctctccaatttctatgagcctttcttcactcttcttttttcttattaacaatacaatacacataattgaaagttgtcatcatgtgagcccattttgggatttgattctaatttggttattgtgaaatggcatgttttggttggtctaaggtcccataaaatggcctactaaattgggtcatgtcatgtatataaaataatattagggtcactcacctcatcatctcacgtctttacatatttatttaattgtatgaaaagggataccactatctaaattatatattattattattatattttagatcaattatgaaataaaacaaataaacatgtaaatctttaatgttagaaagtataggagattttaccgaaacttttgctgaacagcatagtagcatacactttttaaacccagccatgttgttgtaccacttactctgtttaacataacattataatcaagaggtaagatacataaatacttgaactttaaaatacaaaataataaaaaaaaaaatcaaaaatattattttttaatattttatttataattttacagcataaattttttaattaaattacaaaaatacattttgttcagctaaagataattaaaaaaaaaacaaaacaagaaatcaatcacgacaactataaatcaactataaaatagctagaaaaataatctcataataactagggtaaataccattttggactctgtgttttgcaaaagttacagattggaccctgtgttttgttaaatgacaa

SEQ ID NO: 44224 - DNA, 2428 bp, Cannabis sativa
gttgtcaaattaatacttagtacgaccaactaataattataataataataataattgaataaattaaactatgaagttttaataccatgtgtaatgtagtcctaaaatttatgatctaaattatatgaaagaaggattatatagcaattaataggaaaatagacgattacctaccgacatataattacatctgaaaatctccgtctttggaattggacttctcacctctataaatacaaatatattcctagctagctccctcacataacgaatccaataaacctcccccccccaaaaaaaaaaaaaaaaactctcttttgctcttccatttctggtttcgatcagctccaaattgaaattttcatctcttcccaaaagtttctggaatcttctaattcatcaacaaactcttctctccaaatatatatatggtaagttttcaatatatatctatatatctaaatgtgtttgtagttttttatctatctctatcctgtgctatattgtctatacgtttttttcatttccttttcatggtgtgttcttcttctttgttgattgatctccgtaaactgactgatatattatttgactcgttcatgaaatgggatatttttaagcagagaaagctggttgttttttacttattaatatcgaaattagtttcatattatataaacagttttctcgctggctaggcgttacttaatactgtggttcttgaattattttttattatttgcattttgttggaataaaatattagtggtcatgtatgagaaatgggaagtggtcactaattcgtataaattagtgggaatatcatatattatattacacataaaagtgggcttcgtacctttttctaaatgtgctttattatttgtccatttcgttaaggccaagacagcatgagattcgcttaagctcaaatatttatgctcattgttcaaacggccggagtactctaactttcgcttcctcactacgacctaaaaacgttatttatttttttattttaaaacaattaaataattaatccctcctcaaaattttaatttacaataattaattatatttttcatcaaaaactatataattagccctcttaatttttttttgctggtttttcgccccttagtaaggtaagttcgtgcctccttctctcgcctaataaaataatacctgaccaacctttccttattaaaaaaagaaaaaagaaaaacaaagcaaacatgcatttagttttcaacgtttcaactcatttttcttgttttgttagataattatctaaaaaggcttgatgataagtttaagcaatagtagtgtttctttgtttccttaatcaagatggcgtggaagctaattaaagctttattattcaggatctgaattttttttaattagcctattcaggatataattcaaattgttatatacctagtccaaaaaatttatatcttaccacccgaaggccattttggtcttcaatccaattatttgaatgattgtgtatgtactttgaatttatttagaattattttgtaaattgtttaaaaattttaaataatttacagtattaaaaataaaattcaaataactgtttatccaaaatatttcattttattgtagtcattgtaaattatttaaaattttataaaaatttacatgtagttctaaaaaactataacatacataatcataaagaaaataacactaacaaattctactaaatattaaataaataagtgtaccgacccttttaatgtattaaaaatatcacctaaaatatgatattcaattcgcttatatgatgatattaacatttttgaagatgaattatattttttttttcttttcatttttgtggttggtttataagtatatttatatatatatattttaggatttattttgtacatcatattatacagttttttgctggataatattatattaaattatattttatgcaatattttttatataaaactatatgtgatatactaatttttatgagtacctaaatatacattattttaatataaattaaaatttaatataatattatataaaaaagtatgaaatataaattaatttaatataatacaatataataaatgagccctatttaatatggtataccaaatgagcccttgataactaaattaataccgaatcagtactgttttgtatcttgcttttttaaccgttactaaaattatttattgttgggccatatatatatataaataaatataaaaatatatatcaactccttatgatcatcacttaggaggctatgtttgaaagtttgattttagtgagaaaagaaaaaagttggaaaattataatgataaaaaaatagaaaataaaaaaaatgatcatatttggtatggaagaaaaattgtatagaaaaatattcaat

SEQ ID NO: 44225 - DNA, 1095 bp, Cannabis sativa
acacaaatctatattcgattatgcatataaaagggcaagagagtatataaaaaacgagactcacataaagaacgaaagcccgattcaagtacaaagtagcaacaaggttattatccatttcatcagcttgtattggagcaactcgcaatgcctgtatcacataacaaagtaaaaggaaaattgcagttggaaaatcatttatccatactaaatatatgaaatttgtgtttaatattaaagtttccgtttcttttttcttcttatactcttgtgctgaaactctagcaaattactaagtaagctggcatgagaaatcgaaacccacacctcgtaggagccgagaaaataacgagcttttcaaccctactctcatggttacattgaaattcaaagattgatattcaacattagagaaatcgaataaaagctattaataagtatatgattctaaagagagtaaaaggacctgagaataggagtccaaagcattgccataatctccggtagcgaagcaatgattacccttgaccttccacttcaaagcgtcctccttgttcttcccacacaaagccctatctgagccagccaagtctttcaccatctaacaacaaaatcctcaaatagttagaaattgtttgagagaagaagatggtagtacagagagagaaacgataccaacttggtgaaagagcgggaaatgaagaagaaaatcgagaagagatgaacatgtttgaggaagattgtgttcagtgctgtcccacaccattcgctttaagctctctggaatggccgatttcagcttctccattttcgcaactcactcagtggaagtgtatcggatcggacaataataaccaacaccagcgggaacttcctttacttgagcaatttcttttcctttcagtttgctccttccctttattttgttttgccatttttggtcctttattttgaaatttcctattttagcaattaaattctacttttatttcaatttgatccctatccactctctagccccacccatcccacctaatagctatttggggtctcgatgatctctatttatttaaagagaaatgcttagagcacctc

SEQ ID NO: 44226 - DNA, 2107 bp, Cannabis sativa
tttttttttttataatttcaacgtgtttatgtatatttttttctatttcataataataacaattcagttattatagctagactatagtccaagtaattaaagtccatataactatttaaatatttaacatcatctggatcaattctacgaattaggtttctttattttcgtttaatatttatatctattgatcattttgtttttaataatatatatagtctggtataatataataaacattgagtttaagtgggtctttcttttggaaatactttatttcctttaaataaatataaataactttaaaatagacaaataattttagttgaattcatgtgatgtaaccctaactataatgctttttttctttgtttaataatgagtcatggttgtatatatataaaataaaataatgtaatagccaccatcataatttaatatcttgttgctgcattattcgacattattatattctgaaagcataagagaaaaaaagtagattgaatacaatcaatcataatattttatacacttttgtttcaatccttcattttctttttatatttaaatatatatatatatagacatgattttgtctcgcgatgtactttcacggaatgtattttgtgatgtacgatagccgttaaatggatgagttatttgatctgatgagggctaggggttattctagggataattaaaattaaaaaatggtaacgcaccctgagacacatttaatgtatcgtgagactcatctaatggggacaaatatttgttggagtgatatggagagataatgttgggattttttttttggacaaatatatacaatattgtgatttttttttttttttgtaaaatttataatattgtgtttggacttagtgaactgagcttttgaattcaataatgacttcaacttcaaggcacactcactttcattattttcgtttatatatatattgctaaaattatttaaacgtaatcattattaagatttaagataggaatgatttttcatttttgtggcttttatttttaatacggacaataaatatgcatattatacatatacacataaattagaaaatttagagaaaaaaaaaaaaaagaagaagaagagaaagagctcaaaaaagttgcactctgagagagagattatttcaaaagctacttgaaggctcaaaaatcatacaaatatatttatatatatcatttaacttaataaaaagtataaaaattatagttcaaattagataacaatttatatatataattgtattgtatggtgccatggatagactaggactttcttgtgcaaagactagaaaatatatatactacatgaggaaaagaaaactttacatgtttttgttttcgtactttatacgaaatacactttataaaattgatcttttctgaaaatatctcatctacaagatagtatatatttctcttttgaggagatccaaatttcaatcccccctctaaaaatatatatataaaaaaagtatatactagataatatttgtgttaaaatttatatattattagctacgcgctaaatattaaagttacttttttatttaattcacagtggcataactagctattgaaagtaaggggccaaatattaaagttacttttttatttaatttacagtggcgaaaccagccattgaaagtagggaagttttttttatttttatttaagagtttatatattacaactatgttttaattgagactcgaactcaagatctctaacacacacatctatttatgaccacttgagctagcctcaagtggtgtagggaggccaaataaagtgtaattttttttttttcaatgaaagttacttaaaagtacctatatatatctatttaaattatatttcaatatatgtacagtaatatcttgtctattaaatttaggctaatgatgaatttttcatcccgaactttgacatgtgctaaattatgtcccctgaacttttaaggtcgttaaaaattctccctgaactattgacactattagatttaaggacttgtctaattttagtaaaaaaattctaacatagatgaaagtttaaggggcatgatttagta

SEQ ID NO: 44227 - DNA, 2103 bp, Cannabis sativa
tggctaaaagtaaaaatttttgtataaaaaacaagtaattttttttttaaaaaataaaacgtgcctttaatagataaaaattagacaaacagctaaaaataaatttcttcccccaccataaaacaattaaaaatagtgtcaaaaataaaataataaaaactagctaagcataaaattgatttttcaattaaaaagaaaaaaaaaacaaagaaacaaatggtgatgaatatgtaggtaggcagtagtagtagctaggcaaatgtaaataaagagggattaaatattgatcaataattgaactgcctaaacagtcatctgtcaaaaaatgtaggacttacgaggtgtatgattcaatggaagtagcatgtgatttgacaagtcattcacaatcttacacacaataataataataataataataataatggctctaaactctatatatacaataatcaatttattctagctactctattttattttattaagaaaatattcagttatgttggttatatttgtgtcgtcttttgacccctcaattatagaatccaagtttgatattttttatatttgtttcgaaaaaatatatattatcaatcaataataattgatctatttgtattattatctggagagggagtgactcgtgtgagtcgtgactaaggaaaaagtgtttaaaaacaatttataagtaaaattaagattgaattgtactaacattttttgaaacattttttttcaaatgagaaatcttgttacaggttagaacatttaccatcattttggcttgttgtagaattttcaagtatattttgtgtgtaaatctcaatgacattaattaagggtggaagagttgagttttctctgttctgtttactattatctctaagctttacactgtatattgtaattaatctcaagtaatttggaaccaatggcccatagaacattataccatttaagtatatgttgagttctctagtttcattcttgctatactttttgagctcagcaaattgtagataaatacatttggactcggatcctacttggatcttggccttaattttaaactcgaaaccgatcccaatcttaacccgatttaaataaatttaaaaaataaaactaaaatttaataaacacactcaaaaaatttaaaaacaaaaatttttagttgaaactttaaaaaaatttcggctgggtagcaatttttgtaggatgtcaaccaatcccatacaatcacagtttcaacaaggaccaaaaactattccacataataaatgtaattggatctccaagaacgtacgtctacctacagtaatgtcccatgaaatcagtgaaaaaattaatgctataattggtagactattttttcaacatgttatgaatagtaatattaattaaagccaatgtatttaaagcaacaaggtgaaaatatagattgtgtatttttttaaaaggaaaaaagaagaggtgaaggagtaggagatatatttttgctcgtctggttgtgaaactcaattcatgatattcatgatattatagccaaaaatgtgaaattgttgtatgtgtgagtattgtaattattctaaagaaagaacccttattaataattataggccttattttatggtcagaattttagaatgtctagtttggtactagagagtctatataatatttattaatttttatgagaggtggtaagaattaataatcattactagtttctctgccgtaatgtagatgctatacaagtaccatgtattgttggcccctataaagattttgtaaaacttcttaattattcttcatcagaacctatagtggagtgttacttgttttagagtatatattctctgcctctccaagtaccattatatttattttaaaaaaattacaatatacaatacattttttctctaaatgccattaggagaagataaatttaaataaaaataaaataaaataaataaatacttgtatgggagagaaagcaaagagaccaagaaaggccaggacaaaactttataaagcatatatgcaggtaagaagatgttttaattcattgatgtgaaccagtcacttccataattggcattg

SEQ ID NO: 44228 - DNA, 3757 bp, Cannabis sativa
gccttcatgtacttgtaatggttgcacatgtggaggagtcaaaaggcttcaagaccattatcatatggagtacatcatgtcattcttgatgggactctcagattcatactctcaagttagaggtagcattcttgacatggatcctttgcccaaagtgaatcgtgtgtttcatcttgttactcaagaagaacaccaaagaggaactgcttcaaatatcaacaacaataactctgccatggcatttgcgttccaagggaataaaagaggaaatcagaaggatgataatcagtcaggaaaatctaatcctcgtaaaagaaatcgtccctactgtacccactgcaacatccatggtcataccatcgaaaaatgctataaaatccatggatatccctctagttttagtaggcaaaacaaacccaaggatgctgcagaaaaccaggtacaaactggggaagaaaataactctacttcgaatgaaagtcatgctgttctccctcagctttcctcggcccaatatcagcaactgctgaacttactcgcgtctcaaacaaatggtatgaatggtagtgatcctagtacttccataggtaatacatgtatcattctatcacacaattttgtttctcctttgcatgattcctggatagtagacacaggagccactagacacatatgttctaatatcaagatgtttcaatgtatatgtaagataacaccaactaaattaattcttcccaataatgatagtcttattgtaaatcaaagtggaacagtcgttttagggaacaacatttccttgaaaaatgttttatatgccccccttttcaaatacaatataatctcagtaagttaccttactaaaaactctcctgtctcgttttatttcactgctaattgatttacaatgcaggacaatgtcagcaaggggacgattagaagaggtagtactgtcaaagatctttatattcttaatactacaccaaatccaagtcatgtcttctttgtcttggctgagatttggcacttacgtcttggacatttatccaacaaacgtttgaatatacttacagatactttgaattgtaacatttctaatttacacaaaaatgctccttgttatgtttgtccaattgctaaacaaagaaaacttccttttccaaataacaatactgtttctaataaaatctttgatattgttcattgtgatgtttggggaccatatcaagttgtgtcacacacaaaccacagatatttcttgactttagttgatgatttttctaaattcacttggatttttttaatgcagcataaatctgatgttagcttcattatacctcaatttctgacatacattcagactcaattcaagctgatttttaaaatttttcgttcagataatgcaccaaaactggtgtttaaggaactgttttctaaacacggcattttgcatgagttctcttgtgtcgaaacacctgagcaaaatgttgttgctgaaagaaaacatcagcacttgctcaacgtcgcacgatctctttattttcagtcaagagttcccataaaattctggaatgaatgtgtattgacagcaacgtatctaatcaatagaattcctactcctttattgaataacaaaacgccatacggattactgtttgataagttgcctaattaccaacatctttgctcattcggatgtctggtttttgcttcaactttgtcaaaccagagaaataaattctccccaagagcctgaacttgtgttcttatgggataccctgaaagtgtcaaaggttataaactatatgatatcaacaataaacaaatgtttgtatctcgaaatctagtgtttcatgaaaacatttttccatttcagaaacttaataatgaggatgctaacatagatccttttactcatactgtgctccctcattctacaataactaacactcctgtctgtgagtatcctacaggtcctagtaatgcaccaaatcctcctattcaaataaatgagatcagtaccaatttaaatcaaatagaaggagattctgcccctactgttgcaccagaagctccaacacaacaaacaacccaggatcctccaagaagatcgagtagacaatccaaaccaccgagctatctaagggattttgagtgctattcactcatccaggatcattcttccacaccacataatattaataaatttatttcctactctaacttatctgaatctcacaaagctttcattttttgcaatttcttccatcaaagagccaagaacttattttgaagccatacaaaccttagcttggttggaagccatgcaatgcgaattaaaggccctttcagataacaaaacctagtctatcgttcctcttccagccaacaaaagagctataggatgtcgctggatttataaaattaaatacaatagtgatggcagcatagaaagactaaaggctcgtcttgttgcacaaggctacacgcaacaagaagggctagatttctttgatactttttctccagttgcaaagatggttactcttaaattacttcttgctgtatctaccattaagaactggcacattttacaactcgatgtcaataacgcctttcttaatggagatcttaacgaagaagtttacatggcacttccacaagatctcaccctgccttcttctcttaatgtaggaacgaatctcgtgtgcaaattacacaaatccatctacggtctgaaacaatcttccaggcaatggtacaagaaactgtctgatgctcttctccaataaggattcaagcaatctcaagctgattataccttgtttactagaggatccgatgataatttcatagctcttctagtgtacgtagacgatattatcattacaggtcctaatgtatccaatctacaccagctgcagacatctctacatcaaaaattcaaactcaatgctcttgaagacctcaagtattttctcagttttgagattgcccgtgctaaggaaggattatttctttgccaaagaaaatacactctccaattacttgaggattcgggtttcataggaagcaagcccagcaagacacccatggatcctaaacaaaagcttaacaacgaagaaggagagactttagacaacccatctcattatagacaacttgttggaaagcttctctacctcaccttgtctagaccaaatattacatatgtcgtgaatactctcagccaattcatggaaaatcctcgtactactcatcttcaccccgttcatcacctcctcagatacatcaaagggaaccctggacaagggcttctctattccaaaagctcttcagtgcatctccgtggcttctccgactcagactgggcatcttgccccataacgagacgatcaataaccgggttctgcatcttcctcggagatcgcctcatctcttggcgcacaaagaaacagccaacaatcttgaaaagttcagctgaagctgaataccgagcattggctgccaccacaagtgtagtcacttggctgcagtatctcctaaatgacttccacatacctcaaccacatcttgcattcatttactacgacaacaattctgccatacatatagcaaacaatccgaccgtccacgaacgaacgaaacacatagagctagattgccatttcatccgagataagatcaccaactgctccatcagactcatcccaatttccactacactggaactagctgatgttgggaattattttaccag

SEQ ID NO: 44229 - DNA, 5688 bp, Cannabis sativa
  modified_base (5308)..(5310): a, c, t, g, unknown or other
gattgcaccaatccaaacgaaaaccgaattttggatttttatataaaaaaaaatcgaccaaaccgaccgatgctcacccctagcaagaaacaagaccccctttcttgaaggtacttttcctcagcccctgataatgatccccttctggatttttggattcgttgtaatcagctggtaatgtcatggatactacactcggtttctcctgaaatcatgagtagtatcatgtattttgatactgcatctgaaatgtggactgtgttaaacaatcggtttaacaaaggaaatagtccatgcatttttgaactaaatgaaacactaacctatctcaatcaaagagatgattctattagtccatacttcacaaaactcacagctacgtgggacaagatcaacaaattaaggcctcgaattccaagcacgtgtgctgctgttgcacaacacttggatcatcaaaatcatgatcaagtgcttcaatttctaaagggtctgaatgactcatacaaggttgtgcgtgatcaaatcttacttcttgatccatgtcctcctctgaataaagtcttttaaaaggtaatcaaccaagaaagacaaagatcactaggccatcgcatgattcccccaatggctgcctcaagttcttctactcctcaacaacctgcccctatagcaattgcagcatccaaaaataagaggccaagacctcactatacaaatttccaaaaacctggtcattacaaggataaatctacttcctaattgggtttccccctagctatggcactcgaaaaccagctgactccaccaacaagtcacttcatctacacctgatctttccaactcacaactcacaccagctcattgccaacaacttatttcaatgttggcacaacaattgcagcccacaaattcatcaacatctactgacaaggctgttgtgaacaatttttcaggtatctctaaccctttctcatggattatagatagtggtgccacacaccatgtgtgttgcaatcttgattgtttttcttccattcaatatactcctacttgtttttctgttcaattacatactggtgcaaaatttaacattcatacgattggcactattactattaactcacacataacactcaccaatgttttgtttgtgcctgacttcaaatataacctactttttatcagtgcactcacacataacaccaaatccacaattttgttcaatactaacggctactatatccagtacccttctctaacatcgaggattgggatagctaaaagacttggcaacctttactacctgcaacaaaccaatcttgaggataatatttcagtacaaacttgtaatgttcacttgaataatatccaatggcatacacgtcttggacatccttcgataatgatttcaaataaactcaataagcaattacaagttcctgtaatttcaattccttttaattgtcatacttgtcatatttcaaagcaaaagaaattaccattctaatcaagcaataacattgcctcgactatctttgatcttgtccatatggacatttgggggccataatctattacctctattgaaggttataaatatttgttaaccatattggatgatcactcaagacacatttgattatattttttaaaagtaaagtcagatgccattttggcaataaagaatttttttcaattcataaacactcaatataaaacaaacatcaaagcaattcgtaccaacaatgctaaagaactcactctcactactttctatgctacaaagggagtaatacattacacttcatgtgtagggagaccacaaaaaaatgttgtggttgaaagaaaacatcagcacatactcaatgttgctcgagctcttgcattctaatccaatttacctttgcaatattggtgtttcatggtatctactgctgtctaccttttaaataggaccccatctgtcctactaaaagataacacatcctaccaactactccataacaaaccacctcaatattctcaccttcgaaactttggttgtctagcatacgcctcacatgttaccacaacaaccaagttctcccctcgagctagagcacgtgccttcattggttaccctcccaacatgaaggcctacactctcctagaccttcaaaccatgaaaatattccattcaagagatgttctcttctatgaaaatatttatccatttggcaaagtctctcaaacacaccacatagaaatttttttcctaaacattactgagactcatccatctcaaacatatcaaattccaccaattaacactgagaccagtccgttgaataatcaaggcaaacaacaatctcaacctaatgtctctgaggcaagttcatcacaccaattccccattactgaactccatcaccctcagcacacagattcaacccaccaaaatggaaaatcatgcactaccaaatcaggccgtgtacaacaaaatccagcttatctacacgattattagtgtgacttagtgacaacaaaaaatagttagaccatcccttcattaactatttatcataccacaaattctcacgagaatttcgagcggctattctatccctaagcttaatacttgaacccacatcttacaaacaagcttccaaatacaaaatctagaaccatgctatggatgtcaaaatcgatgccctcaaaaaaaatcatacttggattgtcgttccattaccaccaaaccagcatgtgagtggcaataaatgggtatacaaaaagaaactcaaccccgatggctctatccaacgttgctaagcacgtttagtcaccaaaggttacacacaattacctggtatcgactgcttcgatacctatgccctagtggctatattcaataccttaaaactcatcttttccttagtttccatccatgaatagcacttacatcacatggatataaacattgtgtttctacatggggacttgaatgaagaagtttacatgaaacttctccaaggttacaaacccaaactccctattccatataatgttgtctgcaaattacagaaaagcatatatggtctcaaacaatcctcacaccaatggtatgctaaattgagttccgcagtgatacaacaaaatttcactcaacggaaataataaatcaaagtagattagcatacatatattatatgtagaaacatataactagtattatatgtataaacatatagcaagatgaataagctcatttatttacacttttatttacatttctatatacttaatattatctagtttatatattatttaatattgaccactctctgttcataagacaccaatcaggtatttttatggctttacttatatacgttgatgatattgttgtagccaccaacaacacaactaaattacaaaaattcatcaccacactcgataccaggttcaaattaaaagaccttggtccccttcgtttttttcttggtctcgagatagctcgttgttcaaaaggcatatccgtctcacagagacccttcacccatacaactcttgccagattcaagttgcttggctcaaaacagccttccacccccatggaaccaaacaacaaactcagtaatgacacaggggaatcgcttccaaacccaacacaatataggagtcttatagggaagctcctttacttgacaatcacacggcctgacatcagccttgccgtgaacaaactcagtcagtatctccaatccccatgactccctcacatgcaagctgtaactagaatcctgcactacctaaagaactatccaggataaggccttttcttctatgcttcctcaacaaaataaatccaactataagcctttgcagacgctgattggggagcatgcctcgatacaagatgatccataacatgctgctgtgtcttccttggccaatcactcatctcctaaaagtcaaagaaacaacaaaccttatcacgatcctcagctgaagtagagtatcaagcaatagtgcatgccacttgtgaactcacttggctcacttcaatcataagcgattttaacatcaacatcacactaccttcaactctacactgtgacaacaatgttgctatccacatatctaagaatttagtatatcatgaaagaacaaaatatgttgaaatagattgtcatactgtccgagaaaaagtcactaaaggagtttttcaaatgaatcatgttccctcaaaagccaacttagcagacatactcacaaagccacttttccctactcaattcaaagatattctgtccaaattgggtgttcgaaacttctacgctccaacttgaaggggtctattagacttagagataagttagttatttttctggtttttctgttatttcagttacttagctgctactggattttgcctacatatatgtaaattttctctctatataattcataagatacatttcaataaaactcttcttctctaaatgctctgttcctaatattcttattaggtataattgagctaggtgctggaactgggtgaagttcctttggagtcttcatcgccaaggggtaaataccaaagaggtgtttttgtatgttcaatccttgtggatacaatatggaaggctcaaaatgataagtttcataacaacttaacctgtaatattcctcaacttaataattatgtcctgtcttactttaattgatatgcctaatttcttttttcacaagataataatgagctccttgcaactagcttgtgccctcttcaaaagggatggataaaaattaattgtgatgtggttgttgggattgaggacatgatgattttaatcagtgcacagatattttggatcgcgacacgtagacttgctttcgtcaatcctctgctgggttttacgggctcaccctttcaggcagcggaacacccgtgcggcaccttacagccaaggtcagccttccaaccatttgagtaacaatgggctcatttttcgcgcagctgtgtgccacgtccacacatccgtctctcgtacaactcttgccaagtcatactcgcaagcatccatgagtgcatccacgcatcgaggctctctagccaagatactcgcactgtccataggttcccattatgatacgacaaatcccaacatcgatgctcacctagtcactcgtgaccaaggtagcatgtgtggcaagattccaacaccaagctgacatgccaacgcttctatcgtgccccactcgatattgtccgaacagtctccctcatcttcaaggatccccatacatccatggaccaatcctcaaggcnnnatgcctccacgcatgttggcagaccctcgagacaagctgcaaaattagttgcatacattagacctctgttcctttcaaacatggtgcatccgtcccatgcgcgtatgctaactagcccacgaatgactacccgtgtcatcacgtgttgagacttgtggccaaggcgcaccacaatgtctcttggaagtttgggccacgtcttgtgcaagtggcataccagcaagccaatggaaacatacccgttaatctctggcatcttcttagacgcactaatgggtcggcccgataatgtccatgaatactccaactcatggagacatatgagtcccctcatggtcctcatatgcctgcccgactagtcctactgactagtagtag

SEQ ID NO: 44230 - DNA, 1406 bp, Cannabis sativa
ttaccaaacgccacctatatattttactataattttataatgaaaaagaatctaatatgatgattgaaagttaagtgtaggtaattttatataaaatggatattgaaatatatatgatgatagctagccattcctattgggcaacaaagtatactttaagaaaaagattgttgggaaaattaatcatatatatggccgatatagatagatatgtatataattaagatgcatatatatgaatatgatatctcaaagagagacaagttcatgtgggaacacaaaccaatgacctcaaaatgttatcattgctccaagtatattgagtagcacaaggcttggtactctcaattaattgccactgccaccatgaattcattcctttatattgctttacactttattattttttttattatttaacttacatattagtatattacattatttttttattttatttatgagaaaaaagaagctatttactacttctttcgtgcgtatattattatcactaattctctcttacatatataattactgaaattaatagtactagcttagctacctataacttgatttcatttttgtcttctaaggcacgtaagctctctctctctctgtctctctcttgattagtatgcatattataggtaattagttgggacccgtataataagttatgcaaataatcatcatttaaatctatatagctacgaaacgttaattatattgtccccaagtagtactcaacttttttgtttttcattttgtttaattgaagagctatggttgctttttcataaaaaagaaaaaagaaaaaaagagctagggttgaaggggtaagtagtttatataaatttgtttggaaattaacagcattttttgtgccagacaatatatgtgacactgagatacgccatgtaattatataaagatatacattatttaattaccgtgtttaatttaacttaattgactatcttcaataacatatatatattttttgtgctacaaaaaagagaaaaaaaacatataataaattttggtaacaaatttgaccagtgggggtaacttgggttgcggtttttacatcctaattttattgaatcaagcaccaatttgtttatttgcacgtataaattgagattattgttaatttattttggtgggaagaataaaaaaaacagtaaccaataaaatcataaaaataaattcactattcttttaattttccaaatatacacaaatccccaatggtggcgaaaattaatggatcacctgttaattgagggggaaaaaaaggaagaagaaaaatattggaaaaccccaaaactcacccattgacctaataaataacaactaataaaaaacacatatttatatttatatttataattaattatata

SEQ ID NO: 44231 - DNA, 2022 bp, Cannabis sativa
aaataatttccaacatatataacatagacttatgtgttacgttcacacgtctcttttatgtataagaccttactaggatttatctcaattttagttaccaagtctaacctagttatggcttactcgcataattctgctcatttattcacttaatttattaccacatatttatcacagtacgtatttagggtaataaccctaattcacaattttataatagcaatcaaataacaaataattatgccaccgtgctatattctatgtgcttaatttactattttacctgatttctagtgtatgtggagaaatcccaatccacaggtgatcctaaccaagtacaggtattcctagtcacaaatctcgagttttacacaatagagttaatcccaaattaaatattcacaattagaactccaaccctagaccaaataataggtcttgaaacgatctttctaacgatataaagagcgtctaaatcggagttcgaagtaaaaaattatgcctgaaacaaaacaggtaaaatttaacaatcgccgcaaggtcaccgcgaccatttatcttcacgaccagacccatgctcaccacaacgagattaggcaggggccttcccctatttttgggtgaagcctcgtcgcggaaaccataagtctagtgacagctactaggcttaaaaactcaaataaaccaattttccccctacttcaaaatttcaccaaattacactaattacaaataattcatgcatcaaaataaagcatactaggtaaatttcttccaacaactaatcatagctaaactcatgaaacctataagcatgcattcatcatcaacaagactcaaaaaccttaaaattcatgtcatagagtcaaagaagagaatcataagaaagttatgctcaaactctccaatataacattcaaacaacaacaacacccttagtatctgacctgtaattcagcttcatgctcaaccatacaacaatctactatttcttagttttaaagcgaaaaagaaatatcatcaaaccaacttaagatcatctcacgatatttacatgcaattcaactcaaataaaactcgtttcaactgtaaaatcaattattttaaatagattaagatcaagaagtaaaaagagtgaaactaccacacttgctttatacttcaaagctcaaacaccaatccaacaaaaattggcttacaaatcttcaaagttcaaaaatcaaagttgaatgagagagagaggagtggtcggtagtgagactcaaaccagaaaatgagtctctcatttcacacttagccataaaaataaatttttacttaataggaaaaagtgatcaaaagaccattttgctcctagggctataaatcaattataatagtgaataagggtacttctgtcctttcacaccacaaacatgctcatatcatcatataatcaaatatacatttcatgttattgccttaagcagataactcatactgatctcaagatattacaattatcccctccttatagaaatttcatcccaaaatctacctgaataactcaagatatttctatttcatatcagattctaactctcaggctgcctctttgaccttgctatttctccacaatactttgactaacaccagtgtcttgttcctcaaaactttctctcttctatcgaatattttcactagttgttcctcatacaaaagatctggttgaagtttcaaagcttcgtaactccaaatatgagatgaatttgacacataccttcaaagcattgaaacataaaatttgtgagagagtgtaaaagagttaaaaaaaaacgagatataaaaatatacattttaaggaaaaaaaagagagagaattggaaaaaaaatataaaagaaaaataaagagagaatagaaagaatgaaagaataataaaaaaaataccagcaaactattggaatatgttttaccaggatctaaatttactaccatgtatgttatttaacatctaatataaatttctaaaacaatgtaaataa

SEQ ID NO: 44232 - DNA, 1384 bp, Cannabis sativa
  modified_base (1330)..(1335): a, c, t, g, unknown or other
aaataatcaagagatgagaccacggtataacatacctttggacttgtttccgggcttcttcttcaacaagaattcacggtcacatccaaaagacactgaagctatatcaggagctgatccgtatagcttctcattatcagaatgccaagcaacatagtcattaccatctttgtacttgtttagaagcaagctgttgaaactactcccaggaatagctttgtgaaccttcatagacatatgagtgggataatatcaagattgaagaactcaacatgataaatctgaagctaattagacaattaagaaagagaagccttcttacttacagcatctaaaatgtcctttaagggaggaaaatcatcccaactataagcacgtggctgatatccactgtaaatcaaatctggtaatccaggattggcaacatagcaagtatctctaggctacataaaaatgtaagcagagttcgaattcacaaagcgaaacctaaaaacccaaacatacatacataccaaccaatcatagatatgttcttataaaactaataacccatttgttcaaaattaatttttttttcctttttactacagaaattgacatttacatattcagagggtgagaaagagaaagagacctggaggcatgatcttccgaaaacacgaatggtgggtcgggtccaagggatttcattgttgaggtaatcgaaaaatctccacgcctgatcaaagctcatgaacctgggtatgtatagaatttggctttcatcgccgaggtccagtgtctgtgtctttggggttccattttggttagggttttttccgaagaattcttctggcttcaatttcaaactcatcttcgtacatcggttgtctttcaccactcttcaacagcaacctccaatttacgcgccaagcacccataacgtctttcctatttcttcttgctgttattgggccaatagcccatatcatatgggctcttcgattaagcccgattaactttatttttatttctatcatgtaacaattagctaaactatatattatgaaagagaaaaagaattggctaattatgtttacaaaatatagttgtttaacaaatcttaactaggggcagttctaaaattttcacatcaaaaattggcttgaaactctgttaaacaaactttaaatatactctgaacgtaattttcaagttaatattttcgaaagagctgtttttctttgtaggattaattaataggaatatttccttgtatataaaattttaaatttgaaaaccgcataaacacttagggcccgtttggcacagcttttggaaaagttaaaannnnnnttttgaaaaagctgtgataaaaatgtgtttggcaaacagtcaaaaaaca

SEQ ID NO: 44233 - DNA, 2346 bp, Cannabis sativa
atggttgcaactgtagtaaatgcaactgttagtgcaaatgggtgtttatgaatggttgcaactgtagtaaatgcagctgttagtgcaaatgggtgtttgtgaatggttgcaactgtagtaatacatatatttctgttaaatgcacaacaaaaaaaaaactagatagacataacatacacatacatacactctccctaattcatatcatgctgccattcttttgagcaccaatcgctaatcatgaatgtaaatattttacaagggtaaattaggtattggaggaaagtaaatgattgaagatttgttttttgagtactgtttctggaaaggatccaagtggcaatcaagaaatgttcataagatagtgactttaaaatcttagtgaagagatacactatatcattcaaattacaaaaacgttttgtacaatttgaaaagaaaaattttatttgcacccccaaaaatttataaaacactattttattattttattttgtacaaaatatatattttcaatatataaagccaagtcagtccccttttgtctacaccagaaatactcaacaatatataaagccaacactaatttatctatgtgatgtttcaactaggaataaggagaagtaattgtttttgggctccaactcaaccccagatgaaaattcaagtcaatattgtctacctcagattcaggggaactatgaaaaaattagttcaacagctctttctgatgatgaaaatcatgaaaacatgttcgattctatcccagtcaaggggtacttgatttgtggctcaaactcatttgctcaagatgatggatacatatacatatagagacagattagagagagatcacgtgaaaatggacttactttttgaatgaaatcaatgtagtggagagcaccattcttaaactgggttccaccccctggaaaggtaaggtattcaccagttactttaacccaattctgatgccccttgacttctgcaagcttagtgtgaggaacattgtggtaccaaatctgcagcattgaccacaaaaacaaattcaaacttcaattcgatacaaacagtgttattcacttatttagtagaaatatcatgtaccttgtccctgcttgcaggccacttgactgggcgtttatatccttcaggtagagcaacaagacaagtgggagattcatcagggcagtgccgttctcggtgttcatagtgctttgtgctcggaagctttctgataactcgccaattgtccagacaagggatgtagtcaggccctgccgtgaccttacaaagtttccaatcatagtcattttggttctgagacgtggaatcttgttgtgatttttcttgttctgattctacaacttgagttgaccacgccccattctcaacattgcgctcctttaaaagttctgcagcatcactttgttgtgaatcagtctcctgatttttctcatccttctcttcagtcgaactaaccatttcgtctttctgctttgtttgatcatcatttgattcattttccaccctcccatcagattcagcttgcccaccttcattagtttctctactgacttcttcctctttttctccagtttctgagtttgaatctccattaactgaattagcattgtcatcttcagaaactgttttcttttcatcaaaaccattctgagattcattcttggcctcagcttcttcctttgaactcgtttcttcttgggtttccacaacagtttgagaatcaaccccactgttatcagttgcatcctcttgtaagtcaccagaactatcttcaaattgcttagaattaccatcatttacgacttgtcgttttacctcattcctggtctcatcagattcagattgtaattgtcgatcctgaactggaactgctgatgacataaacatccatattccaactaaacaaaaggcgacaaaaacgactatactgacagttgaacagtaaccagaagatttcttcccttcaccccgggaatacttccctggagccatggttttaagctaagagtttgtacacacacctggaaaaaggggcagtatgcaaaaatctcagctatactattgtacccaaaagtaaaacaaaatttatcactatctaaaacttttgagtgttctgctcaaaaaaaaaaaaaagaataataataataaaatagaggttagttcttttaggaatctataaagccaataaaaagcctagcttttctttacacttgacacagagaatccagatctataaccaagatctgggtgaaaaaaaaagatttgactatgcggtgttgaagttaactgttgcgcttcgaagcactcaaatgctcataa

SEQ ID NO: 44234 - DNA, 1225 bp, Cannabis sativa
tgatgaatcatatatatatatatagaagaaaaataatattattacatgcaagcgtatacttaagcaaaatacaaaggtagatattatacaattaagacaatccaagatgatttttcaactaaatatataattaaattgccaattataataaattggaattaagataatgtatacataatcaattaataatacactattgatctttcactagcatgataaaatgtgggaattaaggaatatccacaagccagagttggatcatattggccaaactcttggatttgtaggggctaaatgaaagcaataacattaacttgttctacaaataaaaaatgagaaagtacgtacgaagcaagcaacctaacatgtcctaatatatacccctagctatatatatatattataccaaaatacatggtgaagttgaactaataattagttaagaagcttattgcatgttccaacaccaacagctgccgcaagatgccagccagcatggagatatggggttgtggggaacacatcatcagcaatgaaaagcactcctccaagtagtgatgacatcttatgaacattatgggccattcttaaatctggatctttcaatgctcttttagcaaatgctacctgaataatatataaaattaatgatcaaaccccaaattcatttttatttaatctttctactgattaattaaattaatacgtttcgtacaaacagcttcaacatcaaagattaattggacatatattagcaagcaaagaggcacccctacgaaatgaaataatatatatctgaaaaagtacagctcataatacaatacgcaaactaatttaattttataacgaagtaaatttaatagtcacaaattaaaagagtatgaactcaaagagttacatttgagttgctattaagatggtgaaaaaatgatatataattttaaagacgtcgatagtagtgtaacttgtacgtagttgtagggtctcccgtgttcattatttgagatattttttatttgctttttatatatttatttaacataaatttagtttcatttcaataatactatattttatttatttaacatattacattattaatttttaaaaaaatgatactacattatatacatctattttactaagtatacttgcttttattttaatttactcttatttacaccataaatttttttatagtgtcacaaaacaaaacttatcatta

SEQ ID NO: 44235 - DNA, 2265 bp, Cannabis sativa
tttctaaaatatttttcttattatgaaattatgtttttttttaatatcattaaaaaatatgtatgaagagatacaagaaagagatccaaaaggaaaaacctctatattaatattactttttttttcacacaaactcataatccaattaatgtataatagtgccttttataatagttttttatacataatattttacaaaatgtcctttttcaggacaattaaaatggcatttttgcaaataatcatcaaataatattattttgcaaaattacatttaacaaaataaaatatctattttcaccgtcatgtcaacgattacgtgaattactttaaaatctcaatcatcgcagcctcttacaaatgtgccgtaagaacaaacatccagacagtaagtaatcgatcgatcaatattattattcagtgatttattgatcgatcgatataattaattagtgatgaacatatacatatagtttagaataataaatttataattaattaatcaaataaataattttttgagagcataatagagaagttgattccaagtgtcttgaactcctgcaatgcaccaatgtttacaatcaacaagtccataagtgttgaatttactaggatgaccatcttttctaagctttgacaaagttgttatgtcaagtaaatgaattggcttcttcatttgattcaaaacttctttcaacacaagtgatggtggtgaagaatctttagggtacaatgttccattgtttgttaatattataggctctttttctccttcacaatttgttccttcacttttattccactctctcccactacaataataataataagttattttaacaaatttaaaaaaattatgatattgtgtcaatatatataagaaaaaaattaataaagaaaaatgaagtgaatcatgtgtatatgttagtgaacttaaaatatgtaagttttaattcaaaaaaaaaaaaaaaaataggtttttgattagggataacattgaaaatttttacactataatggttgcaacaaaaattaagagatatttgcagtataaagtttgaatttgtaattggtattagccttataatatttttagcagcataaatacttaatgttaataaaattataattttatcattacaaaccctataagtgtcttaaatttgtaaccagatttagtttttaaatttgttgaaaggagattttgaagtaattaataatttgatactataagtttttgtctaaatttaatgatttagtatttggtacttacatgtgttgtttataaaacactaatatattgatgaaattagatgaaaattattattttgctaacattgagtactcaagacttaaatacggtacttatgctgcaaattttttataaaaaataaatattaaaatatctatcctgtcaaaattaaaattaggttttgaggtgtaacatgcataaatttaattagatatgttgttaatattctaaaaaaatatattagtgaagaaagaagttaatatatcatacttgtaatgagatggactcaatgcttgaaatatgactttagtcttggttgtgttgacagatgtatcaacccaattggcccatgttgttaaagcctttctatatgcttctatttgatccatactcttcactgtttgattaccatcttcaatatgatcaaatctgcattaattaattggaaacaaaattaatataataataattagtactttaaaactattatatacaaaataaactaaaatgtatcttacaaaaaaaatggacctaatattaaaatgtagtaatattaatatgtcacactcttgtagtatttagtagctatgctcagggttaaattttggttaaagcgaattaggcctgcacttattttttcttcgaaaaaacaaacaatttttgttgtaattttcaaaattactacatgtttaatttttttaataaaggatccaataatatattttttttattaaggtccaccctatttcagaatcgacttatacctttgcatttttccttattcatgatcgaatccgtacacatccaaccaacttaaactagttttagaaggtgttttctattttcggcacttaggtcaaacaattggttttttcctttttaaaaagaaattgaaagactagattaagcttaattattggatagcctctcatgataataactaataacaaaaataaaaattttgattctaagaaaatatatatatattagatagatgttacataccaagt

SEQ ID NO: 44236 - DNA, 1976 bp, Cannabis sativa
  modified_base (1884)..(1898): a, c, t, g, unknown or other
  modified_base (1939)..(1951): a, c, t, g, unknown or other
ggggcggggcggggcggggcagatccgtatatgatctggatcaggtcggatcagagtcggatcagatccgacccgccccattgacattcctacttggtgtcccaaaagttatcagcgtggcacttctctgacgcgattccgagaaatttggcggcctgtacctaggctttgtagaggcacacaacaaaaagaaaatcacctttttgggcaaacactcactattatggcattcctttctctcaacgacagctcacgcctcacttgtcattgtcaaccgtacgaccttgtatagaatgtagcttaatccaacttgggtctcatctacccagcccaacacctcagattatatcgcattttaccccatcagtagtctttttgcactcaaataatcctaatgggtccggatcagtctaacccatcaaggacatatgcctataaatatgtcattatccctccatgcaaaggcttgaaatttctagtgttaaaaattaaaaaatatattgtaaattccatagctaagagcttaataacagtgactcgtggactaagtctcgttaacgccctaactacgtacaaatcttcttattttctttctaatcttactttttttagcttaataattattataattagtttctaaaaaagtcagtaaataactatcatttgaattcaataagtttaaactgaaatctcatcagtgctgcttcgaacaacttgcagtacgtgcctagtgacggtattttatgtcaagcatatgcatctttggtgttatatgctacccgtaatttcccacatttttcaatttaaaatatgggaaaattaataatagaaactgaaatttggcatttcgcaaaaaataatttatttctacaataacaataattaaaatgttactgtaaaaaaacttgcagtaacaggtttgttacttgcttacactagacaatacgtgcaacaacaaaagaattataaaaataaataatacacaaagtaaaaaatcatacaagagaattttacgtggtatcagtatttttctgaatactactagtctacagaaccacgctcagagaataaaaaaattcaattattaaagtatcaaaggttctattctttttcttagtgcttgtttgagaccatagagagatttgtgcagtaaacagactttatctttttcttcaacaaaaccttctggcatcttcatgtatatatattctcatcaagttttccatgaaggaaggcagtcttgacatcaatttgcttaatttctagatcctcagaagctgctttggccataatttctccaattgaggcctattttacaacaggtgagaagatttcattgaaatctaatccttctctttgagtaaatcttttggtcacaagtctagccttgtatctcttacaatcatcacttgatagccccttcttttctctgaagatccatttgtaactgatcaatttatatccttctggttttctaacaacaatctaggtctcatttttcatcagtgattatttttcttcatcaattgcctgcagccacttgtctctgttcttgcaattaatagcttcttcataagtggcaggttcaacattttcaatcttactagttatggttaaggcataggcagtgtaatctgcaaaaccaaacctagctggtgcccttgattctcttctaaccctatctctagtgagttgataggtgttaagagtgctatcttgagtttgatatatttcttctgcaggcccatgtttgtcattgtcacttgcctttccttttggcataccctcaacttgcacctgtctagcctcaatgctaatctcaactttgttttctagtttcatggccatcactttctcagtgaagattatgttggaaattatttnnnnnnnnnnnnnnnttactaacaagtatgtttgattaatatcctaatatgaattnnnnnnnnnnnnnaataaacacatataaagttagaaaa

SEQ ID NO: 44237 - DNA, 1545 bp, Cannabis sativa
caaataattattcacataagaaattataatttgtattttggagtgatttgtttgaaccgaactcatgccaaaatctatacaatagtttttcacgttgtattattgttcccccatatattagtggtggtgcatggtattgttaagaggataccattcatttcccctataaatgtatgtgatggtttgagcagtaaaatgggtcaaatacgataatataatttgaaatccgcataaaaattaatgggtttatcttaaatcaaggtcgactctaaaatatagtgagacataagaaaattatatataattttaaaatgggcaaaaaaatttaggccctaggtacatgcctagaccgcctatgtcgagggtcgggactatcttaaatgaatacagttatttttaggttgatcctggcccgtttaataaactagtcgtgtttggattgacttgtgtatataactcgaatttgacccgttaatgataattaaagttaatttaagactttaacaaatcgtaaatgtattgaatatgtcataaccgtgttaaacatatcatgtataaattaatgaattaatatatggattcaataatatctatcaaaacgaattaatttttaccttacgtgcatggtgggttatgtcgagttgaacattgtaaatatattttgagatcatgctcaaatgtaatgataattataatatatataatatatatatatatatattttaaagaaaaatggtacatattgacattagttcctttcaaatgtatacatacatatacaataataataagtttgtaagttaaaatcttataaacacatgatgatatcccacaataaatggttcattaattctatcaaataattgtaattatatatatattatatatatatgttctagaagtagaagactttaaaacatgagaaacgacctggcttttgcttctttcaaagacaacatctgatctcaatagatattcctatattgaatcaaatctatgagctggccactaataatgttaaattactacaataccaaattatatattaattaggtgtaaactacatcaatatataaattatggattaatttaatatataaatacatctctctctctctctcactttttaaatggtatatacttatttctattgaaaaaaaaaacatttgtcatatttactccactccacaaaccaaaattctaaacactacaacttcatataataaattttaattttgttaagagtaattaataaatgttaaaataaaaaagaaaaaaaaatatatcatctattctaataatggaggctctatatacttagtagaaaaatgctaaataaagtgtgtaatatttttttgaggtgtaatattgttattgatataatttattatcgagtctcatttattttattttaataaatattataaaaaattactaactaattataaaaaaaactgataactatttaacttttttaatagatagaagttacaacataagtagaccgaacatacttgctatatataatacttcttttctcctgtc

SEQ ID NO: 44238 - DNA, 1318 bp, Cannabis sativa
ctttttatgctttcctagatatatagatgttaattaatagcattacaatataggattcgaatcactaacccaatgtgaaatgccaagtctctttaccattagaccaagttaagctactcatgtatctatatatatatatatataaatatatttattaattatataacatttttatatgaaaattttccgggtatctattgataaaaattatgagattttatctcaaaagtaagtgattatgagtggaatagctcatgttcggttaaatatttttacatttaatttatgtgccaaaatctattaggggagccatataattttatatcactttgggcttccattcttctaagcacagatagtacattgattcttgatttgaacacattttttgcagattgttgatttgataagagatttgcgttgctataaaacaagtttggagagcgtacacgatgtcaatggcgataaaccgaaagagaaagaagaagagaaagagatggttgtttcatttgaacataaacaacaacaatgcaacattaatattggagaaagaggattacatttcagcaatgaaattgttaatgtcaacttaattgtagcaacaatcgtagcaagcatcacatttgcggcgggtatccaaattcccggtggattcaacgacgagggcatggccgtcttacaagaacaatcatggttcaaatttttcatcacctttaactcatctagtttcggtttatcatcagcgtcggtattgctcacatttgtatcagtgctctacaatacaactgttaaaagacaatttcccaaatcaacctccctctatttcttgcccattgtcatttgcctaactattggatccattgcttcatcaatagtggcttacatgttctctacaagagccacaatgccattggagaccaagtatcctccatggaaatttgctttttatgcgtttctctaccccttgctctacatatgttattttgttctcaatggggttataattatatactatagattacgtaatagtgtaagtagtatcattgtcaatttaatatcttgaatataaattgtcatgtggaacaaatttcaattcatcatcacttttgcttttaacaaattattacgtgaatttcttaagaatcttgtggttcaaaaaaagcctgatttagtcgtaagaaagtggttgaaagagttcgtgtttctttagggttcgtgtttctaattcgcaatttaaattctgtttcttgggatcaacttcggtctctttgagaatcatggggttccaactcaaaaccaattggcaatgagtggagta

SEQ ID NO: 44239 - DNA, 1680 bp, Cannabis sativa
ggagtaatttttaataatttgactatttttgccgcgaaaatgatagttaaatattatgattaatagacactgagtatttaggtgttacgtgtttgtttgaagtattgagtatttttgctgcaatttaccatacaataaattaaaacttttcgtttagctcacatgaagattgataggctcaataggtttttgatgctaactcagatactagctcaataaacctcgatagaagttgaatggtatcttacatttttagttgactaaaggttgaagatgggctcactgatgtctctattttgtctaattgttttgattgagttcgataagattttaattgggtttgatttgtttttcccttttcttgtccttgtttaactctatgtgagagatatttttgataatgaatgaatcattaacatatttttgagataggtgtgataatatgtagggcttttttgttgttgtgcgccgcttaaaacattgaaacttaaatttatcttggtttcttgagatattttgggtttggctggatctttgatttttggtagagaaaaaaaacacttatatacccaatgaatttttggtaagatctaaaaaagagctattgttggagctattttctgtccaataaattcatgccacgtgcttaaatgttgtgtttacaattttcagaaacacaacaatatgtaggacagccatatacaaggtttttattttcttttactttttttctttttttttttagtttagccatatatatatatatatatcagaaccgaacttgagatgaaatgggccatagacaaattttttttgaacccttactataaagataaattgtatttttaaaaactattaaaaaaatatgtatattttttaaaaggtaatttttttatttcggcccctaaaatgagtgggccctaggcgcgggcctagcccgccaatgcctagggtcggccctgtgtatataaaaaagagatattaggagtgacgtgacactttaaaatcattccaaatactttgaattattctctccttaattctctcacttttaaattttgcctttagtttataaatattaatgaatgaattaattaaaaaaatattataattaattaattaacattatataaataataaatttattatttttgttgtctcgggattttcccaaaatacgtgaccacggctatgtatgacacgtggacctaaatgacccctcacccgaggattagttaagaatcgtatgaaaaagaacaagtgtagttcggagagcgagcccccggagcagtataaaaagcatgccctcctctccgggagctaaagatgtagttagttatcttcgggacaagtagggcctattggaactgtcacctcacatttgaagcaacatgggaaaagcgtctgggaacgcccataagaggacatgtcaaacattgtaaggcgataacgcaataatcaaaggggctagtgacggctccattatgaagaatgacatcaatcaaggaaggatgaagattaatctcacctaatccctacgatacctacggtataggtaatacatgccctattttgtatctcttgagaacttgtgctcatccattgctggcactcaatattcccaccaatctctataaatacccctgagaaaaataggaatggggatcgaaaaaaagggga

SEQ ID NO: 44240 - DNA, 5548 bp, Cannabis sativa
  modified_base (2187)..(2191): a, c, t, g, unknown or other
ttcacataataatatatattgtcatattttaatctacatgttatattattaaataatattacaaattcattgctgtggaggattcgaaatgacactttttggaaccaaagatttcatctccttcctctgcaaatcagtcgtatgaactatgaaggtagggattaaaaatagaattacatccattctctcccaaagataattaattaactcacaggaaaagtataagagcaaaaataatatgcttactaagttgtatagaatcttgaacacatgcctatatagtgacaaggtgctaatagggctgtaaagttttgaggtgcaatatattcttgtgcttcagcaaaaaaataaaaagaaataatagacatataatatcaataaattacatatggaagagcccgcatggtaaagagatataagtagtgtgttccctaatgtttaaacatgttggtgttggacaaaatgtaaaaatatgatcatagcatatgcatgcagctgtggccactcacgtttcttcaagcacgcgggtcaaggcgtaggccagccaattctgcggccatatggcccatggggctaccacatgcacttcgttttatacatacaaccaaatattactatatatcttttgttcattcttggtatatcttaattaattctatatatatataaatatatatatatataaacaaagacgtttccaaactccttcctccttcacatggtgcatactaattatatatcaaagagagaaaaaataaaataacttttcctcaagctatattcttgttgttcttctgctaatatatattgacaatggtaacaagtcagatcgttttctcagcctttgttgctttatctttctctatgctagccttagcatttgatcttagtcctcttcaagatttctgcgttgcagatacatcaagaccaggtaacggttatacctttacgtatattattttcttctagccataaaatttaaaatatgtgaattatgtaaagaattatgaatgttcataaatttgtagaaacactcatcataacatgcaaatcatcaaaggaatattagctaggtgaataaaatgaatagtaaaaagagacaaataaaactatgttgttaagttgtgaacaaattttttggacagtgttaatgaatggtctgagttgcaaggatccaaaaacggttacagccgatgattttttcttaagcggatttcacataccaagcaacacttcgaaccaaatagggtcagcagtgaagccagttacagtatcagaattggctggtctcaatacttttgggatttcacttattcgagtcgactatgccccgaaaggagtcaaccctcttcacactcaccctcgtgcctcggagatcttgaccgttgttgaaggcagtcttgaagttggattcataacgtcaagccccgagaaccgtcggatcaccaaagttcttcataagggtgatgtgtttgtctttcctgttggtcttgtccattaccagaagaatgttggtgatggaaatgctgtggccattgcagccctcagcagccaaaatccaggagtgattataatctctagcgctgtgtttggctcgaatcctgaaatgtctgaagatgttttggctaagtctttccaacttgataaaaatgttatcaattatcttcagacgaagttctagaaataaaaacacacgcaggcagtagaagtagaaagagaggagtttgtgtacgtgataccaattttaaatcattattacaccacaccagcttttggtctaatcattcttgtgtacttttgttaaaaggaaatacatataccaatgaaaacatttgggaaaatgcaaagactttaaggaattgtgttttttacggtacatattacatgattaagttttatctttatcactatgacagtccaaatgttcaatttgttggcatgtttgatttgattattttttatttatttatttatgtattttgagaaaatagcctaagacggcaccaccaaaaaggaggacacttaaggggggtcgagagctaagagattcattaataattgacattagcctaagataaagttttgaatacatgacaggctaatttgtccaatccagtgtttgggcatggcagaagtctggataactaagctaatctcatctgtctgggattatttatcctatctagnnnnntgggataaataatcccatgcagatgagattttttttatgtttttttaattttgattttattaatatattttaaattttataagaatttaaatgaaagaattatcacacgtatatttataaattttttttatcaaaaacttattcattaaaattagtaaaaatgtacaattttaaattattataaataagttttcaaaatttaaaatattgttaattaaacaatagttacttataaattgattctaagaaaaataatatgacaataaaattgtatattatttttaaatgggcccttaaagaaaaattggcaagagtatcgaacactatattattaattaacagatatctggcacaaaaattaaaactcaaaaaaataaacttagtacacatattcctaatgtcatcaagaattaaatcaaaagaagaagctaaaactatagaattatatattgagcttatgaaccaagctcttaacaatctgattcaatttgaatatggagaatgccaaacgagatgcattgagtcatagcctatcgaattgctagggcttttgcccattctggaatgcaatttccttctactttccaagcgactaaagagtcccctgataaccatacttagaccacaatgagcattaagagaatcaatggcagcatctatatttatcttgaagatcccaataggtgagtgagtccaatgggtcgggccactggtgtaactttaagaggaaagccatcagcattattctgtcggccttctctttggtaagaccataagaaatcggtgacccaaggtccagttatctccagcggtatagtagtttgtttttgcatagcataattgcaaatgaaacaataaataacactaacaatcatgtgtgggttgccaaccttaaaagcacgtagctttcgaatggagacaagtttgctacattcctaaaaaacttgagtagtctccaaattactagtacaaattggacataaggtgtcgttgataagtccatgtctttgaagattaactttagtggaattgaatgaaaatctccacgcaaaactttttaccttgggagtttcatatttaaattccataaagttttctaccaaagggagacaccagtagaagtcgaagatatagatttcgcagcattacgaattgcaagccaataaccactcctaactgtataaaaaccatactcactactacaaaacaagcctttagaggcgcttttttcagcttagtaataaacaatcgacgttatagagtgtggttaaataaaattttaataaaaacaccttatagtgtcggttattacaaaataaccgacgtgatagggtgttaaatttttaataacaccacatatggcgttaattattttgtaataatcgacgctataggggcacgcattggttgatgcattttcctatggcgtcggttaatacgaaataaccgacgccattgggttcatataaccctattcagtcctttgtcttcctcactttgtcttctgcccaaaaaaaataacaagtgggtcttcagggaaaaatacaatgttgatggaacttttcaacgctttaaagctcgacttgtggcaaaggagtttcatcaaagacctggtttagactttggtgaaacttttagtctataaatgcttctaccatcaggattgttcttacgattgctttcacaaagggatgggaagttcgtcaactcgataacaataatgcctttttgaatgagaaactcaaagaagatatttatatgtgctaaccactaggttttgaagacaaagataaaccaaattatgtttgcaagttgaaaaaatctctttatggtatgaagcagacccctagagcttggtatgaccaattgaaacaaaactctattaagtggaattttgtcaactcacgtgctgatacttcactctttctgctaaaaactctaaggtttgtcatcatggttctcatctacgtggatgacattgtcattactgtcaacaatactcaagaattaaacaaaattattagcaagttgcacatgacttttactttgaaagacttgggagcccttaacttctttctaagaatggaagtctttagggatgctactggcatatatctttctcaaggaaagcatgttatggagcttctcactcgccttgacatgaccaatgttaaaccgtgcacaacacctatgacaggtggaaaaccactgcctttgctggatggagatgagttagttgatcatactcaatatagaagcgtgataggggcacttcagtacctcacccacacatggccagacatagtcttcgctgtcaacaaacttagtcaatttctcaagtgttctactatggttcattggagtattgccaaaagggtactgatctacctaaaagggactatccatcatggcattcatttaaaatatagtgacaatttgtcaattacagggtactgcgatgctgattgggcatgttatcccaatgataaaaaatccatagcatggcattgtgtctactttggtgattcttgcctgatcctccaagaagcagacagtggttgctcattctagcaccgagtcttaatatcgagcattggctcaagtcgcagcagaaattacttggattgagtctctacttgaggaaacgcagttcaaattgccttcagtactagttatgtagtgcgacaacatgagtgccaaagctcaggcatcaaatccttttttcatgcccgtacaaaacacgttgaacttgatgttcattttgttcgagatcgagtgctacaaaagaaagttgaagttcggtacattccctcacaagaacaaattatggattgcttcacaaaggggctaacacactctaaattcaaaccttttatcgacaaactttgagtgacaaactctaactcacccttttagtgcaatacagaggtcattgtgctaatcttggttcaggcatagaactttccattatctgttatgctattttatcttgtccattctgttattctcccttttgcctttttgtctctctgctttttgtatatactctgccacatggcatattgtcgttgtaatcattgtgtgtatataaatgcaatcatttgtctcaacctccaattgagctgagcactgttcatttgatctttagtatattctcactctcacaaattggttgtcgtaaatgagcctaagagtttttcatggattacaattaattttagattttttttaattttatgataacaaaatgtttttcttatggccaagattgaaaatggtggacttttttttatgatatatcttataattttttgaacacaaaataatatttagcacctcttgaaattcacttttttt

SEQ ID NO: 44241 - DNA, 4404 bp, Cannabis sativa
gctgacaagaaagacgagccatggtggcctgtccttaacacgccgaaagacctgatagagatactcacaacgatgttgtgggtaacctctggttaccatgcagctgttaactttggtcaatacacttatggcggttacttcccaaaccgacctacaattgcaagaactaaaatgccaacagaagatcccgacgaggaggaatggaaatcgtttgttaagaagcctgaatccgctcttttgaaatgtttcccttcacaacttcaagcaactagggttatggccgttttagacattttgtcgaatcattctccggatgaggagtatcttggagagaagatggagaaggcatgggctgatgatcctgttataaaagcggcttttgaacgtttcaatgggagattgaaagtgttggagggaatcattgacgagaaaaatgaaaaccctaatttgagaaacagaaatggagctggcattattccttatgagctcttgaaacctttctcaactcctggtgttacaggcaaaggtgttccatatagtatttctatatgaagataaatattttcatgtaataataatgtttgtgtgaaataattaaatagttagaagcctagaagaaggtacttaaaacattaaagagaatacatattgaactttttagtttatcattatgtaaaactaaatggcttttgatagttagactaaaaatattatataacttggaattaaataaatattcttttgtatcttcattttactattacagttaagtacatcaagacactatttcctaaaataaatatatataacatttttcatatctgtttaaaactaatttttttttttaatgaataagtgtgtatttctaaaattgattgaatgtacaacctaacacaactaatgaggcctgtgtaaaagccaaaaaattagatacattttgaattgctttaattttaacttttggattttgaaaactttgagtccaatatgcttgattcttgttcttccaaattaagatgataaacagttgctgcaacaactccataataaacttgcttcatgcactttgtgatcttcttcctttcggatccattttagtaagtctccctattattgttgaggtcttctaggacagctacaactttagctcttaaaggcaagctgaactgattgaacttaagaagagatgggaattggtctctacatttgaatcgcggaccagactgatcactttggtttggagtggaagattgaatatcaattctttctttaaacttgttttttgactgaaataatttgcttccaataccagcttacttggtgctctgtaattccaccaatcattgctcctcaagtaaacattatggatccattttacccacaaattatcttgtttcgaagccacagcccaaacacactttcatattgccgcattgtttcataacatgatatcccttattctcaaaccacctcaatgctttggggtacaaactttgctccaacttaccttcttaggacccgaaaaatttgatatgcctttccacaagtaagacatgcagattgaattgttctgatgtaaaactttcttgggaagaatcattatttgggaccaatgcgcatgtatggaaatgagaactaaattaatgagcattgttctaccagcaaaagagagattttgggagctccataaacgaattctactcgcaattttctccgcaagaatcctacaatctatacctcaaatattctttttgaactattcggaattccaagatatctgaatgaatagtgtgtacataaaaaatgaagattggtgggcctacttactggaggaaagtagttgttgtcaaggatgtatttcagcatttaatagagcacatcatcttccaatagagcattacaatatttaggatggatatcgtttgattcatccagaaaatgaaagagttagatggagcaatgaagtatgaaatagatttaataatctaaaacatgctgtcatttcttggttggttgttcaggctgaaacacaagatagattgattaaatttaatattgtgcatgagtcgatatttttattatgtggtttggaatctgaacatcaactacctctttcttaattgcaatgtgattatgaattatttaagtgctgctaacgagtggatggaatgatacactcgttctagcactcttattgcactttttacgtgaataacttggtccaagatgagtaaatttaaaaggagctatttcttagccatctaagcttctttagtttaccctttgtggcgaactcgaaataaagttttgtagtctcaaaagctaacaaaattaaatatatttgtaaaaagaatcattggaagtgttaaaagtagaattttattgatttggcctaaaacatgttagaagagaagataaaatttggtttgattatctcatgtcaaactaaggtgagatttgtatagatcattaggcctttttaaaaggttctactagtttataattggtctggtttattgcaatacactttttgatttttcaaaaaaatatttatatatatttataaaattaattttactttaaatttaacaaaatatttttatattaataaaatattttattaaactaacaaaaaatcattaaatagataaattttatatagacaaagacatataaatctttatattatttgttaatgtaattctaggacaagaaagtggtcctatatattataaagaaaatgtttatctgttttatttcaagtgttaatataaaaaaaaaatcagaaaatcattatatttatatatacatacataaataatataaagagtgatttacggtataaatacttaagtttaattcctgattataaataaatacttaagttatattttttgaactctgtaaaaatctgaccgttaaatgtcaaattattatttacgtattatttttttattggtatatttgaactcattaattttattaaaaataaaaataaaaatttaatgatgtgaacccaatcaataattgttatgtgacaatttacttaacaatcaacagtcagtcacctttaaataactgagagttaaacttaagtaattaattcttttatgagagccagtcttaaatcatgtttaaataataaagaccaatctatatatctatacaaagaaaatgtataagatggtgacgtgacgttctaaaatggtttaaaatctaattatctatttgtttttattttttctaattatttaaaatctatttatccatttttatttatttttaattatttaaaacatgtttatctattttctcatttttttaattttttaaataaaaaacacaatagattttttttttaaaaaaaatactaaatttaattgtatctcaaatcaaaaacttattaatcgtgtaattcaagaattttaaaaaataaataaataacccaatatttcataaaatcaattaagaaaatatcaatatatatagtcttttataaatttattgaggtactatatggtgagttttattcaattttatcatttatatttttgtagatctctatttttaggtactatattctcacagttctattcatttattattatatggtgagttttattcaattttatcatttatttttgtagatctctattttgaggtattatattctcacagttcttttcatttataattatatggtgagttttattcaattttatcaattatttttgtagatctttattttgatttagttttttataatcatatattatttgacaataactcttctttttctttctgttttagatcacaaattaattatatgataatttttttttttatagatttgtcaactttttttgagatctctattctcggtgagaattttttcaatttctaatatttgttaatctttattttggttttagtttagccttttattatcctatatcgtttgacaatatcatttatttctctttttttagaccacaaattatatgatgagttttttttcttcatagatttgtcaattttttttataaaatcttttttcttgatgaggatttttcaatttttaatatttttttatttctattttggttttagtttagtcttttaataccctatattttttttatatacaatattctttctctttaaaaaaatattctttctctttttttaagtcaaaaattatataatgaggcaaggaaggaatttattaaaacaaaatcattcacttatttataaaaaaaaaataaaaaaattgtagttaattaactgaaggatataattatgtacagagaaaacttataattataataagatacgataatgatagcgactttgaatgtagtgacgtacaagtgagatacggtgatgacatcagctttgaatgat

SEQ ID NO: 44242 - DNA, 2837 bp, Cannabis sativa
ttttgtcatttaacaaaatacagagtctaattaataacttttgtaaagcacatggtccaaaataatatttaccctattattaatgacatttttcgttatcttacacatcgttgaaagtggagggcatattagtcatttagacgagtctgactcattcattcataaggtagatttacaaatacctaaaacccttttgtcctccattccaattgctagggcttccaatttagattgtgcagaggattagagtcagctcgaatcgaatcccagaaacgaaatttgaatatatatcaaaaataaatatggggagagaaagagatgttgctccagttccaaagcaagcaccacagcaacaagtggctcaaatggtggagcagcttctcgctgtcaatccctacaatcctgaaatcctttccgagcttgaaaactacgtcaatgagcaggttttctcaatacatatttatctttatctcttgccaaaaagagtaacgggctaatttttgttttgcattatcatcaggtttcatcgcagacctacagtcttgatgcaaatctttgcctccttcgcctctatcaggtatgtatgttccacattttcatgcctcttaaagactccaactttagattctgctgagtattatgtattcattttggtgcagtttgagccagagagaatgagtagtcagattgttgcccgcatattggttaaggtctgttttttttattattattattttatttttctgaaaaattttatgattgacatacccaagtaatgttattttgctttctctatcttttttatgtaggcccttatggcaatgccctctccggatttcggtctttgtctattcttgattccagaaagagtggtattatttcgtttcctatctttttttccatttcttagtgtatttgattttgcgatattagatgtggaatttgagtattgtcaaacttagttttaatcccttgttgctttttcttgttgatcagcaaatggaagagcaattcaagacactaattgttctgtcacactatttggaggtatgtttgtactactctgttcattggttagtatgcttggatcggaatagaaatttacttctttcctttacagactggtagattccgtcagttctgggatgaagcagctaaaagtcgtcatattgttgaagttgtgccaggtatgttgaattgtaatggcgcacttttctcatttattgtggatgttgagcttgagcctatgtgcagtgtgctccatgtgtggtaggtgtatctgaaagctgttattttagttattagaattttgttgtaagtgataatgtgttatttgtctaataacctttaggattttttttttcatttgctagacatgggagtctgttcatttttttgggtaaaataatatttcaagagtaacactaatacttccgggacactggactggactacaactgtactgttataacatctgtaattcaaagtttatttgcagttatagtggtcatggcacataatttggaaacttatacttattgatatatacctctctaagtgtgtgtgtttgtccatcttatgctctagttctcgtagcttgtgagtttcccttctatagaaatgtatctgcttctcattttctgttatgattctcttgtcatccctgagttttctagattttggatgtagttatttccttctgcagtaaggctcacatgtccaattaatattgcaggttttgagcaagcaattcaagactatgcaattcatgtcctttccttgacttatcagaaggttcctagatctgtgcttgctgaggtagcttttactcatactttagattatttgtatatgaagtgcactttttgagtctatgcgtaaagattctttgatttgcatatgaagtcccgtttttgagtctttggcaaaagttttaatgcggtattgatgtgtttgttgcaggctctcaacattgaaggtctgagtcttgacaaatttcttgagcagcacgtagccaataatggttggatactagagaagggtcatgctaagggccagttaattgtccttcctcgtaatgaattcaaccatcctgaacttaagaaaaacagtgccgatgccattcctttggaccatgttacccgcatcttacctattcttggttgagctattttcacctgggatctatcttttcttttatctctcattttcttgtgatttcagctgtcttttttggattctatagatcaatcatggtgctatcttaacaattatttttcgtaatgcatcaattttcccggttctgttatagtctttagaagcccgaaactttaggcactacattatatctccaatggattaacggttcttcatttttgagtgtgattggtacctatcagaatcagaatagagtaatgattctaatgatgaatgatatctgcacctaaccagtctcactttttctaatcaaatacatatacgtctcttgttttataatgtattgttcatatagaatctccaatggtgtactatcttggtgtatctttttaccaatttggtatagaatcttatttttagtgtaatacctctaataattcaacaataaatatcacatcaaacaagagggaaaagatatcacattttgtataatttatattaataactaatattaactaatatatgatataatacacaaggaaattctataatgcacaatgcactgcttaaaaagagatacactaatacatctttatttattttagtatctaaaataattttagtcaatttttttttcatggtcatgtaaattatacttatttaagatatcctgtaaaatt

SEQ ID NO: 44243 - DNA, 1771 bp, Cannabis sativa
catcatacattatattttgggaaagtttactttaattatcatcatcaataataatactcccttatataataaaaataaatacataaataataccccattattgtattctgtaatagactatacaataaatatatttataaaactatggagggcaaattaggattttaagagcatgataggttctttaaagagagagtgactttttatcttaattaaattatcatagtatcatttatttatttgtttttgaaattgggaggaaagagtcgaacttgagatacctcctttttgtaagaagaaatatgaaccactatgctatgcttatgactacttatttctttctattttgatatttcgtatttgtattattgtgcgaaacgaaaataatcaatgacctatgatatagtatattgtacaaactaatacgcgacataatcaaaaaccattattcgcgtttatagcattggacacatggattccagatcagcattcaagatccatcagtgggaccctcatcaatgataaagtcgggcagacccacctggatatgtcctttcaggagctatcttagttccgtactcgcacagtcttctgccttcggcgaatcgagcctggacggtatcacgagactggaggggtaaggtagtgccttcccagaagacccttctagtttccttatttattctcacacatatatataggaacattctagctgtcagatcacgtcagaatatggtatcatgattaaagggaaaacttcccataacaatcgttttgtagttaattcagaataataacccaccattagcggacacagtgttgactcaatcaacctaactccaatccgcctagttagcagatcgtatttttcatgggctagacttcatgaaaatgcccaaagatatcgtttaattgtaaactcccaagtagatggaaaaaggagaaccttaatgtaattctctaactattataaatatcccattaatctcatggattagaggttgaactctcttacgtactttgctcaggcaaacatacgaacatacatcctgtgtatctcttaaagcatttacaagtaaacaacttactgaataaaactgactcgcggactaaagctaaacgccccaactacgtaaaaaactatttgtctctttatatactttctctttcgattgtgatttcttcagttcttattattattctgttctgaaaatcttgggaaacaagaacaatatatcgagagatctcaagaaccaagtaatgatttaaaacagtaaaataaagaagaatagcatcgggtttaatgagtctacatctcggttggaacaacagcagtcatatctttattggtatgagtgttatcaaggttacaagaatcctcacaaactctcagagattacgagaaaatatttctctctctagtttagactctcttctctcaaccttacactatcacgattttcactctagcaattatggtctgattcacctcacatgattacaaagatttgatagctatttatagattttcactgttgcttgaaataggtccaaagctatcgtggcacatttacaccactttaaatatttcagctcaccaccaacaaccataatccacgcagctttgagaatgcactttcagtactaataatatggaagctttaatacggataagctatctggacacgtacaagcgctccttccggagatgcacttccaaatagcttactatcagtcaaggatgttcgacttttacttgggcttacatcaa

SEQ ID NO: 44244 - DNA, 2095 bp, Cannabis sativa
tttaaatttaaattaaataaaataatatataaattaataaatatataatttaaataaattatataaattaaaaaaactaaaaaacacgctcatgtatggcgtcagttcttacgccacataaggcgtcggtttttacctaggaaccgacgtcatagggtatgtacggcgtcagttttttaaaaccctttagcttcgctctgatcagtgtcgctagcgaattttgcaaaaccgacgctgaaaaggttaaaaaaccgtctctaaagggggtttttgtagtagtgtatatattctttttaatttctttgagaagagtattatatttaacaccaacttgaagttttacccctccaaaattctactcctcatacatatgcatataatttaatacgataaataataaaaaataatatataattaagtgaaaaaattatgtttttacatgaaacaaaatatatatatgtatctaagtacatatataacttaattgattcagccaaaaaaaaattaaatagtagtgatgaaatttttgatgggtatgaatttcgagtaatgtgaaagtagaaaattaataaaaattacaataaggagaataaaatttatataaatatatatatttatatatatatataacatacatatatatatatcttatttctgtaaaatagttccaccaaaatggtgtaatttcaaggaaatgggattcgattctcagttcattccattcttctacccccgaccaaagctatccattaaattcttatacgtgtgtttaatagcattatttttacctaagacttttacaaagagaaagagttacaatcctgatcatgttccacttgcggaaggaaaaggttataatctcgtggggttttgctcacagtactctttgttaattattctttaatactttacatcactgcacatataatcacataattcctcattatgatacccatatgtatccacaaaaacaaattcttcatcacgttatagcgtatgatatatatactctgaagttttcattaaaaggaattatatatggatcacgtttccatgttagtgatgtgaccatagtgcataatataaaaaaagctcctccacaatataatatacacaaaagtaagattgaaattttaaataataattacgttatcataaatttgctaaatgatatatacacaacacaagtactatataaattaatataaatgcatatatatatggctcaattaggtatttagtaaacacatttaatcataaatattaatttttatattttgatctaataaccaatataataaaagaaaaattttaatatctaaacttaatttaactacttcattaaaaaaatgtcataaaatttctctttttacactatattaaaaatattttttaaatataaaatatttaattcgaactcaattttctttttttttgtcaaattcttaatttttttccaatcgatggaacaaactcaacccatatattataaaattaagcttaaaaattaaattttacctattaataggtaatattaactattaaaagtacactcatatatatatatacgcctatgtagttataagtaaaaaaaaattatattgttattattattcataataaatattattttttaaaaaataaatgtgtataatatctctaataatcatcatatttgccatgcgtatgtatttatattataaattacgtacgtacatgcttaactatattttccagttcgttctttggaaaatcaacctcttccaataattgtcaaagaagtttcagccccatattctctgtggtggcattaattaatttatttgttttactattaatatatatatatttatatatatatacatcattgttataatgttgatgtatataataattcagaaaacaattaagtcttatattgacctcagataattaagaagttagacatccgaatgattaatgttgattaattaagaatcattttatgtatatgtaattatgcagtgacgaagccagaaatttacttaagtgaggcttgaataaatattaagtcaaaactaataaaaataatgataaatgtatctttcaaattttc

SEQ ID NO: 44245 - DNA, 1952 bp, Cannabis sativa
gtatttttgtaattttttttccttttttatatttttctgtttttttccctaattaatatggatccatccattgacattacttgtaccacaagatatataatatatataatttttgggacatttataatatgagattgtaaaccatataatattatattcgagttcatgtatttggtttttgtaaagaataatatatagtgttgtgacagtaatgacatgatatggaaatctaaggttgaaatattgtctactgtatagtagaccataattaagattataagatattatacatttttttttggctgttttcactttgcaagaaccaatccttaagtggtccctagttataaaataatattaacgatatataaaacctaaaagaaaataaaaataaaagaatagctcgtacttaataattttggatgatttattacatcaataattaaccattcatttaaattgtaatatagctaaagtgaattaatacgctaaaaaaaggttagattgatatttattacaagcataagcatattatattactgaagagagtcatacaaataattttctaaataaagataaacacctttcatctttgttcacataaagtgtgaaggaaaaaattgatcgaccaagaatatattctttatatcgtgtatttgagaaaatagaatcaaataagtaagagagaaaatttatcccaatacaagagatgaactaatttgctactaaagtaataacttcattaatatactattactagtcactttaattgttaaacaacttaaactaatggttaatcggcttagttagtctctaatttctcttatgaaatctatttgattctgattattattaggattgtatcaaatttaatcatggaatgaaaattaaaacattatttccacccatgcacaaacatattggtcaactttttatctttctttcaattttctactagctacttcatcattttttggtagcactacataaaagagttttgattattattggtgtagaggaatttaaacaacattaaaatacgtgcaaataataaatgaaaaaaacaaaaaagagcaaacacttacttagagtagcgagtattcaacggggagctaccaaaaacaacaaaacaactgaaaataatgacacaaagaaatatagtggctcagtcagatcacagtctgcttagtctactattgcaaatgatttctgcttagtttattaatttggatcacttctttatatagaaagcaagtgccattttaattttacataactaattaattgtgtagaacaattttacaataaatgatagtattaaatatgaataaatgtaaaataataaatgaagaacattttaatccgttcttatattaagtgcaacaatgtatgcgacatatcgagtgcgagttttttgttcatattctcgcacaaacttttaggcattaggtgcatatattatatattcgctaaacggctaatgggcctatcgctcggatgtctgcgttcactttgaattgcattgacagacatctcgcatattgacaacatggggcatgtgagccctgtcaagtcgtcgaacacagtctgtcatttggaccaattatcatgtaaagaacaatatttacttagtcgtaggaaaagactattagtcattgcatatattttgatatatgcgcgacttgtataaatcatctcggtcctgcttatctttcactacgtaaggcatagtatgcgattagaccctatcaaaatcacatcatctcgcgagttcagatcaagcgaagttaactctttaaaagtcattattaattaaaaactcatttattttttatcaaaaattaaatctacgtgtcaattttataaaaaattgttctcgaatttctactcgaaaaattcatactataacaattatatattaatgtacctaaacttctttaaataaagaaaaa

SEQ ID NO: 44246 - DNA, 2522 bp, Cannabis sativa
  modified_base (2467)..(2470): a, c, t, g, unknown or other
atatatataatacaattatgagagttaatagcgtaacatttgaagttaataaaatccaaatggtaaacactatcttttgatggttaattggttatataaatatgtttaattaataattaggagtgtgaactaatgatgattgttttaaaatttgacaggatttggagatgaatattttaacagtactagtacagcagcagtgaaagaagatcagtcgaaaaaagaggagaagaagacatttctgcaaggatataaaagtgtactcaactcaaaaagtagtgaagaatctttggtgggtataacatattaattatttttaattaactagcttggcctttcatggaactgattgatctatctctcttcatcatcatatatatataatatttttaattagcttaatactaattaattaattttaatgatgatgtgtttaattaggcaaattttgcaagatgggagccaggtcatggtcgattcaagtttcgtcatccatggaaacaataccttaaagttgcaacattgactcgccaatgtgcctatcgaattgaagccctccatggccatctcaatactgatcccaaagtaattataattattaatataattatctctcattatgcatccaaatttcacattaattaattataaactaataattaataatgaagttttacttcatttgaaataagtttaaatatattttattttatttttaaaattgttgtcaaattttgaaagtagcaaaataaaacaggagagatatatatattattggaaaatttgatgcactaatttttctctatttgtttcggcatcaaaaaaagtttatttttttttttcataatcgtgtacgttgtagttattttaaaatattgtataaaattttaaaaaatttataaaatatttaatacactaaaaataagattgatttttataggcgtataaaataaaccgtttaaatattattttataaattataaattattttagattttttaaaatttaacaaaatattttaaatatatatataaagtacaagtttataaaaaaaattaaattaaaaaattctaatatgggtatatcctagaagcacctattattttattttctgaaaaataattagaatacaaaatgtaaatatgtacgattttagacaattaaataaaatttaaataccatcttttacttttatatttgaacacatatataatggtgtgaacgcattacgcatacaatcaattctagagatcagcatttaacataataaacacatttttatttttttactttatcctgcatattataaataaggtttaattaactagtgataataatactttttcaggcatcaccagaaatcagagaacagatccaagaagcatgcacaaaaataagcttggaaagtggtaaagcactgaaggagctagccaagtcggtgagggaaatgactaaaataccctcatcatcagttggtgatgatgataatgatattgggcacatagcgagttcaaaagctgcagccaagtgtctgagatctttgttcaagtctggggtgttggagaatattgaccttttagaggctatcccttgtgtcacagttgcttcactactacttgatgttgttaattgcactgacaaaattgctgactcagtccatgaacttgcctcacttgcacaattcactaccactactactaatgatcatcctatgaataatgtttgtgtttcaccacgaaaaacaaacaactcaaacatagatcactcatcatcatcatcatcatctcaacctcaacatgtggtcattacaatcaataataatacacaatctgctcctgctccaattccaactttagcacaaatgggtgtgtaaatatacataaatctatatatttgtaatgttactcacattattatatataacaattacatctctttaattattataaagattggttgtaaattagaattagtagtttctggttttataattaattatggtcaactatgctacttctctaaaaggatggaataatataaaccctctgtgtttttaattataagtaactttgactgagttgttgagtttggttttctttgaaaattttagtatttaggaaatgagaaaatagccctaaaggtatttaaaattttaaatttgtaagtggtataaatttaatgtttatttttagcagtataagtactaatgtttgtaaaactgtaatttttttttctgattttgttagtacagctgttattattttaaataggatatatataagactcagattctagattattgggtctacacagaaacatatagtatgatttacttaataaatttaaaatagagtatgtattaataaagctgaagaaaatactgttttataaatgttggtacttatgtcgctgaaaataaatatgaaaggctcgtttggtacgccatataagggtcgtattgtattannnnataaataacactatgtttggataaagcaatatattatattaattatgacgac

SEQ ID NO: 44247 - DNA, 2487 bp, Cannabis sativa
tttagtaattttcaaaaatactacttatttttcaaatacaaggttcaataatttttttttcttaaggtccacccaatcttagggcctgccttaaatacacataaagtttaaataaatctatattgtgaactaagatgatatgttcaatgtgtaacttattttaggtttaatcaaaacatggagtttgtaaaatgtaactaatttatgtgttgttatgatttttaaacaatataatttttaacaagttttatagttaaaaaaaaaaaactacaaagaatttatcaaattatacacaaaaacaaccttgaccatcaagatagaattttctaagtataggaagacataagacatatgtcaaattgtttcttttacctctttacatttttttttcacacaaccctaactttaagcctttcggttcaaatttcaaccctacttgttttttgttttttgaaggtcatgccaaaaaaattaaaacaatataccaaatatagtaagaagaaaaaaaaaacaagaaatttctatcatcaacagaaatcaaacatcttttatcttaaacatatgtacttgtatatataaactaaaccttagtaatgggaaggacaattccaaataccgaaattcatataatcaatccaatcttatccatttcaatccttgcagttggaatggccgccgcaatagctataatcagtggtctatgtggtgttaaatatcgtaaaaaatcatcatcaccatcaccatcgttatctttgtctccttcatcgtcaactaaacaagaaaacaatgaagacataatattggattcaccatcaccgccacattcttctttttttcctttctctcatcaagatgtagagctacacgaaaataaagcacaagatactagttataataatagaaaagatgaggcgtcatttaatccaaagaaagtgatgagaggaacgtattcattcaaagaattgaagaagacgataacagctggttcatcgagcataaaagtgagaagaagtttgtctttaattgctagaggtcgaccagagagtcaaattaaaaatgaggatacgataaatagtagtagtaacgacgatactactaagaaaaaaggaaagaggaagatggatcatcaagaatcgatttggatgaagacaatcattttaggggaaaagtgtaaagtttcagatgaggaagaagaagctgtgatttatgagcgaaaaggaaagaaaatctctgcataccatcctagaacggggagttctttgtccatttctaggcaatcatcgttcattaatcaagatcatactctagtttcttgttcttcaagatcataaacattatgatgcatttcaagtatatatgcatttaatctttattgcattattctcataacttatttcattttatttttaattcttccatttaataaaaggaaaattgagaaggaaaaagaaacttgtatttcatgcaaattcatatgaacaaattaaatgtacacgcataacaaataaacaaattatacaacatgaaattaagttggggaatatctatctatatggaatgttgtgtaaaattaattttgtgaattttatctcaacatgataattaatatgaaaaaaaaaacatttaacatgcaacatgtactggtggatagtttcatcaatggaattttgtgtttagtgtgattaaatttatttaaaacaaaaataattttataaactttgtattttccacttacattattatctttttcattgaattttattatatatataataaaataaaattttgaagataacattaaaaatattttcatttatttttcattaatcaaatataggacataaaaaatattttcatttatttttcattaatcaaatataggacataaaaaaaaatatatctatctatttttcattaacataaaaatctatctattctagttaaactactctacttttttttttctcattttttaatttatattaattaataaacaaatatttcattatctctctttaggtttagtcgtgattgtaaacaattaattccttatatgattggagtctctttagtgtttatttatcagttaccaaacattaactcataaatttgtaagagcttctcattttcttcaaattgaaattttaaaaaagtattattctcgctgaatttatgtctacgttgttatacaatttatcttcattaacaaaagttattttccttttaaaaaaaattcaaatacttctccaattaccatttataaaaatgatttttttttttcatttttacatttaaaatatttttatagaaatttacataacaataaatccaaaagaataaaaagtaaaagaaataataaaaatatagtggtaattcccctataaaattaaaattttaaattaattaattttttaaaagtattaaaataatgagtaatttgcggcataaatacctaagtttaactcccaattgcaaataaatacctaa

SEQ ID NO: 44248 - DNA, 1468 bp, Cannabis sativa
  modified_base (1413)..(1428): a, c, t, g, unknown or other
aagtatttatatacacaaagaagtgtgataacagaattgagcaagaaagacaagagaaaactaaaaatgttacaaaagttagttagaataactaactaactaaaacagactcactcaactatactgacagatactaatgatcattgatcaggccatatggaagtaagttttgaattgtaaatggacatttccacggtttcacgagaatgctttgtcaatgcctttgaacttcgaacgaatcaatgaaactcactataagccttcttgatcttgccattattctcattctctcaaaccttctctccttgtacttggcaatacttaatcaccttgcatatattaatggtatctgataacagatttagttaaagacttatagatatcaaattatatttctttatcattagctcgtaaagtcaaatgaccacctcaaatatctataagtacgccaccagttgataaaaaaagagtacgcccaagaataattagaatttcttagtcctcttccatgtccaaaatcacaaatttgttgtaaatatgaatttatctacctttaccaatatctcttcaattattcctctaggataggtaatggaacggttcactaactaaagagtaatggttgttggatttacttcgatatttaattcgataaagttctttgtgatcttagagcaagtatcaaacttatgccattctcactgttcaagaaattgggataaggaatggtgaagcttccatgttctttcactttctaaggaaatttcttttgaagggtggcactacattcttcgttaatttaacactttcaaaatcttaagagtcgttttttttttgtcatcacttcttccataaacttcacataatttagcaattcttaataaacatcaacaaatgggatgcttatgtgaattttcttgaaaatctctaaaaaattttgcaaacttttcatcaatctttttcttttggaatcgttgagggtatggtaatggtggttgatatggaggatgaatcactttcttctcaatcaaactctccttaactgcatttttctccttgtcaacctcacgcccttgggttttttccttctcattaagagaaaaattaatttatttttttctctaaatttcgaaaatttaatttcagaaaaaaaaatcttctaatttttcaaattagtcttctatttatagtagttaaatctctttaattaaattgttatttaatttttttaataaataaaaatctataatcaaattcagttattgatatttatgagagaatttctcaactacttgagagaatatctcaacaaccttaaaatatctacgctaattgggatttttgccacaaattatgcctctgaacttttctggtcattaaaaattctcctattgagattgttagatttaaagnnnnnnnnnnnnnnnnattcaattttactattttagtgatcgtttatgtactaaat

SEQ ID NO: 44249 - DNA, 2351 bp, Cannabis sativa
aaaataagaaagcctcttttaaattcagcatatttcgattacttactttacttattaaaataattaaatgaatataaaacggaaagtcttcactaccagagatctgagctcagagacgaccccaaaactcaaagattccaatcacccattaccaatggccacggaaacatctaattcagacacccataataacccagaaatcagtgagtgttttaattagtaactaactgtatccttaaataaataatatgattactctctcccattgttttttccttctaattctcctccttccaggctcggccaattcagaaatcaacaaaccaaataagcaaatcttcatcttatcgggtcagagcaacatgtcaggccgcggaggagttaaccaaaacctcatctgggacggcgtcgttccgccggaatgccaacccgatcgtcacatcctccgcctaagcgccaagctccattgggaaaccgcgcgtgagcctctccacgcagacatcgacaccaacaagacctgtggggttgggcctggaatggcgttcgctaacgcagtgagagcccatttggcccaattaggcccactgggccttgtgccctgcgctgtgggtggaacggccattaaggaatgggcgcgtggagaacacctctacgaagatatgataaagagagcgaaagagagcgtgaagggaggaggtgagattcgagcgttgttgtggtaccaaggagagagtgacacgtcatcggaggaggatgttgtggcgtaccaggggaacatggagaggcttattcagaatattcgtgatgatctttgtttgccttcacttccaattattcaggtgattaatcaaattttgttttgtataattctgagataattcttttaaatgattttttttttttattttgttgatttgatttttacaggtggcaataaattcagggttggataagatattagtggagaaattaatgaaggtcgcaaatgttgtgtgtgttgatgcaaagggattggagctcaaatttgataatctccacctaaccactaaggcccaggttgaattgggccataaactggctcaagcttacctttccaactttggccaacgttaggatcaaattcaatccattcacccttacaaattctattgttacaattgtattacattgattttgaagatttgaatattaattatatttaatatagaaaattgtaattctcaaaagctcaattcgaaatatgattgataattaatattatgtgagagatcattgagaataataatgtatttatattgttatttgatatagtatatttcctatattttatgataatgatgatttagtgatctactttgaagatgaataagttgttatttgataatctttatcacgtgaagaatcaaatactcgaataataataagatgacttattttgtagttagatattgtatgaacacttaaacctgatataatttgtacacgggtgttataagaatattgattgtatattagagttgtgatatttcgttttagtgttaaagaataattaatttgattgtaaatttaataaattagatattgtagtcatattttttttttttctagaactcaagagtcttgttgcttcatttgtggtgatgacattacaatgatcatatttcttattatgtcttgggacatatttaaaaagttagatctaaactatattttgacttctgaaaggtgagatatcaactataattataatttgtttaatgtaagaatcgtataattctagtttagttatagaactggtagaatttaaatttgtaattattaaattacagttacaattattaccatattttgacaaacataggttaaatcgttaaaagtacaaatattacattctagctagtagcttgcgattgttccctaatctataatacacaatacaccctactaatctcaaataccaataataaactttccaaagtcatgcttcgagttctgtgtataagaatctaccatcaacatgcgcactgaatccataatcagtttacatatataaaaatagagaaatgttaaaccacactagtgtgtttaactctttctatgttaatattattattctaattgtcgagtctcgtatagtttaatataataaattttgaaaagtatcgctaaccaattccaagacaatatatttaaaggtacaagactttactggtacctaataataatgtttataaattaatagaagaaactgtttttaatcttatgcagaaaagaggcaaaagtaaataataagatcactaagagcttgtttggttgtgttttcagttttcagtttttaaaattgtgttttt

SEQ ID NO: 44250 - DNA, 3183 bp, Cannabis sativa
  modified_base (60)..(63): a, c, t, g, unknown or other
aacaatctcaatagttcagaggacattttcaatggctttaaaagttcagggggcatgatnnnntacatgtcaaagttcagagggtaaaaattataattaacctttttaataagagactgcaaaggagatatgcatataatgggattggattatggatataataaaagaaaatacacatctatttcgcaaattctgaagagtcgagatttcagtcctacgtatattaattaaggctggaaaagaatcagaggagacttctgtaagaaaaaccagggactccctgataccctcataaacagacatgtatacatttcacaacaagaaatgggcaatatcggcccagtttgaactatgcaaaaagaatttcaaccaaaaaaacaaaacactaccaatgaacaattttcagcccatcaacccatgttccacactttctgctatacatacacgattaccaatacccacctatttacatctaccccgaaaaaaaacctgtaggcttgatgtcttgcacaaaaacgactgacatcttcgtatcaatgcaaaagataaaagcacagcctactaatgcaccttctcattcagaagcttgttccacggttatatttgtggcaggcctcacatatataagaaacaaccgaatcttcttgtcatgtttcaaatccaaggaaagccctgttgcccagtttttccttttccatgtctttatgaatctagcaactcctgtatccatggactcaaagaacctggtggttttaatcaagattttatggccggctctccaaatgattaacttgttgtcactcaatagagcttctcgtcctcacccacggttaaatgaagatctcaaactctcatctggcagtgtccatgacagcaaatgcccaccagcatccccactcagcaactgttttaggtcatttgggaggtgaagagcagtaacagggtgtttgtgagacttcagcaccttgtggaggaccaatctgtactctgacgcctttccaccaagacttaagcccccagttccaccgcttgttgatttgctaggggaatgctcattgatggagcagtgaaccatttgccacaccttaactgcaccactctggtgacctgtcacataccagtttgtatccaaccaatcagaaaatgaactgctagtcactgagagaattgaatctgatgggagctgggatgtattaacagctgcaaggcagtctccattgatgctccaaatagcaagtagagttccagcagcagttacaatctccccagtcaagtcattcacataaattgcagaaactggagatgggaactcgggcagctgcctaacaaaacccaaggagctgagatcccatataataacggtacagtcatctgatccactcacaatcatcatgtaaggctggctgacatgaagacacgtgattttggatgtgtgtgcactaagagccttctccaaatgcaatcgccttacagcacgaggaccatacttactgattatccaaacagaaactaaaccatcatcagctccagtgaccagaatcctaccatcatgactcacaccagcacactgaatctggttgcccccatgaagattttcatgtgttgaaaggagtcggtcttgatcatagctcataaatctcaaactacgatctggaaaaccccatacaacatattttgtatatgtccttggtttgagaaaactattcattcctgcgacaagaactttctcattgatagtaacaatctgactaatggaagatgaacttctacgtatctcatgaggaacaatttggctagagtacttgagtggatgaggaggaaatttcttgtccactcgcctttttacatgagctttgagaaacaattgcttaggcgtctgtccaaaatgatttatttgtgctagaatagaggctttcattgcaggatctgtaactgagtctatgtccacactcccttcatatgtataatggtaaaaaacattcacagcttcctctgccgcctattcagtacccaaataaattgcaaaattagatacggaaaaattacggagcaatagaagacatcataagttgttttgaagtaaaacgagactctaaaaacagttccaatataaatattattttaaaagaaaacaattccaatattatggaccagattaaaccacaatagcagtgaaaggaaggttgagtgatactgcatcccttaaagagagttgactgtaaaaaaataaatgagaaaagtgttgcacctaccttccctctctgcttatatccaaatatgagatctatccaatgatgcaagttttctgaaacaaaatcagattccagagcctccctatgcttcctgatgaactctctaacactgccttttgcccatggaggtaagacaacatcaccaacctgagaaaatgacagacagatcagcaaatttaaaactgttcttagttgaaaaacaaaaagttcttcgtgaacataaagattgttgaattagtagtgacagacagaattgaatgaaccccacggacgaaactggaattgtctgtcaattgttcattagaagattcattctaaaatagataaaaaaaaaatcctaacactagaaaaactccagaatgttcaattgttccatgaaaaaataaatgcatgctgaccccataaataaacaagtgcataaggagcaccattgaggaagaaatgatagtcctcataagtatcattaaaactaaccttttctcctgattgtttctctccaaaatcaagattaaaacgattttcaaggaactctggcatatagaaaaattctggaatcaattccttcacatctgatgtatttcccttgccagctgcacttaaccaagtgtctctaacactattaaaaagacgatcggcatggtcaaactgccctccttgtagcttctgattctccgcactaaaaggcggtaggcgtagaagatagaagagaacaattccagcactggaataatgggaaccataatgaaatttagggacctcagggtcatcccagctctcatacctggaaaagagaacaaaaaaaaaaacagaatataaaatatagctagattcacattttatcactgtaatttaagactatagcagacatttcaaggacctgaaaaaaaatcaaggaaaaaatactgtactgctggagagtaccttttcttaa

SEQ ID NO: 44251 - DNA, 2862 bp, Cannabis sativa
tatcaagagttatcttatgcatttcttcacccttgacctctatttggacatgtaggcagatgtttgtccatatgtcatattggagtctttgatgtttgtccttggatgatatgagtgccaacaaattttacattctacccttatgacatttgaatatataccacaaatcttttaatgtgggcttgtgggattctctcaagtattacatttggtttgctgtatttagaaattcgacccagatatgaagacgtgtactacaaacattctcacattggaacaatttgagaaacaccatattgagatatggtgttactcctctttgcacttattgcttctaagttggaacaaggcctagtcctaatttggaataaactagaagttgatgtcttgtatttcttcctccataagtgtatctgtgtatatgaacatttgatttatgattgtttatatatttattcatttattttggccgtagatatcttacacgtttgtatgtgtgtcctgactttgactgtctcctttctgtttattgttcaaatgtatttactgaatttttttattgcttttaatttctttgtcatgttgcagaactgcagaagccacccgttaaagttggtgtgaaaatggataatccacctcttgaagttggtgtgaaaatggataatccacctcttaaaaaagcgaatacgtgtgaaaatggagatacgcaccctttttttaaggtacaaaagaaaccttataactttcttgaggacatttcaaaagggacagaaaaagtgggaatttcactattggatgaaattggcaatgagcgtattccaaaatttaattacattcctcaaagcattatctatcaaaatgccaatataaatatatcactggctcgaattgtggacgaggattgctgttcaagttgttctggagattgcctttcttcatcattaccgtgtgcctgtgcttgtgaaactggtggagagtttgcatacacaccacaaggacttttaaaagaaaagtttttaaaagcttgtattgatatgaaagagcagccagaggaccaccactttgtttattgcacagattgccctattgagaggtctaggaatgatgacaaatttgagaaatgtaagggacacctggtaagaaagtttattaaagaatgctggagaaaatgtggctgtgacatgaaatgtggaaacagagtagtccaacgaggtatttcaagaagattacaggttagtttaaggctgaacccttatgaatacatgttggtaacagttcgcactttgctgctatccgctacgatttcttttattgtttttgtaagatattttcatgtatgtactgtactgagtagctgctacaacgattcaggttttctttaccagtgaaggaaaaggatggggtgttcgaccacttgatccattgcctgagggagcattcgtttgtgaatacattggagaagtgttaaccaatatggagttgtacaataggaataaaaaaagcagcaaagataggcatacatatcctgtaacactggatgcagattggggctccgaggggtttctaaaagatgaagaggcactttgtttggatggaacatatcatggaaacgtttccagatttatcaatcataggtatagttgttgcttttgcatcttgtcaatttttattgtctccatttggagaatcttagtgctattgttaaggagaagatgtatttcaatgtcatgtttggaaaagaagacgtagaagaaaaacatagaagatgaatgagctgattattttgtcaataataaacgaaaacaaaaatggatgtgaagttgtactttttttttcttcttactattgatttacatgaagatagagttttgaattttataaaattattccaagtttttttctttttctttgaatgagattacatgatcccatgctaggtttgattaatttgaatcaacagttttttgagaaattacattgttatttatctttatgatcttttttctcctcttaatcactataggtgctctgatccaaacttggttgatattcctgtggaagtggagacacctgaccgccatttttaccatgtatggaacatatgttttactttatttattttggttgcacaaaggaaggatttactttgtaagttgaacaaattgaatgcctacttttattatttttaaataacaaaatcattatatgtgggtttgcttctcttatgcagcttgcattcttcaccactaggaaagttgctgctttagaagagcttacttgggtaggtacaactacattaagtagtgttgttaattttgtagatggttgccgtgtctttatttcaattgaattcctttgtttgggattaatatcactttcaggattatgggattgacttcaatgataagtatcatccaattaaggcgtttcgttgctcttgtggaagtccaaattgcagggacaaaacacgaaagaggttagtctattacttcctttcatctgtcactaatttttatggccattgccaaaccacagaaaacactatgacgaaactggcatatgaatatgtcatagttgttaactcaaattaatatggaaaataactatttgaaatatttttcatagtaatatagcatttgatatgttttaattcattattaaacgatctaaatattttttaattcaatattaaaagattaatgatcgaaacactcattttacacactgatgtagcaatattgttaaccattaatgaaaagtcacattgtccaattctagtaaattcacatcattgcgtatatgtaaaaagagcgtgtctaaataatttcatctccatattattatttaggctaattaagattt

SEQ ID NO: 44252 - DNA, 2556 bp, Cannabis sativa
  modified_base (27)..(28): a, c, t, g, unknown or other
actaatcagattgtaaagagttttatnnagggcataaaacccaacatccaaaggtaaagacatgtttatcttggttatctcaacattaactaactcctgaggtcttattagcttgctgattaaaggtgatcacttaacttgcaataatcatcaagatggagggaatcatgtaaaattggccttggataaaggtcttgccaatgatggtttggtttccctattccctaagacggtgttgtgctctttccagtcttgcacttgaatcgtaggcctttatgcatttactcagatggtcgggaaagcaatgtgaaactccagtttagattcaaagaagcttggacttgggacaatcgcaaaaaactggtagtgagtcacgcttggtccttggttaatcataattgggctctagctagaattttcaagtagattagggctactagagttgcgctgctcaactagaataggcactaatttagaaagattgatgacatgattagagatttagaatataagttgaatattatctaaactatgtcgacgggtattagaaattggaaagaggaagcagagcttagaaatttgctaaaccgggccttggagcaaaaagctttatattggaaacaaagggccagattttcgtggctaaaagagggggctaaatgctttaaaaaaaaattcattgcggccactattaggaaaaggcaaaatgcaattgagagtttattggaaaaaaattgaaattggattactagccagaatcaaatagagaaagaattcattgactactttagaggtatttttgctgggaatattgacacaaagaggcctagcttgaacatgaccattagagatggtttcactgaagaggaatagatgagtcttctccctatgcaagatgttgatgaaattaggaagactttattcaccctgaataacaacaaagctgctggcccgaatggtatgttagtgctttttcttaaacattattgggaaacattgggcagggacttttgtgacgcagttttagatttctttcgatcagggactatgcataaaggtataaacactatgtaacgccctaatgattaggcccgcaatagtgattttctaattatagtgcacccctttcctaaccaacagattttctcaaaaatcgtgataaatttaaattttgatttaaatttaaacttttataaatacatacatatattaatacataaagttgggatcctatttttaaaattttacatccatattcaaaataacttttacaaacatgtcacacaacgacaataaaattaagcccatgccttcctaagactgtactctccaggtcacaccgtctcgacatgtataaccatcccaaagctctggactcactactgttcagctttagccttccctttacctacacatgtaagcaatatctgtgagtcaacaaactcagtaagaaaagtatataacatacaatatatattgcagacttgtatctaggcccccatacacctatccacaaggcttaacagatgagtaagaacattcttaactaaggtacgatcactgtaccacatgcactacgtaccgctactatactagtgttggtagggatcgaatcatacccttagtaccactgagtgttgcaccacatgcattgtgtacataactgtattagtgttggtaacaccatattgtacccgttgaacatcatacactgtaccaatgcactcagtaccgctaccgtactagtgttggtagcatacaatgcatataattagcatgcatacattacacatacacatattcatatataaatatattctatgctagtcttacattattttcgaattcaagtgtgtcggtcgacttgaacggaaaatcacgcgctgaatggatgccctatgtcacaatcatgtaaatgggtaaacaactttctaaaatcctttctaggaacctaaaataaaaactaaaagttttcctattggtaaaaagcatggaaataacctaaatattgaggaaattaacatcaaaacgaaggttctgaaaactgcccaaactggtaaaccagattccccaaatggataatcgatttctagggttctgcctggtgaaacggttaaccaattttacagtaccagtagaacttgttaaacggttcatagtagaaaaccctaaaaacttaaaaactcaatcaattttcccccaaatacagctaaactttccagaacacctataatatcatccaagaaaaattctcaagcaacaatagcaagaaatacacacagaaactcaaagtgccatgttgagccaagtttgagttttcaaactcaaacttgctcagccactccacaaatcaacaaaaccagtagaaactaaacaaattcttctaaaatatgacccccagaaatcgaagaaaaatgagacctaattctaacagcacctaaaatcaaatttcacatgcaataaccaactaaaagctaaaagaactcaagggatactagtttctagaccttatcatagcttgaatcacgaaaacccctttgaatccttgctaagaat

SEQ ID NO: 44253 - DNA, 4320 bp, Cannabis sativa
acacatatgatagtgtgtgtactgtgtgtatgcgcaatagggaggcacaattttaagtttttaattacatatcaataatgctaactctatatttgcataaccatgaaagtgtatcacaaatctgcaaaggggtaatggtatgaatatgaataattgtcgtttacccgtcaactttgtgctttccagtttgaatttttatctccatgcgacacatatctacaaaaaaaaaagaatcaatgcttttattagtagtgcaaatcagctgctaaaatagcttgcaagggacatgccccttactgtaactatgaactaggaataaacaagcagcctcagccaaataattatttgcagatagtttgacaaaaacaagcaagccattgtttagactactaagtaacaccctacaatccaacacaagcaaaccgaaaagagagttcatttgcatcgagttgtaggtagctttgaaaagcactcgacagttagtctccaccaccacccatgcatatcatgtctaatccaactttaaaggagagttagtggattttattactatactttgtttggaaaatattgtgataaatcccctaataagatgtatcaacatatgatggtgttttaaccctaattttatttttaatgattttgtgttttaattagcttacaaatttttggaaaattcaagttattttaagtatattatatttgtttctcaatttaatatatgtattataggagaagattttttggattcagtattgataatcaccaaaatattttcgttgcatacctgatttagtatcgaataactaacaaataatatttatagtcatcaaaatttatttttttcttcaactttagcaattttcgatagaaaaactagtgataagaaatgaatataatttcacttaagggtaattatgactttttaggtgaatataaggttatttttgtaataaattttgaaaggggtatataattatagaagggtaggggtcgcaatccagatcatgataaaacaacataatacaaactcaaaacaaattatagcgagtcaatgtcataaaaaaataagtgcaagttaaatttacgttgaacccaaatgacatgataattttttgagttgggttaggatcaaaccgatgacatgaagttaacacaattgatcttgtatgttttgcaatatattttcttttgtcgaaagaagatctacaattgatctacaattgctaagtgattctaactacatacccttattggaaggttaggatgaagactcataaaatcccaaaatgaaagagctttggaatctattctaacgggttggtcaccaccagttgaagaagatgatgaaggtaattagaatagtcaagtgagtaagatatattgtctagtaataacaataaatttttgcatgctatttttaattgtgttggtgaaggttttattaaattaatctcctcgtgtgaatttgtaagtgaagcttggctaattcttaaaactcactttgaaggaattacaaatgtaaagtgttcttggtttattatgttacaaagtagatttgatgatcttagaatgttcgattttgaaactgtttctaaattttataaaaaattgtcagacattgctaatgacctttttatcttgggtgaaaacttgatgaatctattttagttaggaaaatagttcgagttcttcctgacaggtttaatacatagattttagcgatggaggagactaaagactttagcacaatgaatgttgatgggattacttcgaatatttgagcttaatcaacaaatttgacaaaagaagaaacacaataaggtagaagaaaaaaaaattgattgccttaaaaatttctgagaatgttggtaatgatgacgagggtgataatgaattaaccatattaatatgatgtttttgtcattcttgaaagcgggggagacaaaaagttttttttttttaaattctcaaaaagtaattcatcttcaaaaaattttgtgcataacaataaaagagttattcaatatagagaatatgatggttttagctacatacaatctaaatgtgctaatgttttcaaaatgaataaaaatagtttgaatgcaactttgagtgaaagtgattatgaaactagtggtgataaattagttgctttaacctctgttcttcctagcatgtatcatttttttttttacagaaaaagagaaatcttgtttgcctaaacaacattattttggataataaaagttttgttggtgctattgaatttgaatttgatgaatttgaactcgaggaagattctttggctgaatcctataaggttatgtacgaaaagtggatacaagttttgtaacaccctaagattaggaaatcggattattagcaaaaccctaactagttaaatataaattaattatattattatataatttaaattttttaattatactgataaatgacattttaagaccctattggtgagccagggttatttttgtaattttgacacaagaaggggtaaaattataatttatgtgaaatatcgtgcttatggactatattattatatagtatatttgttttgtcttttgcaggtgttttttgacaagtcggcgcggtatagtcacaatcgtgtattttgagccaagccaaattgggttcggggtccgaaatacatttttgggattttattttgacattatttagataattatgaaatctgaaatttatgttatttgtgtgtgaggtgaaatgacaattttgcccttgctgtatatatatgtggtttattggccctagggacattttggtcatttgaccatatttgatatattcaacaaagtggatttttgttaatgaaggaaaaacctattttttggtttctacagcccataaccaacccctctctctcctttctcaccttcctcaaagtttgatatttttggagttaagcttagaatttgaggtgttcttggtgtgttttgttgtttaagcttgagaaacttgtggtaagctcttattcctcctttatttgagtttgatttctaagtttaagggctaagtattgtaatgtaataattatttttgatgttcaagtgagatttaaatgcatgttggtagaattattattgatttgatgattcttttggtggtttaagttcatagggattatggaatagcttctattgttctttgtgttatgattttgtaaagttgagatgtgtgtttgaagattgagttatctttgaatgttttggggagcttaattgttgttttcaagcttgtgaagtggaagggtgatattggttttagtttaaagttgttgctagttttgatgcttgaagaccttgaattaaattgtatatattgatattgtttaaagcttaattttgggtgagttgtgtattttaattgtgcatgttttggtttgagtttggggtgtttttggcatgaaattcgaatgaattggaattgacatttctgggttctcaacctaggcgccacgacatgctctgggagcgctacggctcacccacttgaaattttgggtttttctacctagaagccgcgtcatgctttgtgagtgtctcgaaccgcctgggtatttttgggcagtttacttgttgaactttggttgttcataacttctcaacctgaactccatttgggatattctgtgtaaaagctcgttttgagctctatatatttatgagtattaaagatgccaattatatgattgtgtgaaagtggatttagggattagccctatttgtgaatcccgcgaattgtgaataggattaccagtacttgttcaagagcacccagggatttagaattttcacgtagttgggacattaggtaagacaatagttagcacgtagacactactacaaaaaagcccttttaagtccatcaatgttggactagataaagtttcctagtctattttatgttggacatagtagccagggatataaaaggggtacttttctagtccaacaattttggactacaaaaacatttctagtccaactatattagacttgataagcggtctcactacgacaattcttttcaagtccaaaaaagttagacatgaaacttgattattggactagaaaaacatttctagtctaacaatgctagacttgaaaagcaacaaattcgctagagttgaaacttaattttttcttaaaaaataataataaaagaaaaaaaattaattatttatttatgaaattataaagaattatatatattatataatataatttttccttgtaaattatttataattattttaattcaattaataaa

SEQ ID NO: 44254 - DNA, 1914 bp, Cannabis sativa
tatacattaaacataattatgaaataaattatgtgaaccatgcaacataaaataatttttaatcttatattaattagtataaatctaattatattaaaataagatttatttagaacactaacccaacccttcttagttgtatatgaaatttttgctctgtgatgactgattacagtttctttttaatgatattatcatttcgttaaaaaatgctttataaaaagaccggacaataacgataaagcaaaatactaaataaaaaaaatgtatgactggaattaattatttatagcatataattattatgaacaataataatacaaagcacgaaaaaaagcatatatccagatgatgaatcatgacgctgcatgtgatcaggggccaagatttgtcataattaatccgaaatagtttgattgaacaaattttattttaattattaactatttaaatatatttatgaaagctgtcgtatatattcctaaaaaataatttctttattttctttgtgattattacataacaaaaatacattatgtctttttcaattttttgacatatccccatttatatatattgttgttaggactaatagaaacaattgtacatttgaaaattaattaaatcatcatcatcttattaatttagccatgtgcaaatagttgatctccaccgttgatctacctatttaaacaaataatagcacatacaaagttttcatttttatagagagatagagaaagaggtataacatgggatgtgacaagggattctccagcagttacatgctattgaagccagaagaagtgaagttttttgatctgattagaatcttgttctcaagtaacgtagagaagagaaagtttgtggagttttgtccggcagatggagcggcggcggctgcggcggaggaagtgaatttccggcgaagatggatgattttggtatccatattggcacaaaagtttcttctgtttacatctaggctattggtgtggttgggttctggttttgagatgtggcttaaccttgtctctcttaatcaaaatgtggcccgccttatcctcaatttctttcaaggtacctaattaattactcaacattattatgtatatagatatagatcaatcatcgattttaaatgttctatgaaattttcaaatgttgttaaaatgctttttatattatacaagaataataaaatctagctaaaaagcttcatcactccatctgatcataaactataaagcctcatgcatgagcaaaaaatattttagtacattaatatttctctttttctaatttcttgttcacactttataaaactttttatgtaggtggatcattcttattttattgcattttattcttattttccgtagttagagaaattatatttcaattcttttttatctgattaattgcatatatactttattttttaaataagtaaaatttaaaatatataattaattgtaaacacgagtatataatgaaaacatagcatacatgcaactaaccgtataaatcttatattttggtactttgaatgagtgaaccccgatctaaaataattaaaatatattaaaaatataatatttaataatatagaaaaaaaaaaacctaaaaattaatgtatagtataaaataaatgtttaaagtaaaataaaaataaatgcatcaaatcatttaaaaaaaaatgattaaggtgaagggggtttgagaaattaggtgagacccaagattcgattgacgggatctagatattactaggctttctagtctcaattagacactcatatttgacacagagtgttgctgtagattaattgtatttgtattatttaatacaatattatgtttgacattgagacttgtattaataatacgttatataaaattataatattttta

SEQ ID NO: 44255 - DNA, 2001 bp, Cannabis sativa
gcatagatttgtatgtcgtttggtggcaatgaaatcttatttttctctttgtatagaccctttcggcctttggccatttgctgattcctactacgtgacgttcaaaatctaatttcgtataacaaaaccccatttttggcaggccaaaccatggtttcattaatcttcctctttccctttaagcatgaagtttagatgcaagttgatgatacatttaagatttcttcagcatttctttctctagctagtgatttaagttgaacccatattttcctttggataatcattttagatattcctctagaactttactttcatgcatgtatggcttttagttatgatcgctagttagctagctttgtttgttagcagaatattttagtatcttaatttgagattctccggatggatttgtttagcttgagattgagagaatgagagattaattaatgatttcaataagaattggattagaaaatactcactatttaactattctcaaagcactaagaaaatatgttgcactcttccaccaaagtccaaattataaaggcaaagccaaaagtaacttccattaaacttgtgactacatagacattacataacccatcagtgtagtttttcaactacatctttaaaacacaaagttttgacctatgaaggaaaaagaaaagaaaaaaaaaacaacatggaagattttttcatcttcaacaatgagatcttactacaaatgaggaaaacaaggtgatgataaatttggagtcatcaaacgcatatctataagctagcatattgccttgaacagataagcatagagtgagaaggggagggtcttagaggagatcacactactgaaaacttttcctccatcttcaaattgtgaaaaacagaaatttcatttagtcttgtgcctttgcaatctgaatatgggctttcccatcatgtttcatcttcatggaagttctaacatagtcaccatatttgatcttcttgtacaagggaagggacccttttgtgtctatcaaatgactgagaggtccaatttccacctcatctagtggaacaaaaaatgttgcataagataatcttgtcttggactcatttgtcacagctctatgctctacactcttgtacttgccattactcagtatctgtcatttgaagcaacaaaatgtttgaacttaaaaaaaagaaaagattgctcaatcatcaaaagcttaacaaaactaactatataacattaccaggtacctcagtaacatctccaacattaacaatcaaagcgtttggaatagccttgaccggcacccatcctccttgatggcgaatctgtaacccggtcacatcaccatcttgcgtgagtattgttatggtgcttgtatcagagtgtggacttattcctagcaccttttctggtgtttggcatggaggatagtagttcactcgcatagcttgcacaagttctttatgcaaccctataagagaacctttctccattcccatgatcaaagatagtgagcctagtagctccattgctactcttttgagttctgtggaataagcctccatagaatccctatgttgatgcaacattttaattaaacgaacaacaccactaatgaaagttaaagaattttgcataaaattgtgagaatcgaaacaatagacatacttgaatctctgtggttttgctggccaaatgttaagattcctaaaccaggaagggtagacaagcatgatcaatgtgtcagaccaatctaatttctgatcttcagatactacgtatgcatgtccatagccttgtatgtcatttggaggcatcgaaatcttgttcttctcttctaatggcagttcaaaaaactcagctgaagcatctttcagaccctgcaatactttgccttcaactccatgattcaccacctgaaaataatatattcaatttgtttatttcagtttgaggtatctaccattttaagaatgttcttaactttatatcaagcc

SEQ ID NO: 44256 - DNA, 1519 bp, Cannabis sativa
ccgatcggtgctgcccgaaatcgatgaagcaagagttgcttcaaagtggcccacgagtttatcggcctccgctggttctcccattgaaaccacgttagtgcatcaccatccaaacccacaatggctgtttccaacatcattggttccgttaatcgacaaattaaaaaatacctctcagctctatagacccaaccttctgggttttcgccggagaacacgggaatctccattctaggtggccggtaatctgatcctggaaatgatgcttgctgatacggattgggatgtggtggcggctatggtggaaggtgagtctgtggtggcggtgatggtggaaaacgaacctctagttcgatcggcgctgaggaagacgatccatggccttgcactacgggctgtcggaagtcgttgctgcctgtggtagcctctgccgtgatttttccagcaacaaagaatcgtgtcaactatgccatcataatctctggtaacctctggacctcagctcttgtgtccgacacctccttccccaactgcgatctaacttccgatatctctttctgcacttccgatcgcaaagcttccagtcgttcatccatgatctccccacttgcatctttcttaggtcccattagattgggctctgataccaatttgataggaattccctatcaaaattagtccaaaccagcaaataaaagaataacagagaagagatgaaggaaaaatggcagatctgcctttctattgatcacccaggagttcgagagcctggttctctcccaatacaactctaattcagtctaaactcttcacacttacaaaatcaaacccatacccttttattccactcaaccgagtgtaactacaaagacccacacccaattacaactcttttaaccacacttgccaactcagcaattaattacctgtggtattacctaccacttttcccttgttccttcggctgtagacaaaagtcagtagaggtctatcacatatcatagctaactcatggttacctacatcagaattttctgcattagatactgctattaccaatatcgcttcatgctttaaaagtttagattcttggcacttaggaaaatatggtgcactacctaaagagatccgaaataccaaacagaaattatccttagcccaaaatatggatcataacttgtacaatcgggaggaagttgctcaacttgaatctagtttatccagtctcctagagaaagaagagatcttttggcaacaaagatcaagagtccaatggttaaaggctggggaccaaaacacaaaatattttcatcgtcatgctaatactagatttcagaatatttatgtgagctattttgataatctgctaattttatattgtgttaattttaatccctgaaatatttatttaaacaatatgactaataacgtgagaggaatgacttctattggatcacagttggatccttaattgtcaggtagttgatattcatactttatttgtatttattcactatca

SEQ ID NO: 44257 - DNA, 4072 bp, Cannabis sativa
agaatataaaaagggtatagagtgtaaatgtcaattatatacttttgttatatttgttagctagagaatgtctatagtatacgagaggtgtgtataaatcaatctaatctaatgataatcgaccaccaaatattagatattcagttgtaatcggatcagattgaatgttattttttaatatctaattagatcggatcagatgttagatgagatgtttaaaaattcaatacatccaacattcaatcgaactaattaatatttttatttagtttggatgattaatttgattttacattattatatgtaaagaaatatatgtatatatgaaaattaacattaaaattttactttttttattggatggatccaatccaatccaataaatgctagatcaaaaatattggatgaattcgatctgatccaaaaaaaaatattaggtctaaaatattaaataaatctgaattaatttaatagatatatatgaaatatatccaatggatgttggatcgattggatgaatgagtgaatttgatcagattaaatggtaaaattttacatctattggatcgaatctggatagacctacaaatattgaatgtagtctaatgaacacccatatgtacaccctcagtagacttatctaatttgacatttgtgagagttttttttttttttttctaataatcgtctatgttgtaactatttaaggtcacttataaatttttaaaaaatttcaaataatttacagtgtgaaaaataaagttaaaatattttattgcatgcgtgactgtttttttttttttaatactcatggtaaataattatttgaactttattttttaatattgtaaattatttaaaaaaaattacaagtggtccgaaaattaaaaaagtggaagcaagaaaatagtaaatgcatttatatttttacaatattctataagtgttttcaatattgaatacttattatttaatttatttatttttcagaaataattggtggaattggtgatatcaaaattgagcgatattttcacttcgaaccgatgaaggatttatattctatgatatttgtagtttgtgcactcttattttattaaattagcatgtattatcaatatttgatgttagacttatgttacaatttgggttggacttatgttataatttagattagatctatgttacaatttatgttggattataataatttgaactaatatatttgtcgattcatttggatcaaaaatcatgtttaatttgttttaataattggattggatggatccaataaattcaattaacattggattaaaaatattggatgggaacagagttgaagagattgaagaacaagagagattctctctcggtccaacgttatgaaaaggtgaaaaaggagctttttttggttttggatcaaaagaaagcgttttggaagcagagggcagagcaatttcggttgaaagaaggcgatcaaaatagtaagtactttcatcgggctgctagcaatcgtcgaagtttcaaccaaatttcgaagcttaaagattccagtggtaattggaaggagtgggaaaatggccttgctgatgttgttgtggattacttctcgactttattcaatgcttcgaatgtggattgtgacactgtgatctgatgcatccaaagaaaggttacttctcaaatcaatgaagaccttattcagcctgttgttgcagaggaagtgagaaaagctatatttagtatgcatcccgataagagtcctggtcccgatggtatgacgcatgcgttttatcaaaaatgatgtgacattattcaggctgatgttgttgcggtggtttagaaattcttctctacgggtcagtttgatcaaggttttggagatgctaatgttgtcttgattccgaaaaagaaacttcttgaaagtatggttgatttgaggccaattgctttatgtaatgtattgtacaagatcattactaaagttttggctaatcggatgaagcctcatatggatcgaattgttttagaatctcaaaacgccttcattccgggaagacttataactgacaatatcttagtttcctttgaggtgctccattatttgaagaggaaaaggacgggtaaggaagggttcatggcactaaaactcgaccttagtaaggcttatatcgcatcgagtggacctttttggattcggttctgaggaagattggtttctctgaaaaatggatttcgttggtaatgaaatgtgttaattcggccaagtataatgtgattcatggtggtaggattatggggccaattactcctagtcgaggtattcgtcaaggagatccgttgtcaccatatatcttcattctttgtgcggaagggctatcagccttgattaaaagatttgaggatatgagcttcattcacggttgcaaagtggcaaatggtgccccgaaagtatctcatatgctattcgcagatgacagttacctgtattgcaaagccaccactctccaagaagctactcgagttagagaagtcctcaatcaattcgaggctgcttcgggccagaaagtgaatttgggaaagtcatctattttttatagtactaataccgtgagccatgttagagaggaaattaatactctgcttcagatgctacaagcagatgaaaggagtatgtatttgggtcttcctagtactatgggacgcaataagtcggctgtgttggagtttttaaaggatagagtgcggaaaaaactccaaggttgggattcgaaagtgctatctcgtgctggtaaaaaggtactaatcaaattggtagcgcaatctcttcctagctatgctatgaatgtgttcttactaccattggagattagtagagatatcgagagtaccatggctagatttttgtggaagagttcgtcaaaggataataaaggcatcccttggatgtcttgatagcgtatgtgtcatagtaagcacaatgggggtcttggctttcgtaatcttcgtgatttcaacttggcccttttgggtaagcaagggtggcgtttcttaacaagacctgagtctctggtatccagaatttttaaagcacgctactttcctaatggatcctatctctcagctactattgggaataatccaagcttcgtgtggcgtagtgtgagggaagctcaatctctagttcatgcggggattcgatggagtgttggtaatggctctttaattaatgtaatggatgaaccgtggctaccaacacgaactagccttttgtgatttcttctcacccggctcttcaacatgccaaggtgtgtaatttaatgattatggatagatcctaccgggatgaagaaattctccaggatttatttgaggagagagaccaaagattgatcaagcaaattcctctatgctcaaaccagtccgtggacattctctgctggtttactgagtcaactggtgtttattctgtgagaagtgcataccagttgcttcaatcaatgaaagggctggctactgaagtcaatacatcagcattttggaaagtgctttggtctctaaaactaccacctaaaataaaaaatctgatgtggagggccggttccaaatgtcttccaactcttgcacaacttgcttcaaagcatgttcctattaacactcgatgccctctgtgtgaggagttagatgagtcaattacacatatcttgctgacttgtagagtggttcaacaggtttgggagagagtgggcatcggcacaacagtggctgctgcaggaggggattttctggactggtgcgccactgattttatgaatttgacagcagaaaatcaaagcctagctgctgctctttgctgggcagtttggggagtaagaaatgatgttgtatggcaagggaaatcggttaatacttcatctatagttgttactgctaagagctatcttgatcaatggcaacatgctcaaaaaactcaaattgagtcattatgggccgatcttcagccttatgatggtatggagcattggcttaaaccacagatgaatagcatcaagatcaatgtggatgcagctat

SEQ ID NO: 44258 - DNA, 1870 bp, Cannabis sativa
gttgggtaaataagcttatgttagggtgaatgagtgcatctgtattgtgtaaaagggggcctcaaaccgtcgagtgtgcaaagcttatttatttatttggtaagtaaaattatttgtttaagtgaactatttttttctgtgaaaacataggaatctgtttgtcacaacacaatttatggttagcatttaatactcttacatttcaaaaaaaaaaaattgtttaatagcaaattctgccgacaccatgtgaatccaaaacacgtcaaactaggaagtagaagacaattgagttttatattttgataaagacttcaagagatccaaccaagccaactcacaccactaacagagctgagtcgagtgagtatggggatcaacacattcatcgccggaaatctgatcttattttcggtcctaatcgtttcaacagcgttggccagcaccaatcacaccgtcggcggcaacgcaggttggttcttcaacgccaccaccaattcctccgccactaattacacttcttgggctgccaaacaaaccttctctctcggcgacttactcagtaagttttatttaattacttaattgaattttctgtttattgataagaactttgtgtctataaatatctatcttttgtttaattgtgatttccccttttcagttttcaataccaactcaaagcagattgtaatcgagacttacaacaaaacaatataccagagctgcacttacaaaaactccaccaatgacgatgacaatacgatccagtacgatggcggaggtggtaaattgggggaggcgttgactatcgaagtaccattgaccatccagggttcaacgtactacttctccaacaccggcgacaaagtccaatgtcaacgcggtatggcctttcagatccaggtcggcaatggcgatggctttctgccagacctcaactacgctccacctccgccgcccggaaatggtgtcttcaggatcagcagtggggggctctattttcttcttcttcctctattattaattaatattttgaggtttgaattataattttattttgaaattttgcattttttttaatgtaaacgcgtaatgaagtaatggacatcacgattttttttttcctaattgcatttaatttctttgatcaaaggcatttttattattattattattattattattatggtaatttgcttttactttttaagctgtaaacacaaagaaacagtgataactacaatagattcacttagattattaatttcactagctagttgtaatcgtaacaaaaataatacaagagcttttattgttattctgattgtttaattgaaatttaaataagaaataataatatcgagtttaaaattggagacgtgcaataaaacctcagttttttaacaattttttttggaagataggatgaaaggtattaaggatgccaatttttttttttattaaaaaaaaacatggagaatttaaatgtaaaaattgaagactaattacccaggtgtaaaatgtgggctgttattccgttagtgttagttataactttttctgttttgttagttagtttatctaactaacctatttattctactgtaactaagttacttctctggttgtgtagatatataaaactaagttatcaatgagtgttgagaattttttatttaattttcagctatagataaatacataattaatttttagttatatataaatacttatatttaatttttgatgataataaatatcaagtcattatttacgtgttaattttttattggtatgtttaaattaattgttaaataaaaaataaaaatatgataataattttaatattacatcactaattctcatcttc

SEQ ID NO: 44259 - DNA, 2148 bp, Cannabis sativa
atgaaaggaccaagcatattgaactcgactgtcacttgatcagagataagattaacaaccatgacattcacctcatacctgttagtatctccttacaattggcagatgcatgatattcatttcatttctttgtaattaatgcagttcaacaattcatttcatttcttttcattatgttcttcctctcttccacaacacaaattattaaaaaattgatcaaatgtaactaaatagaaatatctgcaacaattttataattccaaagatttttttttaagattttaattcaaataggtaagatcttatttattcatactgaaatataaaactttcatgacaattatttttctaaaccatacatgttattaaaatatacaattctgtttaattttggaaacgcgagttgaagtgtcatattttgtcacttatacaatgagtatagttgtgttatggtcataaacatagtttagtaattacttaaaatatttcaaatttaaatatagtttatgatgtgttgaatgaggcattagagctatctaattggcttcaaaactttttactagaatttcaataggacaaatgttcttaaaatttgaaaaatggtagcctataagttagcatcatttgtagttcctcttattgtaataagatttggagtgactattctcatgatctttatttctagtagacctaatattacttactattttgattaattacctttttctattactttctacctctcaagttaagataattaaaaagaaaatacaccttcacattttcattgaccatatatcaataaggaaacttgtgtaccttaatagttaccaaaaaccattgttcattcatcccattcatcataacaaaaaattgtaatgtaattgttgttcatgactaacaaattaaaaaaacataaaaccaaaataataacaataacacaacactaaaaaatgatctcaaaacttattagtagtttttctaactccatgtttgtaaggatctttcattctttgaacatccaaagcactaaaaacaccatacccattactttctccatcttcatcatcatcatcatcatcatcagtggcttgatcaatggctaccaattcatccttatacttaatgctctccatcctagtttgcctcactttattgggcttgggctcacaacctttcaaaagcccaacaacttccttcatatcaggccttctatcagggtcactttgaacacaaagggccgcgatattaacagcctgtttaacttgggcctcatcaaaattacctcttagttttgagtccacaagatccctaaacctacctttggttatataaggctcggcccattcagttattgtgaccttaactcctccttgaagcttctcaatgggctttctaccagttacaagctctaacaaaagaattccatagctataaacatcacaactttgggaaactttaccccacatggcatattctggggctaaataccctaaagtacccttcacacgtgtggtcatgtgactaaccccttctgggatcaattttgcaaacccaaaatcagccactaatggctcaaaatctgaatctaataacacattgcttgcctttatgtctctgtggattatgtggggtgttacttcatggtgtaagtacctaaaataaaacataaaacacaatagaggtctttcattagaaaatatagcatttttacaattgttacttatctaaattatttttttttctattgtagaaagatggtatttataaaaaatttgagacccttttttgagtctagcctatatttgtttaatttacacaaaaagacagtgctattaaggcaattgtttgtggatttacaaattcttttcttgtgaacatattcttagttgtgagcctgattttcaaaagtctaaaaattagaaagtataccatttttgtaattgttacttatgaaatggtaattttctaaatttaaaatcttcttatgtagaataatgatatttaaaaggggaaaaaaaaacatattaggacccttttagagtcttactattaaggcaaattgtttgtggattttcaattttctttccttatgaacatatttggttttcataagtcaaacattgtttgaataataaataaagtcaa

SEQ ID NO: 44260 - DNA, 2429 bp, Cannabis sativa
attattaagtgctcattaaaattacagattcagttgtaattccaagctcactttaattttctctaagtttatttcaattatttaatgttatacaaaagaattgaatgagtcgaactaaaattaataaattgttatgtaataaaattagtataagtacttgtgttgtggaatatcatgggaatggaatatcatgtatatatataaaataatattaacaaagtgatccttttaatttacatggggatttttaaaaaaaagatatatatattttaaaaaatactacaaaaaaactgttacttttagtgataattttagtcacaacataaattttttgtgactttaagtcacaataaaaatttacttgtatctaaaatataatatctttaaatacaagttatcactaatttaattttgattacaataagtattatgattaaaaataaatttagtggcaacaaattataatttttgtgattaatactttaagccagaaaaattttataattagtcacaaattttattgtgattaaaagtaagatattttttataaagaaagcatatatattcttacatatgcatgaataaatttcgttacaatacgtaccatcatcaccatatcaaataataatatggaaagtttgggattggaaattaattaataataataataataatagataattaacaaaaatattatatatatctaagagtatttatatattatttatatatttattaatcttggtcatcactccaattctgaattgcttgtaaaactgcttgtttcaccatttgagcatcaatgctatcgtcactctacaaaatcaagataaaatatataaacaagaaatcaacaaattaaaccacataattaattaacaacataaatatacgtacattattatatataatcaagatatattaataaatatatgtacattattatataatcagggctgacccgtctcaaatatttcagaagttctgttctaatattaaaaagtaggcccaacaaaaaaaaattataatttgtaaataacatttttaatattattatattataaaaatatattttacataattaaacacctaaaaactcaaacaattttattaaaattgttattattttcaatactacttcaaactaatatcaaatattatggataaaaaaactaaaaagcattaaataagggaaaaaaatcatagaaaaacctttcttttttatttagcatgacacattgatggaatgttgggttaaaaaaaaatctgaaaaattatattgggcttttttaaattttaggccatgtgcattagcactgtttgcacaggttaatggccggccatgaatcagggtctagctatttgtaattttaacaagtagaggattcaattaataacatttgcaaaatacatggtccaaaatgatatttatgatatattaattaataataacaactttagatcatgatgtaatatttatatgggaatgtagggttcttgttggaaattcaaggacatgtttttctctacttaaaaacaaataataagttacaggaaaagtctaaaatgttttggaaaagtactgaaaggagtactatatatatgtcaagcattaatttacatgaataaggataaaaaagaaagcagcctattccaagtcattatataattaaatttatatgtatttataattttttgtttatatgaaataacaattttattgaaattaaacattctgaatacagataaaaaaaaaatgctacaattaaaaagatatatgcctaataataacataaatgagttacttgatttgctgataaatccatataaagttttagtaatatataatatatgcaccatgcacaaattataagtatgtacgtatttattttttcagaatatataataggttctaggttaaataaatgtgatttttgagaccaattactatcatgccatattaaatgtgtttcagtgtaatttatggctaaacatattataataattaaaattatataatatatatggagctttttaggtagaaacatcacttttgtttctattgtagaggtattttctattttcatacaaaaatcatattctatttttttatatataaatatatataatattgttatatctattgtagaaattttgaatcatattttcaccactttaaattattcaaaaaatttcaaaaacagaacaactatacattaatacacaccatttatatatataaaaaaaaaataattataatttttctatatatattaaaaacaataaaagtaaaattaaagctctcaccaaaaaaggaaatcctctacatgtggttcaaattctgtaatatatcttttgttattaattactttcaaaaatatatatatgttttttagtcacacgtgatggtgtttttttttttttttttt

SEQ ID NO: 44261 - DNA, 3664 bp, Cannabis sativa
gtccatagctcctcagatcagtctcagataaagaatgcttatcggtctctccagaagcggtgtcacccggatatcgccggaccgcctggccatgacatggctattatactcaacgaagcctatgcagttctttctgacccttcttctcgtttggcttacgataaggttagtactgttggtgaagattattgtattcattagtttctgtaatgattgagtatttattctgtaaataagttcaattcgactatttatagtctggggaaatgagggggttatcgaatatttgattaattaagggtgttattttcagagtttttagctttatattttgtaaatacgtttgcgtatacagatatatatttatatgaaaatccatgtgttgtattgtttcttgatgagtcccaaatttataatctgctataatttagttatttgaagaccaaaaaacaaagtgatgttgtcagatgtagattactataggaagaccaacatggggtgagtttctaatactattctaagtattgctttaccccatattataaacgaacgaaataacaattctaggttgttacagtagtgtcgaaatcagatgtatgaagtttatgtagtttctctatagagcttcattttgactaatggatgatattgcttcaggagtatgcaaaacatgcacaacttaaaggttacaccgggaaacccatttactcagtatggtgtggatcagaaagtgaagaacgagcagtgtttgttgacgaagtcaagtgcgttggttgcttaaaatgtgcattgtttgctgaaaagacttttgcaattgaaacagtttatggaagagctagagttgttgcacagtgggctgatccagaacacaaaatccaggaagccattggagcttgtccagtagattgtatttcgtaagtttctttcctctgtttcttagcatgacacaataaacaagttcattacatgggaatggattatagagtggcatctcacattctaggttggtaataatagatcaatggaataaaattcatggttcaattttctaggctagatgaaagcaattaatttttatatcgtggcatctcatgtatcatttaagggaaggatttggacaaagagaaggaaatggccatttctagacatctaaacaatttctctcttactggctgattgaaccttaggattgtggagaagtccgatctagcagctctggaatttctgatgtccaagcagccacgaggcaatgtaagaataggtatggggaatgctgcaggtatgcgtgtctcaaacatattcgtagatgtgaagaaattccagaccagataccaagaggtaatggagaaatcttctgcacagggctctgaggtatgttccacatgtaaaaatagtatagttcttttcataactcggtatttatttttctctgtattgtctcaacacaaacatcgattactgatttcctgatctttcttaaaaattaatcttaatttaggagacacttgtacaaagagcagcaagaatgtccacaatgcaagcaatcagatcaatctccaactggttatattggcaaacacctagggcaggtggctcaacaatgaaacctcaactatacttgccagcaactacccagaaatccactgaacctgacattgccaagctcagagatgcagttgctgctaagaagaaaaaagaaagggacggctcaagacaaactcaggggactccatcaaagaactacatttatgacgatgaatactggagtccatcaactcatgcccttcctgcagcctcatcccaagagaatttgttcccaagaattgtcccaaaaactccacctgcaaaagaatggaagcagaccagtgataaagatcgaataacttccaagaacaagcaaaggaacccggtaaaattttttgtaccattgggaataggggtgctcgccgcatccatagttcaaatgcatggagaaggggtagtggggaggttggaagagcatcctggtggttctttagcattacagattgtaaatagcccttggttaccagtttttttaacttcgattacatggtacatcattggaactgtactggtacaattcgttgaagccatcagaagcagagaaaattagaaacatacctacctaatacataaacaatttattaagtaaataatagcatagtacagtacattcttgtgaataacattatgtattaggaaatacaaccttatacaattgatatgattcttgtcatttatgtttataactagaacttttgttattttgtttaaccaaaaaagatttagaaaatgtacttgtttaagcatatacaaaaatagcttattcggtcatctatttttgcgttgatcattaagcaattaggtttagagtgttcctcaattacactttccattttccaattcttattgggtataattacactatgattggagaatatcactatttttggataactagttatttatttattttttaaattgttaactagttattatacaaagtaaatactagatcgattgtcaaacattaaaacaaaaatttcatatttacttaatacttaacgaaaaaagttaagagtatacttacgatgttacttccaaacatattcttaaaataggaaaaaaaatgatcaagccaccgaataaattggtgaggtgggtgataagtgctcaaaacttttattcaagtgaaatttatacaaaccattagatgaaaagcatatgtactacacacagcattatatcaagttgtcacattctgtttcattctcctggacatcgcactaaagcgtccaaataggttaaatgttaagtacacaagattttagagaaataaatctttgaggaattcgacagattctcaaagaaatggtgttctagagaaacaagttccagtgaattccatcaaagaaatggtgttcttttgcaaaagaacttagtagcgatatttggtagagtaatccttaggagcaatcacaagaccccgtcccttccttgctccacggtacacagtctcaacaatgtcaatgaactcttgcttgtccttgagggcccagttgatcttattattgtttccagttccgagatcgatcataatgtgtttgttcctgaagaaaaacatgaccgtagatgggtcatacaactcgtacattgtgttgaaatctggaacctcagtgatgtcgacaaggtatatcactgcaaagtttttgattgtctcagcaactgatgccaaaacttcatccatctgatcaccaacaaaacaattcattcagagatcaaataaagaaacagaaaagaaaacaccacagtagaaacatagtctaaaagcagagctttcaaaacaattagtagtagttgaaaacttctcaagcagtgttgtctaacgatacaaagaatcagttggtttgaatgatttatccttcttttctagttatttgaacggtatgcgatacaaattacaacacttgagaaaattattcaagaaaagtgaacaagaaacaacatataacattgcacattcaacctaagttctcatctcttctcttctctctgttgtgcacgtttaaaactttgacatggatttaaatgccaaaaaaagggaaaacccaacaaaacagaacagacaataagaaaactaaaa

SEQ ID NO: 44262 - DNA, 4704 bp, Cannabis sativa
attatcttgtagagtctcataatttcactaatctttatctttaatgtaaacagattgaacacatttaacttaaagaatttttttcttaaaagctatatcacatacatatcttcccattgttcctatgttccaattcttcatattctaaaaacataactatttttcattttcttggcaaataaacatagttccaagtaacctgtcctgggtattagaatcatacatagtctaagtttgtaagcttttagttcagttagtggttaacaattgactctttagccagctaaccatgttagttagtggttagtgttggttagtcgttgttagttacaactctttttaattaagctactcatttttctaaatgcatatataaagccattgtattagacacaaaagagtaagcttgtacaaaaaacattcaccatatgaagacttgaaaacaatgactttatatgtgcatttggaaaaatgagtagtttatctttgatgactttaaatagattatcttttatcttgaaaacataaatgttaaagtagaaaatgaagatcaagcgatcatatttttgaattcacttccaatatatatatatgagcactttgtggacattgtgatgtatggaaggaaatctttggcattagatgagattcgcaatgctctaatatcaaatgatttaaagaagaaatgagaacaaaaggatgaaatggcaagggaaggtttgttgagaaaaatgtataagagagataatagggttcaaaaaagtggaaagaatggaaaattttattcaaagtacaagaagaagtgtaatatctgtcataagactactcatttgaagagagattgttctaaattggaaaattcactgaattgggaaactcaaggaacaacaagaaatttggcaatgttgatattgcagatggaggtgagagtgagggttatgactgtgatggagttatggtggtatgaaatggatactctggactcaattgggtgattgagtcaggttgtttcttccacatctgccttgacatatctcagttttgtagctacaaggaaattgagagtggaatagttaagcttggagataataaaacttgtctagtgattggaatgggatttgtgaagattgagttgccaggaggtagtttgactgaactctagcaggttaggacaatgtccctgagattaagataaatctcatactctgtccctatttgggatcttatcacttgtaaccgttcgtgaatcatggacaatcctcacgtttcaaatttacgcacatgagataattagaagtaacttcccataaacacacttttaacttattccacaaacaattatgttgattatgcttcaaactccttgtagtgtgataattctttttgacaccttatcgtaagctagcgtctaagtatatgttgcaatattcttcatgctcttctattaatgttgagtgagacacatgcgagatatttttcacaccaataaaattgcgaggtgcatcatgttgaaggtgttgtatttagtctttgaacatactcacgtgtatgtgggtcaatgagctacaaactcttatgataactcattatctaccctttccaaatatttttgtttatgtattctatgtattttgagatggactttctttgttcatcttgctagcctcatcaatttgtagttatttttcatgcctcaccattgtctttaagagagtgagtttgaatatttctaccaactgtatttcccgatgcgagttgtctgaatgcatttattgttgcataatgtaggatggttcatgttccagctacattacacgcgtcagcaacatattgctgctcaaaatatgagtataataattgccccatataaagttcttttttgaaataaaaatgactttttaattgccttgagggtacgatcatattttttccatttaaaaattgtatgctttgcttttggcggttcaagactttgaggtatatcatttcaacatttattattcttacctttctctttccaatagttcccatctgttcaatcttccatcattgtgatcgaacgagattcatcttttaggtataaaacctaaaatcccttcaattttgccattttcacccacgaagctcttagaactcaaaagaatcccaaccaatttttttctctaacattgcatgccctcactgtcccttacttattttcttcaaattttgatcgatttcatttctcaatcccagaatcgccaaggtccaagcccctcgcaccaggagttttcttcaagaagcctttcgagactgagattttttgtcaaactagtaagtggtttctctctcaatatcattttattcttccattttaatttctttatatatgatccatttattttgcatcatttgttgttggagtgagttttatatgaatttttaagcaatctagggctaggaacaaggttatgtgattcacaggtcttgggtttaacagtgctccatttttcaagaaatattttgggtattatactttaacaataccatgtcccatttaatccaaaaattttactcccaaacctcttagaatcagactatcctcaattctaggtcatagttcttaagccttaaattcacaaacctcagtccattttggaaatcaatgatgaaaaaattagtaagcaccttattaagaccaattaggatgaagtatccacctactataggtgattcttcaatgaagtcataacaggtaggcgtcgttttctacgagaagcagcttagcctgagtcacctaacttagtaaatatacccttagcaaggccattatttttaccacaagtcagtgttgcttttccacccggtaacttggaatttgaactcatggcttcaaaagattacaaatccaagacgccccagaatcctattattacatttaaagcagaactgatcgaatctagggtcatatcaattatctcttatgttggggatgttttaagatcttgtggcattaagaacgagaaaggatgccacattcgctcagttgcacttcgtgaatttagttgtttccctccataaatgtcttataagacgagggttgcagcaccaccaagtcttcaaaaattggagcttggagtgtggaagacattagggcaggagcagtactcgcccttagggattatttcaaagaattttgcaactaccttggggtttcatcctttcagctcaccccaaacacttataggattcttgcatgtctaaagtttatctactacatcttgaaatgggagtgtccaacacccctagagattctttattttcttcaaggtctgtcctgtgaggaagctcagagtaggaggcttttactatttggggacccataccaatgatcgcaagatcatagtaaggcttcctaataaaaatgagtttaaggaggactttttttggacaaccgggttccacctaatcaacaccaccaaatttagaattttacgtaagtattaatcattcccaaaatcttagttttgagctaagtcttttttatgatttaatacttatactaaatttgatctttctttcatatatttagctgttataaggagaccaatccttacacttaaaatccaaaggacacataagatcctaataaaccttccgtatggtttgtgagctactgactttttattacacaataataatttaaagtcaggcgctcttctcggtaaggaccaatgtaccaatgactacaagacccccaagttccctacttggcaacaagttccagtgcctgacgatgaagagtatagttactacgtcacttgtatccactatcatcaaaatgtaaccacttaagaaaccaccaaggttaaagacgaggctccccgaggtaataattcttgcatctacagattgtctcctaccgtccttagggtcaagcatacatctttagttcaatttaaagatagccaatataacttcgtcatcttgaactgcatcaatttaattgcacataggtttgatagttggtatcagtgcaatttgtataaataatggcactcataacataacacatactataaacaagataccatagtgtgtcttgataaatagtacgcaagctaaagtgtggataaaggatttattgtttgcatgagaaatcaagaaatatttaaactagttctaagtactgttcaaagtatttaaagtttgctctgaaattattattaattacttgcaagcaggcgatcaaaaattgtttagaaacattcaattgtacaaggaaattaagttcgtcgtttaccctaagtctaaatttgagaaaagtgttttgtcaaaattgtgtaaataaagcttactcatgagcaaaaaaacataacattcaaaacattaataaccctgttggattatgtttttagaaagactttaccatcctgtatgatctttgcaaaagtcctcgtgaatttctctgataatctctttatcttctgtagggagtacacatcccagtaagggcatggaatatcatcttctataaagttttccatcaactagtgtgtattgtgggattacatataagagtttgtgtgcctcagttttgtctgttggaagctctccattttgcaaatatttgacaataggggtcatccatgtgaggctcatatctatcatatctacatcttacttttcagtctcgtatacacgtggctcgcttaatacctccac

SEQ ID NO: 44263 - DNA, 3349 bp, Cannabis sativa
  modified_base (2716)..(2722): a, c, t, g, unknown or other
gaaacttttaaaattataggaataaatttgtacaaattataaaggggtataaattttgatataggttatattattaagggcaaaaattgaaatttcccttgtcttattatttcatacaaacatgctactagtttgaaatgggtacaattttttcaggatataaatggccttctaagatttttattttgaaggtgtaatctataagaacttaatcttctatttattattttttttttgaaatagggaattcattcaattaaaaaggaaaaaaggggcaagagtacaccctccccttggaagtgtttaacattgtggctagaccttctagcactcttagctaaaccatcaacaaagatattaaaacttcgagtaatataaattagccgacaattagagtcaatgaatttctgaaatacggcacaccaggctagagaacataatgaatttcgtgttgagtgggggaaaacttagaaaacttcctttggactctgaccaagagacctccgatatcgtcaattttccctgtcaaacgacactggtttctcagaaactaaacctcagtgaaaatgcaggctgcaattttcaagacctccaatttatccttgccaaccaagccttcgatgagattccccagaaagctgtgcatattattacctgaaacctgaatcgaatgacaggggaaagaattggaaaccagatagcacgaaccagggggcactccttgaataagtgatttctggtttctaaatccatttccagatatcttgagcgtcgttgaagcgatgctcttgatctaacctataagcacttttgacagaaaaatgtccattgccgttgcttttccaaatgatgcaatcttgagaagacaagggaagtctaggaatcgcaattgttttccttcccaagtcttccccgaacacattaataacaagatcatcattccactaattccccaaatacacttctgaaacatcagatactttttcttgaattcgccaacttgcagccacggaatccaagacttattctgcaaatcaacagtaaagatcaaagtacaagatcccttctccataatattttgagtttccaagatacttttccagatgatagaatcactatgtttttgttgcactatccataagctctgatttcagcaatatttattgagaagatagacgacccaaggcttctcttcacgattagccaagctccaagcaagtttccctaataaaaatgtatgttttttttttttgttttacatagatttttattttatttgaaaaaggaaattataactcgcacatgtcaagaaccattggaaattaatatacacgcttaaagtcaatgcaacatatccacaatccaattatcaataagtttgcaatacttagccttatctactaatatcaacaacatgtgctttaaaattaaaagggcttaattgagttataacgttaggcttggtaagggtagatgaaaaatattatttaggctcacctataccataaacttctccttttaaatcaccctacaattttcacaaacaatttcaatatcccccttttccataaatacataagagaaccttttatttaataactttaaaacaactctttctttttttttttttttttttttcaatttatgacacaacattgtttttctttttttttttttcttcatgttgatgcaaatactctctgtattgaatgtctctcaacaaatatcttcacttttttcacaaaacaacacaaaattttctattacaatctccccaaactaataatccacttatggtatagttaaggacaaactctatagtgacagacgtctaccatgtcttgtttagggcaaggatgatgtcttttctcctaacaacttttgtctcaacaaatattgtcttgacaaattttgtcttaatgatttttgtctttttcctatttaattattttgaaaaattattcatttattacaaaaataaataattactgttttgccaattcaaaatagatattttcgatcgacattatattactcttatccctttccttgacagtgtttcaaggtggcgattcggggaccataaacctataattctaaactccaataaactaaattatttattgagtctcatcaaccaaataatcttgtttattaattctacgattactccactacatatatgtaattaaactcttagcaattatagaattatatttactgagttttactacagtgtccattaatataatcaatttcagtgattagccctccatgtgttggttcgtaattacgttttacccttctaattatttctttatcctttagtaccattaatttactagcgaaagtataatttagattccatctaaatttgtgcacaacattctagttctagaattaagacttaaagaaaactagcattcgatccgttaggaaagtcaggattccataattgtaaatcatgttctcagtcatccacattaatagattcccaaaacagaagttgtaagaatcatcttctttaaaaaactttaacgattgaatcaaagaaactaataacatgagcatgagtttatgattactcaggatttaggtcgatctactattgatcatgatgatgatatgaattaggtctttatagtaaacaacatgttagataaagatagcttcattcatattggtccttattatatataatctctattatatacannnnnnnactttgatgtcatactacatccgtaatccaaactaagattatttgcattgaagaacaagcatcagtgaaccgtactagcaactattgattaaagattcccaaactttaatatgttaatgacttttttattcatgactaagtgatattagttttttgtacaactacaagtcacaacctcatatatgaataaaatttttttcgatatttatatataaattatttaataataaatattaataatttaacattcatggatatatcaaaatgttccactctttattgataatcaaaaatatttttataggcttttaaaggcataaaccctaacaattaatagaagatctaagaaaatttaaggtgtacaagttaaaaaaaatgacaaatcgtttattctttgcaaatgtattgtacattgattcaaaagaaactgagggatattgactacatgaaaaaatagaggacatgttccatagaataaattgtccacatgaacatatagtgtttttggcacgcctcttgcattgtaaaaccaaatttaaccaattatataacattgttttcaaatgtttaacaaaaatatatatcataattattatgaagatttaagataatttaaggtgtacaagt

SEQ ID NO: 44264 - DNA, 1712 bp, Cannabis sativa
tgtggatacttgaaaagaattagagtgtcttatgtctaaattccggtggcaaacaggttcatctcaaaaaagaaacattaattaggtgagttgggagcgtatgtgcaagcacaagtatgaaggagggttgcattttagaaacttgcgagactttaacttggctctcttggggaaacatgggtggcatctcctcactcaagaatcttctctagtggggcagatttataaagctcaatactatgcgcatggatcctttctttcagcaacacttagtgataacccaaactttatttggtgaagcattatggaggcacaaccacttattttgagtgggattcagcagagtatcagacctaggcattcaatgagcattttacacgacccttggctcgattgtgtgaaaaatccttatgtcatttcctcccaccctgcattaattagtaaaccagtaagttctttgtttaattttggattctcaaagctgggacgaggaactggttagagatttgctcgaggttagagatcaaaaattgattttttcaattcaattgagcaattttgttgagtttgatttctgttcttggaagtttgacaaacatggtatctacactattaagagtgcataccagcaacttcgtgaattaaaagggtgttgctctgtgaataatgcagcatgtttttggagaaagttattgaacttaaagatcccacctaaagagtaattttttgtggcgtgcaacatctaattctcttcctacttgtgctcaacttcaacatagacatatatcaattaatagaacatgtccaagatgtaataatttagatgaaataatttttcatgcattggtgggctgttcttactctcgggcttgctaaaatcgtgttgcaactaacataagttcttggaatgagactcgatttttcgactggttgctggttttatttaatagggataaggatgatgtgttagaagaagttgcaatgattagttgggctattttaaaggcaaaatgagtttagttggcaaaaaaaaaagacttccttgctgcaactattaatcattcagtaagaacaattcttgatcaatttaagtttgctcaatttagaaaaggtttatctttttcttcatctcttgatggaggaaaggaaacaacgtaatggacttcactagttgtcgatgcgatcaaggttaatgttgatggggcaatctttgaacaagaggaacgttttggcatgggtgttgtagctcgtgacttttttggtgaaattattgaagcttttatgacgagtgttgttggaaaagtacaaccagagattgcaaaagttgtgggcatcaaggaggctttgagctggattaagaaatatttgtggcctagagttgtccttgaaatcgatggtctcttgtatgttcgagctatctctagttgtgccactttttcttctcagtttggcttgttagttaccgattatcgtgtgttactttcttctaatagtaatgttactttacgttttgttaaacaatctacaaacaaggtagctcattgtcttacaaaaagctcttatttctttactatagaagctattgtgatggatgaaatttctagttaattgaagtgctgattttattaaaaaaaaaacattgtataaaaattattaattaaaatcttattgcattttaattactcaattatcataaaataaatacataattt

SEQ ID NO: 44265 - DNA, 4164 bp, Cannabis sativa
tatatccacaattaaatcattgggaagccaatcaatagtctttgttgaatttattggaagactagtctcatcatctgtaaattttgggtcactctttttttgtttttgaattttctttgtacaagaaatactgatttctcttgagacattattctttctccttatcggcttcattatatcaagccttatatctacatccaagaaagaaacattttttttttttatatgtgacattgtatacatttaaaaaaaatgctacatatatattatattatgaactacataaatcatagtaaagtagtaaatatacctgaatgaaacttgctactaataagagtgatatgataataaacttagtcgagtattattgttggagatttgaaactatgagtatttaattgagaaatacgatcttatatataaaacttcagtagagagatttataataaacgtattaggagtaggagatatagaagtttcctaaactaatatgattaggatttagtttcctttttagattttattagttttgactaagtttcctaaggattattacctttttttttttctttttttaaatgaagatttaaatatgcaggcaacattatttatttttcgtgatttaaattgaaaagataaaacaattataaatcatcatttttttttacaaaaaattataatgtaaataattgtatttttctttcaaaaattattatatatgaatatattttaagatattaaaaagtccaaaaaaaaaatatattaactaaatatcgcgctttagagaaaatccgtttaattgcaagagaatggcactaatttttttttttttccttttttcaataggcagcactttattatcagcctggaacttacgtacattcttacctcaagcaactcatattatgacctttttaagggtaacaagtggaatcaatgagagcaacaagataggaattgggagttgcagttcagtaaatagaggaacacttttagagggataagatgtggcagtaaaagtattggaaaatggacttaagatttatgatgctgaatgtgagtattaacattcatctagtaaacctgattttaagccttagaactagactatatgcccttgagaagtggtcatactcgaatgaactccacttgaatttcctacagagattgcacatcagctgttgaatatcttcaccatggttattcaacaccagaaacaaactgcagtatataaattacttcttattcaaaggaatcctatacaaattattataaggcataaaatacataaacaaacatgacatggtaaatggatgacaaaatctgtttataaaatcaaatgaaaataaatatataaacggcagcagttgcagcaaaaatagcattgaaagtattcaagtttatatattcagatgctgaccttattgaaataaaaatctaaatatttaacttttgaagcagcctcaacccttcaccctttttcttttgtttaacttttgtagtaagaacttgttgaagatagtttatgacaatatttcttagttcttattttccattttaagtcgttatttcttttcttattacactatgctctccatatttttccctcgcaaatttgattgttatatatcttgagtttcatatataatcatgtattagtttcttatagattataactatatatctatatttccaaataaataacaacaacaataataaaaacttttaactcatattggaatgattatttaagttggacatgtttttacagttttcttatggaaatatttgtgaaagatataatagtgcataccattctaacaaagaaagaaagaaaaggtaaaagaaaacaataattacaactcaaaacaaagttacagtttgctgaatatatataaaacagaaaattacaggaagttgataatctgtaaagttggagtaaatttaacagtatcatcattgatcaagatgaagaagaagtggtggtaggcattgggtagcggcacaaagggcacaagtggctaatttcgagccattgaacaatgcaatccttgtgaaacacatgagaacaaggcatctctacccctttgcttctacaatcaccaaaagatgaaatcttctccaaacagatactgcaagtctcgctactcaaaccgtcgtcatcatcgcttaagtcttgaagggcgcgaatggagtcttgcgtggcagggacagtctgaacagtgtcaagcgcctctctgaagctacggtcaagtacatcctcgtcttgctgctgttgctgaagaggagtaggaaagcgtgcagttatggtatggatattgatagatacagcgacatagagggagttggggttggcttctaaattgcgcaacgcaaaagttgatatgtggggggtagcgagatcgatgaaggggagctctaaattcgaccccatgagaacgatttgagtgagggtgtcatgcattatcaagaagcttctttggtcaaggtaatgtgtcttagtagtagtggtagttggtaataataaattctcagagtagtcgatgattgtgtggcttaagcgtacatgaaagactataaatttgataccatcatgacgagtaaaattaggaatataaggagtatcatcaaaactcaacctcacgtagcgacgactaacaaccgccattcttgcactaacggaagaaaaagagtctagttgaatatttagttcgagatgttcttatatagaagtatgttagagagatttataacaagttactaggatttattattaattttaaaatttaaaacatcctcatagaattaggatttggtttttatatattttaaatttttaatcttatttgatgaagattttttttttattattttctataaaaaagaaagatgatatattttttttactcttccgtgattaagggacaaaacaattataaattatctttttaaaaaaatctgacaaaaatcatcgtataccctatttaaaaatgtgaagaaaacaatcccctatttaaactattaaaaaatctagtagaaaaaaatgaaaaaaaaaaaaaatcacgttactttaagcacaattttttttgaatggttaaacacaattaaaactattaaaaatgtgaaaaaatctaaagaaaacaattattttaaactattaaacaaattatgttagcaaatagtgtagtagaaaaaaataataaatataactatttaaaaatgtgaattttaaaaaaaataatttgggacataaatatctaactttaactctcagttgcaaataaatacctaacttttgtaggtagctgttatgtggaaattgtcacgtggcaattcttgattgaaaaatgtcattaaatttttaaaaaattaatttaaatataccaataagaaaatgataatgacttaatatttaatggttatgtacctacagagttcgaaaacgtattactaccgccaggtatttatttgcaatcggtagttaaatttgagtatttataacgcacattactctttaaaaaatgaagatggaagggcattgacactatgtaagatatttttaatttctttttttttttaaaacaaatttttacatgtaattatataagtattttttaaaataaaaaataatattaaaaataaaattggagggaaaaataaacaagaaatctttatttatttttttaataggatgaaacactttattaggcatcgaccaagcacaatgaaaaatttatacaaattcaagtaattccaaccacgaaactcttgccatattcatagaaaattattttagcaagattatgagcaattaaattcactgagcaattacaaaaaagaaatagttgagatgcaaaataaccataaatctcaaaactaagtaaatgtcccccttttcaaatatttagcaaaatggccttattgttaaaatttcaaagtaagtaaatgtccccccttttcaaatatttagcaaaatgtccttattgttaaaatttcgacaaagaatgtacaattataatcttgaaagttttactgtagctttctatccattctcaatctcttgtctcctttgtggtgtgttaatttatttgttatggtataacataaaggaaagagaaaaaaatgtagaaatttatttgtttttagtatatttatttctaactg

SEQ ID NO: 44266 - DNA, 1815 bp, Cannabis sativa
atgcatataataaattcatttgcagataattaaaagtcagttacatgatatgtatattatatatattttatctccaaatcaatttatattaataaaatcgctcaagagtcattttcaaacaaatgtataaacagtatagtgtcatttgaacagttcatttttaacggtctctcgtcttgtagtgaatacattatataaacataaatagattggatacgacgggtttgtagctccccccgtaacatggaatgcataatattcctttctcggaaaatcagtttcctgcttgccaaacagaagctttaaagagagaagtagtatacatggggtcacaattatgctgggtggggttccaatcatcaaaagcaaaggggggtcaggctgccaacccatgtggattgtctttaggtaaaagaaacccatgagctttctggtgactccatgtgagcctagatagctctgagtggacatggctactatacaaacctataaagctattacttctcatcatccccacctatacatctatctatatatctttatacataacccaacatctctttcttttgtctcctccacaccaataattatcttctaaacattctccattaattaaaaattaaaccatatattcacataggagaccccagctatacaattttagtccaatcacattttaattatataagagtattataaaaagtgtttgaaaaaaaaaaagtttatatgatggtctacgagagatctagtgagagagagagaatggttagtgaaaaaagcatacacaactttttttttttaatcttaccatctctctcttgttttcatttttaatcaattaaaccacatgcatttcagatctagtaaaccccacatcttcaactctattcataaatacatttctttttctcataccatatgtatatctgatctgaccactaactgtaaaagaaaacagatatgatattgaaagattaaaataggtacttcttttgtaagtgtatcgatataatttatcactctctcttttgggttaagtggagtggaccctaaatagtcctcaagttccaatgctgtgtatatggttacatgaatttggtaaaggattagtctatagcacagtttccaaacctaaactcccatgttctctctcccaccgagtcaccgacccacctcttctgcccacattctttaatagcctaatgggttaaacccccactgtatatcacattcctttgcttcctataaattaaaccaaataatagaatgggaaagaaaaagactagaatgaaaccactatttttgggggcacaccacacccttattatacgactcttatctatataagaggggtctaaaatgtcacttacacctagcccttgtttggtccaatcaataaaaaaaaattatatataaatgtaaggtaagatgaatcaggaaaattgttgtagtttcccatctactattattttagaaatgaaaaattagaagtattaaatgtgcactgactgaccaaccaatgacattgtaccgttaatttctatgcaaacaaacacacccttagtaaagataagaattacaaaaacagaatggaaatagaaatagaattgaatcatgtaaaaaaaaaattaaattaaaagttattaaatttttctgctcttatattgaaattaatttttcttttattttaaaataaaataatcttttaattaaaaccataaaaaaatcattccatttaaaataaaataattttttttattctattttatttgattatctcccacaaacaaccaaagactacctaactatactaca

SEQ ID NO: 44267 - DNA, 3087 bp, Cannabis sativa
gaggcatgcagttgggttgtgaattccaagtatcctgggtttgatatttttacattgagatgtaatatgaccttgttttccattatatctaagatcaatattaacaacttcaacattttggcatggaaaaccactactgcaaataaagtttatagcatttgctgttgcagaagtaccacgaatatccttgaagctcacatcttttatttgaacttttgatggaacctaagagcaaacacaataataattaagttagtcatcattatcttaatgattattagtactaattttacattaattataaaaataatactatatatattattagtactttcacataccgctttgttgcattgattccaaggacaatattcttggtcaatataaatagggttgcccacattttccatgataatatcctcaaaatggatattagaagctaatccaacaaatgaatttggccatgttttgattcttaatccattcattgtatttattaatgtacaatttctaacaaacactccttctacaggctgttcattcatatattttccaaggcttccaacactgataccatggccaggtccacatgtaacctttgtaatagttatttttttacttccatcaccaagagaaatacaatcatctcccgtttgaatatttacatctgttatgtttatcataaatgatcgcccaatatggattccatctgtgttaggactattaccatttgcaattacatgaacatgtaaaaaggtaacattttggcaacccaacacattcatgtgaaattgtttgctatccaatgatgttatatcttgaattaaggaattggtgatgtagtcgaatcttatattctgtttcaataaattataattataagatggcaacaataatttatccaataatagaaaataatttattatgatgattagaagaattaccatgggatatttactacaatatttgccttgtccacattgtttgccccaaactgatttaccttgtccatcaaaagtaccacctcccattaaggttaggtcattgatatgttcaaatataacccaaccatcttcatccttgaaaccagttagatcatttaaggccctcagtgttccttgaagttgaacctttattggagccttacatggtccttgtaatatagctcgttttaaatagaataccccacttggaataaataatacactttgagttggtgctgcacaagcacttttccatgcagttgagagagcctaaaatatttatgaaaaaatactcataaaaatttataactacaccatccaataaacataattatatttatataggttaaaaaattctacagctagctagctaccatggtatatcttttccatagcatataccatactaaaacacaatattctttaatgaaagaataatttaagattatttacacattgtctttttgctcatgtaaagcaaagtatatacatgttacctgacttatgtccgtgttaggttttgcaccatatgttcttacgtcaaaaagtgaagatttggctccaagaatgaaacctaaaattaaagacaaatatgttactgttatgtgaaatttcaaagccatcaatcttgttctttactctgtaaactttttgtatgttaataaagtggaattttttcttcttcttattagttttggtgaatcaattcatcaatatatatataataaaatataactgaaatttaccaacaacaatgttaactaattattaacaaaatagtagtgaaacaataaaaaacaaaatattactaaattgtatatgacttgttattttcttaagaaaaataaaaacaattttcttatataattcaacattagataatgataaaaaattagtatgcatgaattttatctagattatttactttatataactacataaccatatatcataattattatgttttttttatacaaaataatacatacatatttaattctttttttaacttatcttttatgtataactagtagaatatttaagtatgtaatatattttaatttttacatttataattttcgaaaatcacacatttttagatatcaatatgaaaattttcttgtaatacatacataaattttctcgaaaaataataaagatgcaagctaaactatcagcatatatacacacgtatatattgtttgtaatttattttttaccatataatacatacaatcttttattaagatatacaattatacacataactattttattaattttaagcgaacttagcaataaaattttaattgttataaatctgttaattttagtagagattacctcattgaggtcaatattgttatattatcaatattgttacaatattagagctataaaaaaaaattttatgataaatatgagattcgttcttaactaataataacaagttcttaacaacctaatttctcaatattttttcaatcaatatattataggcacatgtcttagtaagtatatatgttaaaggtaagttgagatatatgttttagtgtgtgtcatatgtttaaccttcttttgaagtgaatatttgtatttgtcttctttggtctttcaaatgaaaaactaaatgaataatttttaattttattttggcttgaaattattaattattatttatgcatgtattgtaatgccctaatctatagggacgccacatgtgtaagtttacaaactagtttaatactaataaattaattaattattaaaaaccgtgataatattaaaaacttgattaaagtgaaacatttaaaaacggccttcataacagcattagaaatgtgttccggggatccctgttataaaaagtttcataaaagaaccatatataacgacaccttaaaaatataaaactaaaacacacaatagatacagcctaaaacaactcttgacaacttgacatgcaggccggtgatgtcaatatgtacattgctggagaaggtagtcacctcatggcagctctaacttttccttccccttacctacaccacatagcacctgtttgtcacaaggactcaacaagaataataataatcatataatt

SEQ ID NO: 44268 - DNA, 4122 bp, Cannabis sativa
taaatcttatatatatagatgtagatgtagatgtagcatacagtaacttttatttaatttttcagggttttaaagagaagttattgtatattatatgcatgaatgaaatatatatcctttttaggttaatgtgatttcgtttatgttagatacattattagattaattaacatttaacacgaataataatattgacctgtcactcacatgttgtagactgaaaatgaaaaacaaaatgacaaatttacttgcaaatgagaataaaaaaatattacgtttccagaaccatgctaattaatttctttcaaaaaaaaaaaaaactataccaattaataattcataataattttttaaaggagcttttttatctttaaatttaaaaactgtttttttttaatttttatatatgtaacttcacataaaaattctaatagcaactaaagagcatatattattatagaattattattagaacaatttaaaccgtaaattaaaaaaaaatatatatgaaataatttttcatttttaaactataattccgaatagtggttatctttcatacatcatttttttttatcacggttgtatattgagcaatacaattggcacaacagatatgcatttgctctcataaaattgtattaaatgataaaaaaaaaattataataatcatacagtatatgaaattgaaaaggcacaaatgtatttgcaacagagtttattttctggatatataaaagcattcaaaataagcaaatatcttagaaattatttgacactaacgtttcttctatataaatataaattttggttgatttagcgtgtgatataattttatatattttttattagagaaaaaaggaatgaatgagaaaacagcgatttttttatatatataaaaagaaaaaaaaaatgaatgccaatatattattattaattattatacaaaattagcggatctgtcattttcttgaaccaaagcttggattgcttgagcaggtcattttcttagggaaaaaaattaaggtaacattttttactatgtgaagagacaatattatattaatttatttcctcacttatatatatattttaaaaaaattaaaaaagagagagaggccccacttaaattgctggctgttctttcttacaaatttgtgtcagttggacacaaagacaaaacatgcatgtttttcctctatggaggaagagagtaagcacatgaaaatgatgaaaccaatacccaaaaggcaagaacaaaaagaagaagaagaagaagaaaatgatgatgaccagaaaggagagaagaagatgatgatcaatatggctatatgggattgtgggagtccattgtatgactcctatgaattggtttcacttagtaatctcatcgaacggcacctaatgatcttgccatctctagcagctggatcatcaaagcgattcatcatggcaaccaaaagattatctcatcatcatcagcctatccacgtggaccgtccgatggtggccgatgatacttctaattctatgatgaccagattgagtgaattggtggaaagaaagatggtgtggaagagaaaagtgtttggatcagaaaggtctaaggcaaaaaacactaagaaagtgaaagccactactactagtactagttttagtaagaatatttctggattatataatagaattgcttcgtggagaagaagatgaaaaattcatgatctcatggtccaccaacatccctgtactccacacaggtaataattaaaatttgagatttcattgaaatttattggatttgatatacataatgttacaatatgcatgtactttatttttcccttatcatcatcacacattacttatattatcaatgtatctcaatatattttgtatggttcattccccttgtcattttgctttgattgtttgtgcacacagttattggtctgtgaattccactttcccaatttctcttatataaatttatttatataaactgtttataaaagagaaaaaagccagatctttaatttttaattttatttttaatgagagatacgaccacaatcactttttcccccaagcaattatagtaagacaacttcatcacattaagtattatgtaatgtttttttctgaaaaaacaaaacaaaaactgaactaatctctatttatttgaagctaataattaaatgagttgaaaaaaatacatgacgtgtttttactttctacaattcggcagaaaatgaaatatttattggtttgttattagtttttaatgacaagtgagtcacagaaaaaaggattcctctttctatttcctatttttttagaggatttgtattttctaatttagtgtagttgtgattgttggtagatagatattattattaacaataatattagtgggggtgttttctatggcttctaattatttatttggaggctgcgtggtacgaagtactatttcattggcttcacttgaaaaggtcaacttgtaacgtcattgattttttttaaaagaaaattattgtccattttgaaatctcagctcacataccatacgaagaataacatttacatatatatttttttaaaaaaaaatgataatggaaatcggtttcaactttcaagtacacaagaatacgatcacaatgccaatcgcattttaagtagttgaaccatgtgtatatgagtaagagagaagttcatatgtctcacttctacaaatattatatagaaaaaaatatatatatttgggttcttatttagacaaaaaatatgacattttttaaaattagtaaaaaaatatatataattttaaaaggaaatttcttttgggccttgagctaggtgggcctatgcatcaacctagcaaactacaataataacttataatttggtaaacaattgggtaacttaagggaatcgatcaatcatcagctattacttactagtaactaatatatatatatatatataatatatataaaaactacaataataacttataatttggttaacaattgggtaacttatgggaatcaatcaatcatctagtaactaatatatatatctgtatatataattatatatgcttgctttatataatgaaattttggcgaaaaattagattagtgtatgataatatgattattaattttataacttaaaacagaggaggaatttgggagtagaaaattgttgtattcatttgattaatttatgattgtagtcatgtagtgaggcagtaagttgaataggccatcatgagttgtgtggggatctaggcttacttgctaagatatctgagatttaacttcaggcatatgagttatgtaatctatttatccagttatctcaatgtattagatttaatatctggttttttgggatataggggtttttgttagacgatttgtttgtatttgtttaaaaaaacgacaaatttttgaaatatttgattacaataattatattaaaatttcagactagttaccaaaacttatcattaaaggaaaaagattctctatataattaagatactagtcacaaagtactttttttttattttattttttttttttagagagagtagtcacaaagtactttaataacaggaaataatagttagtagtaattaaggatgcacattttcatggggatggggccgcggcaattcgagagttgtccattagaatgtttttgccacatatataatcgggataagttgaattatatctctcttttttatttattaattaaaaatgtttttatattatattttattaaaatgtagcagcttttagagtatctccaaagacacgatacactatcaccaaatttagtgttaaaaaatatttctacttcaaccacaacactaaaatttacaccaaaaaatatattttattattatattaataaaatttaagatattttaatattcaacaatatatataaacaaaaattaactattaaatattaagaataaaaaaaaaaaaaagatgtagttgctacagtgctactgctaggggtgtttgcggtgcgggtggtgcggtttttaactattttttcaaaccaatccgcacatgcggcttttctaattttccaaaccgcacc

SEQ ID NO: 44269 - DNA, 2004 bp, Cannabis sativa
ttctctctaacttcaacactaattcactataacatgggatttcatggtgtctcatggagaatgaattttgtttctctgcgtaaacattggaatgagaaagaactattctacataacaaagaaagtttgataacaaattaagctctagttctagagcataatagaaagtcttgaaataattctacctttctctttagatctcctatacctatgtttgtcaagaagaattttccaagagaagaaggatcgtaatctttcacagtttgtactttcaagaaaaaatttcttcttatttctttcatcagattttcaaccttggacttaaaggaggcagattgtcacatatttaacaagagttttccagtcgatattatgttcctggataatttgtgccaaaaataaataaccagtgactcactgtttttccaagtagtgtttcaccagctggctctccaagctttctctgctttatggaattttgcatatcgttctcaaaaaagaaaaaaaaaatatatcacaaaacagaacaactgagcatataagacattaatataagcatatgcaagagattgattattgtaactctagcataatcaaatatttagcatgagtaattcattagctcacggttgatttattgcaaggctcaatggataatagtatgaaagtacacttacttgcttacgaagaaggcctagcgtcagatatatagccatttcagcacatccagctgcattaccagttgcatcacttgggatcctagccactttgatcccatgcttcgttgcagaatcaacttcaacaccttcatgaaagattaaataaaggaaaagaagcaaaaaaatcacataaaaatgaccttaaaccacaatgatttggaaaatccaatgataatgaccttctaaaccaacaccaaattgcattatcagcttcatttgtttcgcaagagagataatttgtgaatctagcttcatgttcttcactacacaaatgtggtagtttgctataacattgggtacaacatcaagaggaacatcatcaacctacaatattagtaaaataattattattgaaacacaatttagggaagctataaccatttgtactggatttcattttaaaactaatttgtataagtggatggtgtttctcatacatttttcatgtgggattttttaagactaaagcaaattagtagaaaaattaaagcatagcacatcgaatcttttatttgcaaaatcagttagcatcctcatttttaggaaagctcctggattgaatctgagtcctgacaaaagcatcaagcaacaaactttttttttcttaggttgaatcgagcaaaaagaaaagagattggtacctgtatagaagagtagttttgcaaatattgtcgtgtataagtgtgggaagccggaaagtaaggtccacagaagaggactctggttatgtgccctttactactgtcagcttccatggcaggtaactcagccggatgcattggagaaattttttttgtttttttttttttttgcctatagccagttcattgaaagattggatttgactaggttcattcaactcaaacaaatggaattcaataaaataaaataattactaagttttcttaaattcttcacactacttgattctgtcattagagcatctccaaagtataattattaattaccatattatctcaaaatataatattttattttattttatttctacattattttttgcatttttatttctaaaaatattccaatatataacactctttaaaaatattataattataatctcacatattattatttaatatttatcttaatttttagctacaataactttttagctttaattttttattaaaaagaaattaatagcatttatgtaaatttctagaataacattttttttctctccaataatatagcatctcaatattttgctatataatatatctacctcactaaacattttttaaagttttaccattgga

SEQ ID NO: 44270 - DNA, 1369 bp, Cannabis sativa
atatatatatatatgttgtagtagtgagtgagtgattgaggccaggctagcatctttagaatgattgagagagagagagagagagagagagagagaaagtgggtcccactctctcactcctctgctctgtcaatccacatgcgctctctcaatgccctatgcactcctcacttattttaataccctttattctcattctcacccattgtatcaccaaattctactatactacttatctctttaccaccccttatcaattttatcctaactaaccccttttctttttttattttattttttctttacaattcctgctccctctcttttcttgtttctttccattatatgcctaaaatcttatttttcacaactaactccacgaaattcctaagaccacttttatttttattatttttttaaaaaaattatcaacatttcatactttttcattcaataaataaataaataatacttttattttatttaacattacaacatacaattatttttattcattaaattagcatactaagtcatttacaataacatgaaaaaaaatactctaacaacaactttagttagggatccaataaattatcagcaatcaagcattaaagaagtatgaaatatacaaggcttccaaaccaaataaataaatgacagaacctacttatcagtgactatcaatcagtgatctctcgataaaaattaggacataataatctattatttaaatcataagtaaaagaaataacacgactaaccatgttgtgatgcttaatcatgaaagattggaacacataacaattggccaataaaaatctggagatctcccaaatcagacgattgaggatataaaccaagatatcttcaccgaatcaatttgagattatcaatgaaaccccaataaattaataagagacaacacttgcattttacatcagaccaatatcaatccttactaattagtagggcagtgaaaatataatgctattatataaataaaacaaacaagaaataacaataagaaaacttgaaaagaaaaaaaaaagacataaaaaaagggcaaactaaggacaaaacgacaccaatttgccaattaattttaaactcctaagaatccctcccacaccctaaagcccccacaaaccaaattcaaacaagctacaacccaacccttgaactgaacctgaactcatgcccaacctcgcattcctcccacaccccacgatccaaacacaaaattcttctctgcaagaattgagaaacaacccaaccaaaaccaccgaaactcctccaccaggccttgccagacctggatcgatcaccatcaccccatagagacaccatcttgaaaagagagagagag

SEQ ID NO: 44271 - DNA, 2878 bp, Cannabis sativa
  modified_base (2394)..(2406): a, c, t, g, unknown or other
  modified_base (2717)..(2722): a, c, t, g, unknown or other
taaagtttattaattacaagttattatttttaatctatattttaaaagtttaattttcgctcttgctctagtagattctagtttagcgggatcaatatatgtttattcgcagtacgtccacgttcctattattagggtgttacatgcaacctcctccacaagatgcaaagtagctaactccaataaagcagcaaactattcgaaaaactcaacaaaattcaaattttgagagacagcaccagtgagattccaacaggatattgcaaaaggacagttcacgagcacatgggagattgtctcagctgtctcattacagaacaagcagctggtttcaacagggatatgccattgcaataactgaacacgagtggggaggcatcccgataatgccttccaaagaaagtgctaaatttttgggggaatcttcatcttccacagctgcttccaacacttagaattctccccaaagctggtgcttcttttttgttgctgcagtaactgatacgcacttttgactgagtagaaccctgagctttgttttgactagaaccaatggtccaaacttgctaaatcactaaagggtataccctaaatcaagtcagcgtctctatcctcaaataggtcacggacaacatccacattccaggccctcctcccaacatgaaacaagctttgaacaatgaaattcactagcccaggatgatcagtagtaacatacggattattatcatgagggagccacggatcaccaataatattaacagaggtaccaacaccaatgctaatcctagcaccatctttaatcaaatcaatagtctcatgaatactacaccatatgaaacttaggttatttccaagaggagacgataagaaatagccatttgggtaataccttactttataaacccaactaaccagagaagtgtcgtttaacaacaaccgctagccttgctttcctaagagagcaatgttacaattgtggagactacgaaagctaatgccatcattatatgctttgtattttattagtgacatagcaaaaataaaaatattaaggagcaccttatggtgtaagtgtaacgtgcgtgccaagatggcatgttacaagttaggtgatatccacaagttggccaagtggtggcacatattggtgtgcatgctggtggcatgttgatgcttagtttgtatggtagaggcattttcataaatatattcaatattgtctagattgggacgtgatttggtattcgccatttatttgggtctacgaatacaatggtgtaatcagatttgagtaactctgtgatttggtatatggtttgaccatatgtctacagacccaaaattatatatgttcctggtggaaggctaaaagcatagaattctctttaaggggggagtacctggtgcaactctccaccaccccctggcaccttagtgctaagtgagctactactagtcagtgagactagtagggcagacatatgaggaccacgagaggactcatatgtctccatgagttggaatgctcatggacattatcgggccaacccggtagtgcgtctaagaatactgacaaaggttaacgggtacgtttccattggcttgtcggtatgtcgcatgcacgggacgtggcctaaacctccaagagatgtcgtggtgcgtcttggcaacgagtctcaacatgagatgacatgggtagtcattcatgggctagtttgcatgcacgcatgagatgaatgcaccatgctagaaagagagagaggtctaacgtatgctactagtttaggctgttcgagggcctaccaacatgcgtgggggcatggtgtcgtaaggactggtttatggacgtatgggagtccttgggcgatgagggagactgttcggacagtatcaaatggggcatgatagaagcgttgccatgtcagctttgtgttggcatcttgccacacatgctaccttggtcatgagtgactagttaatcatcggtgttgggatttccttatcatagtgggaatctatggacagtgcgagtatcttggctagagagcttcgatgcatggatgcattcatggatgcttgtgagtatgactcaacaggagttgttcgagagatggaagtgtgcatgaggtacacagtcgtgcaaaaaatgagcctattattactcggatggttggaaggttgaccttggcttagtgaagtcaaagtgacgcatgagtgttctgttgcctgaaaaggtgagcctgtgacactaagcacaacaaaaggtgctatattattgttggtgcaaagaaatatcatgtcccacataatttgatttaataaataatataagaaattgctgactagtatatacataaacacataaaaagtgttggaacttattttaccagnnnnnnnnnnnnntaacatgtatgttgattaacacctaaatgtgaattctcttatacgataaaattaaacacataacagtttagaaaaccttacattgatggcagcagaataatatgactttcgctcatatttctaacccttattccttcctgtcacagagtaataacaagatctgagcttggatctccttctctcctccgtcttccgcactgtaattgagtacttgacttgctatgtataggcatggtactctatcactaaggcttgaagattgatgaagaacaacaaaagggcaaaatcactatgaaaggagtctctcatcnnnnnnttgtctgacagagttagaaactaggcttagtttggttgaggtatgttagatgagaatgatagcatcatgttccttttatagtatttctagggtttaggatttaattatatggatttaaaaaagaataaaataatagacaaaaatcaagtctagtgg

SEQ ID NO: 44272 - DNA, 1782 bp, Cannabis sativa
  modified_base (44)..(55): a, c, t, g, unknown or other
  modified_base (1304)..(1308): a, c, t, g, unknown or other
tcatttaacaaaacacagaatccaattggtaacttttgtaaaannnnnnnnnnnnaatggtatttaccctaataataattaccatcttgaaaactttctcaaatgagtgcactcatttcccaaaatcttcaactctttccgataactttattagtattatgtcatgattatcaaacttaaatgttgtattttgtttttggtggtgtaataggtatatggatatagaatgtcactatgggcagaacacataggtggtgttgaggaaagattcaagagaccagagagtatagaatgtgtgagaagagtaaggtatttgagtgagcagaattggggtcaatacatagctgaagtggccacagaaatgaagggtcatcttctaaagtatccagttgaagttgataaaacaggtaaggttaaacctcttcctgcctgtgagactttcccagatgttggaggaaacatacttggcacttttgtagccattcaagagaatctcactatctgatactactgatattagtccccttagttcttgtatatacattagtagaacaatcccaatatcattttttttttcttctttacatgcatttttttgaattcgttgtttaattaatgatatgaattatgaatgaggttatatgggggagaacatttttgcagtcataactattcattttgttcattttctacataaaaattctaaataattagattatatttgtggtctttttgtttctttgtaatatctggagataagataattatacaatttttttttaattggacacttgtggttattattcgttaactgttttttattgattaacaagggatcataattaatcaatttgtgatttatggaaatttattttcatggtaaatcaataccaagtaaagtgatactatgtggtattctgtttagttacttgtcaacttctcctgtgtcaacgttaaagccactataccacaactacctacactctcatctttatttattattgcaataagtaacattattttctcaaaaaaaaagtactcatttaaatattaattttttaaaatagttgtagatcaatgataaaatcgtaagagaaagaaattttttgtgaagtaaatactagggttgaccataaattttggtaaaccgctcaaactaaactgaaaaatcgataaaaaatacaaaccgaaaaaactcaataaaattataaaccgcccaatctgttaattcggcaggctgaaaataggtccaacccgcctaattaaaccaaaacaacccgtccaacccaactatgggtttaccnnnnnttttttttttttttttacatttcacttctattatatataatatattctatttttgcatatatctactattgtagcttgtagtactaattgtattgtactaaaacatataatctatttcggcatatatatatataagtataataaactataaaatttatgctattattgtttttgttaaaagtatatttgattatttatatataattatatgtatacacataaatgtatatatgatatgtatccataaaaatgatgagtaatacattttatgagctccttcctattaatgattatagtaaatacttttttatttgactaaaacaaaaaaaaaaaaactttttcgtcgggttggtcaggttaacccgaccaaactgaccaacccgtcggacagtttacaatttctttataattaggcgggttatacttaaaattttgtaacccgagatttatattgggttaaaatatatatagtat

SEQ ID NO: 44273 - DNA, 3123 bp, Cannabis sativa
attttatcaaaaaatttaaatttaaagtactaaatatgtataattttaaaatataaaataccaaaatattattaaaaatataaaataccaaatttatattcagataaaacaccataaaccaaatgtaaacactctttcttatatggattagtaagaaaataaaaaaaataacatgatatttgccattgcaacttaggtgtccttctatttgagagaataaacaataagcgagctgtgggtgtcagtagtatccgtggggaagctaaagcaagcggccatggacttctccactctatcagaggcgttggaatccaaatcctacgccaagatcgccgatatctgcgacaacctcatgcttcaggtaacttttaaaccctttctctttttctttccctcctttttcttacacctctttctctcattttcctatatctgccttcgtacaggttgcggcggagggcgtcccctatcaggacgagtggccctacgcgattcatcttctgggtcacatttattccgatgatacgtatgtttatacaattatttacttaaaatgacttgtttgatcttttatttgcccctttaattatttgaatttttgagtaacaccaaataaaaacaaattcttagtagcttaatcatattgtctattgtatgcggtttttaattatattgttctgatttcgaaatttccgtgattgagtttgagggattttttttttttttgataatttatctggtttttgagtaatgttgttcctcacaagaaattaaactttgttgtgtcatatgctacaagctagtaaagtaaatgggttttgagtgagagtttattaaggcttgatactaatttgcagcattgggtttatagaattaatgaaaaagctgtttaagatgttttatttgggatttcatctttggaattgggaatggttgcagtaatagtgcacggtttctatggaaatcaatacctgctgcaatcaaagacaaccagccagaactgcttgctgcttggaaaattggccagaagttatgggtaagggactatggaggtgtgcatgaggctattcgtggattcgattggagccagcaagttcaaggccttgtcgctgctttttcaggcaagtctctacaaaatctcatcttatctattgttttagatactaattcagtaaatcaagaactatatctatttggacagaccaattatctatttgcatattcgttgtttgaagaaattgttacttggtgcgaatacttgacttttgacattctttcagactttttctttgttgtaatttgtttaagttgtagtgttttggactcaggaaatttctattggagccatgtttatttatttactttacttattaaactattgaaggcatgtttggctctttttttcttctttctgtcattacaaatcatatgtattatttgttcactttgataaaaaaagaaccacattggtgagctaggttggtcttgcagactctgatagggcttgttgcaagtcagagcaactcttaactttttctgtatgtattcaaaagtttttcctgtggatgcattttggttggaagtaaaattttgaaatagacgagatggtggagttggaaatcgaaagagataagaaaactacgaccgtgtataatgaacatttatacaaattggatgagtgcctctttttgcttcatatgtattttttgatgtggtttctctggaacctaggaggctaccttaccaaagataatgtttatggactcacttattagtgaacattggcagtcttttcttaattttcatatattgatgactttgtaacggacactcagagtatgaggaagtcattattcattagagaatgttgttaagccttatggtttaaacaataggatattccaagatgtggaagagggtgttttttttacatttggaatagagtgaaatatatgatgtctaaaaactaaggaggttttaatggattgctttatgagagctagttaatgactggcgcctttggttgcaacttaagatgatatcctatcatttttttattagtatggagcttgttgtttcttactaaagaaaatcaatattgaaagtattttgatcattaattgctgtcgaatagatatgtatgcttgcatagtaagtaacagaagtatgcccttcctttctatgctagtggcaaagatctaagtgtgtattgcttgattttattgcatttgagaactcaacatcttttaggctaaagctcattgcagtgaactgtttagtgttttttttggataaattaagtgttctggttgtaatgcagccactgtagcgccctgttataggattcatcaaacaaaataaataatccacagataatacagtaagtgtgatgtgtgaataaagtgggtactagggagaactagagagatgacagagaaaaaggaatcacaggaaggaagagagaaacaggctcttgcatggtcatctacatagcaattttacagtgttctggtcctagggtaggtgggaagccttgaagaaaatatacggaagaattttcccaataccatcgtattgtctggcgaagtagattttccttgaataaccaaataatattatgggttaatgtttaaatcctagatataagcttttgtaatttagactctggattctgtgtcacatctattataattggtggtttttcataataagcgtgaagaattttcagaataggttgttgtctgacgaagtagaatttgctagtgtaacttacttacagtatggttaaatacttagattctagttatgtagctcttacagactatgggatctgcatctcatctaatataattttttaaaaagtaagcatgccataattttcatttagttgtccagcacccctacaagtctgagtccggacaaccagttccaacagttcaatattcaaccacaattttttttttaatttagttactgcttgttttgattataatgagtgcaaggtattttcaaatgtcatcttgtttgattataacttagttacagcttggtatggttgcttaagtccctttgcttctgtgataatacaaaaacatatctcccttagcttgtcttccatgtcat

SEQ ID NO: 44274 - DNA, 1228 bp, Cannabis sativa
attgaatgtgatttatgttaattccattttcttccagtatttttgtttagtttaaagtacttgcgtgttttaggtttcttctaatatgttttgtgattaaattcatgataatagtgatcgctacacgactttacatatcgtttttatttagatcaattattatcttatccatattatggcattttcaagtcacattagtatgggtttactttattcactatattaccaaagaaatatgaaagtttgtagctgtaagagaaatatgaaagtttttttcttaattaaggaaaaaaaaaactttgatttttgtctagttgattaatgcattccaatgccagctatggcgcttactacaaacaaatcttgaaaaggaaaaagattaaatattataattcgtttttaacatttaactatatatgtgaccaaaagtattagcttcgattcgatctacatctttaaaatttggttaattttttggaatgagtagaatattttattcagaataaagtatttgactttagttgtttctgtgttatgttttaacttgaatggattttgtttttgatagaactgtgaattgattttaatgatacaataaaatatatatttagcacaatttcttagctttataacgtgataaacaagtaaactaacatgtcctccattagagttgtacccaatacgaccaggaccatgtaaaggaatatgctaagttattttaaagtttgttcctttccttccattacaatcagccgtatctatgagaactactaccacttctcttatgataaagatcgcagtttttattgtccaatcaatattttaatcagtttatttatttattatactattactttagaaaaaaaaaaaatcaccactctgaataatattagccaagttgtagcttttcaaaatgtcaaactaactatttgtcaaattaaaaaaaaaaacaaattattagttatattatattcgtgaaattggcccttaactaagtaggtattttatggttttgggttgagtacttttttgaattttgaaattgtaatagttattacacgcacgttcaaaggagtttaatttgtcaagttgcataagagtcagtcacggtagaagtttccaaccaattcaaactgtatctaattagttagattttttttttcttttgaaagaaatctagctaattaattagttattatcatttttggtttctctatcctaatgataa

SEQ ID NO: 44275 - DNA, 1994 bp, Cannabis sativa
taataaacatacttatgagtagatctaagatcctggtaaaataatttgtaacaaaaagaccttcaaaagagagggaaacagctcaagtatgagcacttgggcacggataccgtggtacgattcattgggccctatgaaaaaacaaaggaccttctcttaattctaaaatttcaagttgtcgataaaggcttgacaagtgtaaggaatgaaaggtcgcagcttgttaatcttatcccaaatgccctgaagtttggtgaagtaagctgtgacggaatcatcgccttagcgtagatcagtgagagattcattaagcttaaagaggcgaggtgtattgccttggctaattctattagtgagctcagtccacatatccacggtaatgtcgagaaacatgatacttatcttgatgttaagagaaacacgatggatgatccaagacatcaccaactggttacatcgaatctaagaatgaaacagaggacttataggcactagttgcgaaaaagtaccgtcaatgaatttggttttattcgtagggccaagagcaaggttgaaatccctacgccattactaaaaattattatttgaaagtggtggaatgacaagtatgagacacggatgttcacttaagctaacgaagtagggattgtattcattgcgaaaatgagttggacgatgacttgcatcgtggattggaggagcattatttatgttggctcaattggcttgcttagtgacgtagtcaaggtcacaaagagagaagccaccagcagtgacgggcagagctccgatcgaatgttgggaatagaaggctccagctgaatctctatgaatagaaggtagaggattcaaatcttgatcgctcagtggaggttgatcatgaacaaccaggcgaaccacaagattggtggtgcaggtccaatcttgttcgctggaaagaaccacgggaacagtggtgtcgtcgagctaagaagaagtcgtaggagcaagaaggtcggggatatagaacccaagcctgctaccatggatgaatcggagtttgatcttgagccaagaaaactatgagaactggcagtgggagactgaggaggaagacctctgcgagtgcgcaccatagactcggacaaagaagacagtgatgattcgagaagaacagcaagaaccatggtggtaatccgtaaaaagtgaatttggtctaacagaagtcgtttgatactatcttaggaaagagaaagaaaatttctttattactaagtgaaagaaaatatgagtttgatattatggtcagttcttacaatattattatatatatatatatggtacacgtagggtaaaacctttatactcgaatagatatataatcaagaagggataacaataaacctatagccaaacagactaattggttctaatagatttcctatagttttgtttttttatcatgtttagagttgtgtgttttgttttgtttgtaccaattattaatatttttgtcatttttaaacctcacatttattatcctttttctcagaaaaaatttactctattttctcttttaaaaatatttttttgaattcatttttacattttttaccatcttttttctcccgtgttgtttttatttttcttcttatttgtttattagtaaatatataatagtgtagaagactatatgagcatacgtatgatattaatatttttttgtattgttattatttttttttttcataatttttgttaattattattttattttttttaaaactttatttatatatatatatatttaaaggagaagtatgaggcagtgacatggcggcctaaaatttctccaaagctataattttttttccttaattttctcaattattttttaatattttattaatatataaatttacaaattaatattttactattatttttataaattttttataaatatatctagcataaaccaattattcaaaaacaaaacactatatatacaacta

SEQ ID NO: 44276 - DNA, 2564 bp, Cannabis sativa
  modified_base (231)..(236): a, c, t, g, unknown or other
gggctctaaggcccaattatattaatcaacttttaatttcttgggctttttagtaagtgaagtttattttgggataattacaccgaggcacaatttttttaaaaaatattgtgtaaactttatactatgtactgtgttaagttttcactgttattctatggttgttttttagttgttccattgttatttttagtttttctgttttgtgttctattgttgttttataaaaannnnnnatttttgaaaaaaaatttgtgtgataatatttttgtaaaagttaacccaaattctaatatttttgtagttttcctttattttagagataatttaaaaaaaaaaaatcacacaaaaataacaaaaaaagaaaaaaaaaaatacaaaaattatgattaatttttacggtttttagattttatttacttaaaatacattgtttttaatgtatttttatattgtattcttattattttattattgattttttattatttatgttgtttttatgttgttttgatgttattttcatatgattttttttgttgtgctatgttcatatctaatgcagctgcatgatggtgttactaaagtattttagtatttctctgaaactccctgtaaacactcttgaatgattatttgctttgcattgtcaagacctattatactacacttttaatgattgattattcttagttggcgtgagcaatcaaaagctacaattgtacttcactaaatatggaatatggttactcaaatgcataaccccaaaatgaccatagattattcacctttaatttggttgctcatatctgtagcaaattagcaaccaaacaccaactactattcactacctttcatgagaaggacaccactattaatattatcttttatttcagctttgaacattacaagcaatgattataatgaactctgcagattttggagcacattcttatcttatttcaccaaatttgaccattctcttctttacttttagtaataaaaatataaggacacgattttgttctgttagtgtactttagaaggatgtattctgtgatgtacgacaaccgttagatggggtaattatttgatctgagggttggagttgatctaggggtaattaaggttaaaaaatggtaatgtaccctgagacccattattacgtaccctgggacccataaataaattcacacacattattacgtaccccgggactcacctgccttacaacgcaatacattccgtgttttacatttcgggacacaaaatcgactgcctaaaaatatattgagatgcatgttttcttattcaaaaactcataccaaatctaagttaataaaacttaattgagaatttgaaaaaacatacatatgattttattttattataatagtttcattgaaaattttgggtatgttttttttacacaaatttagagcatgttgggacaaaagtaaaggaagaaagaaaaacatttgatgtgtattaggtatgatgatgagtaaagtagaatttggagggtagggccaactcccttcatatgactttgaatcttcccaaagaagaacatattttccttagacataaagggttaatgatgatcacaagtgaaaaataaaatataatttttaacatgtgcttgttattacaaaattcaactcaaactaagacaaattatagaaaaacagtaacaattgcaaatgcaatcataccactacaaatagtgcaccttctaatgtcatcattttaactttgagttgatgaagtaaaagaagaagaagatgaagaaaaaagtcattgcattttgcatgtgtttacttacaaataatcattcaaaaatgggtccaaagtctaaaagaagcccttctattttttacttttttcattatgaaaattattgtatacataattttataacattctttcttcttttgagctatcccaatcaactcaaaagaagtgtttgtactatcaacacaaaataaaatcatatcattagtagaaacaaagtaaaaatgaaatatcatgattaattggaccaatttaagcgatatttttttttgtttgattggtacttaaaatatataatgataatgaccacaccaaattagttgacttaattaaaaccttagaaaaatattttgcagcacaacgtgcttttaatttttttacgataataatgatgataataccatatccgatttaggatcctattgatttcttaacttttagttttactaaaaaaactcttctagggctttctctaacctgcctctaaaacatatataatctaataagacattatatataatctgatgggatactataattaaacttataaataaatttatctacagtgcctcacaaaatttagtgagcatggtaaaccacactattatttttttttttaagtttttaacaattagataatacgaaaaaaaaactaaataagtatatatatttagtatcaaaatatttttattatattaataaaataatagaataatataaaatataaaatctggtgtaatttttagtattgtgattagaattgaaaaaaa

SEQ ID NO: 44277 - DNA, 2940 bp, Cannabis sativa
aacatgttctataaaattatttttcacttttcaattttttaattgagaatcaaaattttaaaaaaaaaattactttcaatagtttttaaaaatagatttttttcttaatcaatattttggactccgaccagacccgaacccaaatttccctcccacggccctggcactgaacccggcctctgacccgaacccgaatccgaccccgaactgagacccgacttaaataaaatcaaaaaatgaaaatgaaaataaactttacaaaacacatttttattttctatttaaaaattaaaaaataaaagtgtggttacagaacgtttttttttttcaaaaataaaatttttaaaaacaaatattttaccttcattatgtgattaaaaaactagaaaataatcccatcgaaaaaaattagaaaacaaaagtgttaccaaacgacacctagtgtattgtcattatttgaaatattttgttaaaatttaatttcaataatgatgtaaatttggtaaaattaaaattgtacttaacttaacataaaagatagcatagactaaattttaattcataagaaataatacattttttaattacctctttattacttattaatactattcattaatgaaaaaagtttttatatttataagattttaaaataatataaataaaattaattgttttgtatattttcaatgaacattaatagtagtatttacttttacaggtaatttgaaagtatttgtttgagaaatgctaaagggcacctaaaaggcaccagtggtgcctaacaccctcctatgtgttagtatcgctattggtcaaactaagtatcgggtctcatatagtttaatataatggcctttaggaagtatcactaaccaatcgcaacgcgacatgtcgagaaggtgctaagcaccactggtgcctaatagcaatgctcgtatttgtttgattgattatataaagaacagtgttattaggtggtgtggtgcctagcaccttctaggcatgtcgcgttgcgattggctaacgatatttcttaaaagctattatatttaattatataggacgggatacttagttggaccaatagcgatattgacacataagaggatgctagttgttccgtttaaatttctcttatttaaattgtttgattgattaatgtatttgtttaaattctatatatgctatattttaattatgaagcttcttttatttgttgaattaaattaatcaaaagtagcaattaatactcctagttattttcacacactttaattaataagagatcgagtgcattataccccttcaatttcacaaatttcagcactatgcatgagcattctcacatacgcatcaactttctttgaaacttctttctcggtggctttgtcgctcgtcgcaaaatgatctgaataagctttcgtatgataacccactacgccaaacataattatataactacaaattaaaaaaattaaaaaagataaataaataaataacttgcataattattttttaaccacacttactcgggtgatgtaaagtgtgcaagattccaagcactacaagcgtattccccggtcgaagaatatcacctctcactcgcacattatgaacagttctttgaagctcacactcggatcgatccttggtggcatcataaataataagaacgttagatggcgaaagaggactcaccgtttccattattaattgaaaattaatcaacaaaagtctcaactgggtatggacactcttagtcttaagtctatagggtattttggttattttggtcaaagggtatttaaatataaaatcaaccctgtacgataaagaactatggtgatattggcacagctataaatataatacttcatatagtactaattggttcttaaatggtataataatgtagtagtttttagtgaacttcatcatcatttatgatcatcaagtctttcatctcattgtaagccgtagagatatgccatggatattcgatgttgtctcaaatattttagaaataataagcatggttgccgtcttcattattaactgggacaagaagtacattttcatatgcttcgagacaacaacgtgggttatcatcattttaatgaataatatacctataattttattattttatgttttatggcttattgatttgtcccattctaattttctttctcaagtatgtgttgacataacatgcatatatatatatatataatttaaacaaatatcttaattaatcaataaacaaataaattaatcaatcaaacaatatgctatatcaaacaacatgacattacctcaccttgactctcattataatattgtccgttttgggcttaagccctcataattttgtttttaagcacctttccaaaaagcctcatactactggattaggttcatgataactcatgtttatttttccaatgtggaacttgggttgataccccaacaatcctcccctcaaaccaaggaccacatactcgtggtctcccctccaacgaaaccaccttatgccgccgctatcaccaacgaaactcgttgcctgaccattacctttgtgaggaggactttcgacacaggacctaacaccgatctccatcttgtaccgtcgtaatctcatcaacgggacacaccacctgactacctcaatatcagatagactttcgatacaaggcaccatatatatcttctatcgcgagatcatcacattgaaggcttctcctacacatcgcaaatatagcccactatcccagcgctcttaaacttttggctctgataccacttgttgggccccgttctttcaccttgttaggctgctactattaggctttgtgccctaaataaaactctatttcaatgtaatcttttctattcaattatcaataaagaaaaaaatttattttcattacttattta

SEQ ID NO: 44278 - DNA, 4685 bp, Cannabis sativa
gtgagccggtcaaaccaagcacgcggagattgacggaggccgtaaagggccttgtttagcttgcaaacgtggttaggatgagcggagtcgatgtagccaaggggttgtgacatatagacagtttcggagagggttccattaaggaaagcgttgtcaatgtcgacttgttggatgtcccacttgttggtggcagcaagggtaagtataacccggatggtggagcttttgacaacgggactaaatgtttcaaagaaatcgatcccgggttgttgttggaatcccttggcaacaagacgcgctttcaagcgttggaccgtgccatccgcatttaacttgatgcgaaagagccaccgattgtcgatgacgctcatgttgggagtccgaggaacaagagtccaagtgttgttccgtttaagagcaaaatattctgtatccatagcactcttccaccttggattttttaaagcagcagccacattgtttggttcaaattctgtcaaaaaggcaagaggtgaaggagagaaggcagtgaatacacgaggcttgtgaatgccggctttggcccgtgtgatcataggatgagagggatgtggtggggctggaggagggatggttgagtgactaggtgatgaagttgatgtgttgggtgagatgggaggacaaacctgtggtgggagagttgggtaggatggagtagtgtatggtgtagagggactgttgggggacatgggctggtgtgatgtaggtgacatgggcaggtgtgatgtagtcaaaggagtcgaggggcacacttcttgacttggagagcaatgagttgtatcagcggtaactccaggcgaatgtgcggtggggagataaggtaaccattgtggaaattgactaggagtaagtgttgaatccgtgtgtgctgaagggtagttaaaaccgtgagcaaaaggaaattcgtgttcattaaatgagacactacttgcaatatagactctacccgaactatggagacacaagtagcctttgtgtcgagggctatacccgatgaacacacatttttcagatcgaaatgtagcttgttggagttataaggccggaggtatggataacaagcacaaccaaaaacttttagaaatttgagatttggggttaggccaaaaagtttttggataggacttttgtagtgtaggaccggggtggctaagtgattaatgagaaatgtggcggtttggaaagcttcccaccaaaatctttgtggcatgcttgagtgtgctaggagagtaagaccggttttgacaatgtgccgatgcttacgttcggcacggccattttgttggtgtgtgtgtgggcaagggtgtcgaaaatgaactcctaaaccggtgagatgcggagcaaattttctgtactcaccaccccaatccgtttggacggttttgatggtggtagagagttgccgctcgacaagggcttgaaagtgcttaaagacattaatagcttccgatttagttttaaggggataaatccaagtgtaacggctgaaatcatctataaaatggatgtaatatcggtaaccatggcgggataaaatgggtgatggcccccaaatatccgagtatataagatcaagtgcatgtttagactcttttggagagagagcatagtttttgtgatgagccttgcctaattggcagctagaacagaaatgtgctttagatgataaaggtttcttttcattaactaacacatgtttgagtacattaagagacgggtggcctagcctaaggtgccataagttggactcatcaacagacgcttgaaaacaagtggaaacagactcgatattgggacaactacttgactgattatttttatactcttgcgaggcaagataggtggacttgggatgtggcggagtggacagctgatacaacccattgctaaccgtcccttgaagtagaaccttcttcgaatccttgtccttcaaaacacattgagttagagtagaatttaggcatatgcattgttatcttttgtgagttgtgaaacacttaagagatttttagcaatgtttggcacacagaggatgttatttagtttgacaggttgagaataaacatgggattgaatgacagaatttccaatatgagtaatagggagagattggccattacctacggtgacttgggtcttaccattgtactcggcttgagtttgtaggtttgccgagttgtcagtcatgtggtttgtggctccgctgtcgacataccaattggtatcgtcattttgtggctgtccaaagttagccaagaaggcctgctgtccattgccattgttggaagtggtttgattggagtgatttgtgccgttgttgggattttgagcaacaaaggacacatcaaatctgtgatagcattttgaagctggatggcctggtttgttacacagttggcacacaacacgactttggttgttgccacggccacgaccccttccacggccacgttgattggtggatctgccagagtttgagggaggaaagtttcttctacctcgattagcatagttggcagagggtgcaacaagatctgcagtggcggtattgagttgttctattcgcatctcttggctttgcaagaggaactggacctctgaaatagtgatgcgatctccttgagaggtgaggttaacgaccaccgagtcatactccggacctaatcctccgaggatatagagaatgagatcgtcatcattgaaagcttgtctagcagcggtgaggctatgggcaatggatttcattttgaggacatagtcatggatcgacagagatcctttttttaaggactgtagttgaaatcggagctgtaagatgcgagctcgggattgtgtagtgaacagattttcaagtagcagccacagttctgcagacacacgacaacgaagaacatggcctaacatggcctctgtgatagaattaagtaaccagcttaaaatagcttgatcagtacgaatccatacagtatagaaagggttaacctgttgtggagcgtctgggttgttttcgacagggccatcgatgaactgcggcggacataatctggttccgaagataaatccgtcaaggtcatgtgcacgaacggcagggatgacctgagagcgccagtaggcatagttgtcacggtcaagacgaattgtgataggcgccaggggttgaagtaaaggtgctggaatgaccggagctggtgcgactggggccggagctggaggctgagcgtcgacggttgtaggtcgtgcaccactgactgaagagtctccttgggatgccacttttgctctgataccaacagaaaaagcagaggaacttaagacagagagaaatatggaaaataatgatttttgtattgattgtcttgaatgaatgaatatacagcagtgtaatagttacatatatatagtgcaaagggaataagaaaaaccctaacagaaaagattcctttgccatatgattggctcctaaaatattggagaatacacaattctagataattctagaataatagaggacagctgtgacaaaggagaatattcaggtgtggtcactgtcattatttttaacaggctccctcaagtttggcgtgggttgagagaccacgacaagcttgttcttcaagtagttgaactggcctatcgaagtggcctttgtgaacacatcttctgtttgttcagaggtagggatgaagcgcacttcgaccagcccttgattgatcatgttgcggatgtaatggacatcgacttctatgtgttttgtcctgctgtgaaagaccggatttgaggatagctgctttgccccagcgttgtcacaccatattacagcaggagttttatgaggcagattgagttctttgaacattgagtgcagccaagcaatttctgtggcagtctgagataaagcacgatactccgcttctgttgatgatcttgccacagccttttgttttttggagcaccaagtgactaggttccctcctaaataaacacagtatccggtagtcgatttcctgtcgtcgatggagccagcccaatcggcgtcactgaagcattcaatggaccattgttatgctggtttgaagatgaggccttggccgatagtaccttttagatatcgcagtagtcttttacacacatgccagtggcgttgagttggtttgtgcataaattggctcaacttattaactgtgaatgcaatatcggggcgactaagtgtgaggtattgcaatccgccaataacactttgataaaatgatggttggtcaaacggtttgctatcatcgatgcttaacttgacaccttgagagattggtgttgggcttgatttacactgcagcatattggttctttttagaagatcagtcgtgtatttggcttgggagagatgtattccataggcccctcgagtgatctcaaaaccgaggaagtagttgatggagccgagagttttgagagagaagaactgctgcagttgctgaatgatggagtgtactttaccggcgtgactgccagtgaggaggatgtcgtcgacatagaccagtaagtatagttcaactccggatgtacggtagtaaaagagagatggatcggagatggaatgttgaaacccaagggcgagaagtacttgtgtgagccggtcaaaccaagcacgc

SEQ ID NO: 44279 - DNA, 1961 bp, Cannabis sativa
aagtgttatctttaggagtcaattttagtgggttgggtataaatagaaagtcatattcttttattgagatatagagaaaattgtatagggtgaatattactcttggaagatacctggctgtctcgaaaagctaggaaagatattttgaattgtttttttttatcattaataataccagattttcttcttcttctctatggcttggccatttctaatttgaacctattggaaagtgagtaattgtgtatcaaattggtatcagagcagtcgatgggagagtcatggcaccaaccaagaaagctgccaagaacgtacctaggagttgccgaagacggagaaacacgtcgacgctaaaatcgaatcggtcagggatgaaatgcgacaattcaagaaggaaattacagccatgcttggaaagttattagggaagcaagctgatgagagtgggtcaaaccaaaacaaggagccattaacgaaacaaccccattcaagaactccagaaaaatctggaaaatgcgttcagcaaccagccatggggttttcaacagtgccggacgtgggaaatacaagctacgcttacgagcatcgacgcgactgccgcttacaatgacttgaattgcccatctttgatggtaccgaccccgatgggtggttgctacgggctgacaggtatttcacccttcaaagattcagcaaggaggagatgttggaggcagcaacaatcagttttgaagggaaggcgcttacatggtaccggtgggagttgcggtgccgtccaatcgtcttgtgggaagacctgcggttgctagtcttgaataaatttcacaacacttccaagggttcactccacgaacagttttgcttgttctgtcaagaaggttccgtggaagattattgtgaagggtttctagaactattggtacccttagatgatgtctccgaggtggtggcgctcagccaattcttgtctgggttgaaaaagaatattaaggaagagctgaggctatttgaacccactactttgaacaaggggccatgtggattttgctgctataagatcgagaacaaggaccattctttatttggtattcattcaaattggaacaattttaaggggccaggcaacaatggggacaggagaggaaccaacttatataataaagactaaaaacccattggtcaatttcggcggttgactgattctgaggtgcaagaaaaatgaagaaagggcatttgttatcgctgcgataacaaatgggctccaggacatcgatgtgcaaggaaagaattaagtgtggtaatcacttgtgacgaggacgaaagcccggtacaggaggaggatgaattagcccttgataaagctgagattacagagacggtagaagtctcgctaaattcagcaacgggaatagcagccccacgcactatgaaatcaaaggagcagtggggaatcatggagttacggtacttatcgattcgggagctacccacaacttcttttccaaagaattagtagaaaagaacaagttaccgttaactaaaacaggggagtacggagtgactctgggatcggggaaatcaattaagagtgaaggagtttgtaaggaagtggtgctggaattacaagggctgaccatcattgatgattttttaccttttggattgggaagcacagatgtgatcttaggtatgcaatggctggcaactttgggcaacactcaagttgattggaagcatcagtttttgaagttcaaagtgggggaacaacccgtaacaataaaaggagattcttgtgtgggaaatagtccagtgaatttgaaaacaatgttgagaacatgctacaaagaacccaccgagcggctggaagaatgtaatttagccactactgagactaacctagcatttttagaagatgttttgagcaattacaaagcggtttttcgaactcccaaaggtctacc

SEQ ID NO: 44280 - DNA, 1241 bp, Cannabis sativa
ttaattttgttattaattgttaaaagaaatatacttacctgcatattctttgtgtttagaatcaaggtgattaattattcgaacacaaaactcagcataagttgtcgagttttttggatgttccttcgttaaaaatattgccaatgattttccatctctactttgaataccgtttggactgatagttaaatgcctggatcaaacaaaataaacaaattaaaagaattaattagaatatgaattttttaaaaaagaaaagaatattaatttaaatctaccaatacatgtatacatacataccactctattcctccagagcaaaagacttgagatttgtaaatatatttatccgaaaattctttaatttcccaacgaaaaatagaattgtttatgaagtgacgatcaactacagaaagtattgcggaggttggagcagtatgatttatgataaaaatttcagctccaaatacacacgtgtcgttaaccacatatccattattcacatcttcggatgtttcaagtaacattattcgttcaaatccccattcttttttcatctcatgaaaacgccttacagctacaaatatcaaattaacaacaacaacaaaagtatattatataattgataaaaaataattatgtgaattaataataacatatcatcaatattaattaccttgaaaggtcaggtaattatcttttgtttgattatagacaaacaaagtgaagttagcattaacttcccaaccactgcttggaataatacccacatcatcagaagtagtactctcggcatcatcatcagagcatattattgtcaagtatagagataggtatttttcagatgtatttgaataaaatgacaataccctatatacatgaaataaaatattattaattataataataataatagttgatttgattcatatatatatatatatatgatatacataaaaataccatttgtatcccccaacttcaaatacagaactttcgtgtttctccattgattttgagagcaaactgaacgactgaactttcatcaagtaatgagctggtggagtagttctcatacatttatttaaattttctacaaagcaacaattgtaacaaaagaaaaaaaaaaacaaatttacattcgatcattaaacaacaaatttgattatgtatagtgtctattaaaataaaacaattgaataaatatgaattaaatttagatttaagagtgtatttgattc

SEQ ID NO: 44281 - DNA, 2331 bp, Cannabis sativa
taagatttgataccatttgttgtgcaaagatgcacactcaagaacaaaattaaaaattacaatgaaacaagaattggattaaaaacataaatgaattaaaatgaaaagcaaaccacacacaacaagttctcgaaaaaaaaacattttcaccaaccggaatatttttttttataatagtgtacggtctactaaataagcccatcgaagaataaaatacatatgataaaactgttctaagtatgtattttaatataattaaaataatttaaaatacatcttcccacccaattaaaatcaaaagataaataatttaaaaatatatcagtatctctctttataagtcatataatacatcttcccacccaattaatggacaataataacaaaaatatagaaagatataatgtatagaatctcacagttaattattaacaacaattaagtttgctgatataattccctctatataaacccgaacaccatctctattaacatcgcaacccacctaatatcataaaagaaaagcctggttcatttgaaaatggcctatccaagaatcggtagcgctgccaacttctcaggaggcggaggtggcgtaacggtggtggactgccataaacaagtccgctcatggcagctttttcgctctttcatggagcttattatcccatgctgcaacattcataataacgataatgatgatcagtaccatcctaatcaaaacaaaacaatagccaaacactacccccaatcccattattattacttcaactataattcccaaccaagaatttcttgttcctccacttcatcatcttcctcttcttccacttgcaacgtcgtcactggcaccatattcggataccgacggggaaaagttagcctctgcatccaaacatccccaaaatattcatcatctcccaatgatgctcctattctccttctggaactcgctgtttcgaccaagactctagctcgggaaatgagaggaggaaatctccgaattgccctggagactactagccatgatattcaagctgatgctactattccggggtataaacgtaattgtaataatcacagtacttctcttttgtccactccagtttggaccatgtactgtaatggaaggagagctggttatgcggttaggcggcggccggggaaaaatgacttggaggcgctgaagctcatgggatcggtggtaaccggtgccggagttattagcaagaaagaacttaacaatgcaccaaacgacgtcgttggggacgatgagcttatgtacctcagagctaactttgagagagtctgtgggtcggagaattccgagtcgttccatttgattgacccggacgagtctattggtcaagaactcagcgttttcttttatcgttcacggtgattttttcttttcttttctttttttttttttttggaaaagaaggaaaaaaaaaataaataaaattggtttgttaattaatggaatattaagtatatctctttttgcttgtaaattattagtaccctataataagttctctactttcttgtgttttttgagctgtgctagctttttgttgaagcaagctttatgatctagatttggggtattaatattatttttttataagctttgtaaccttgagatattgatcaatgtttattaactactagtactttttttgtgtattatataagtgttaaatttatatgtatatgactctctggccattaagagcctaaataaaaatgagaccgaaagaattaattcaaccttctttagtttaatcttcttcttctgtttattattattcttattcttattattacattattattattattatttacttttgtctttttggatcgataatgattttaatcttagaataaattagagcatcgaatattctcagtagtacatatgaaaatttgaaagaccgattggtgctagtgtatattgtaacagctgattagatagaaatatatgctggtgtatattgaaagtgagaccatatataccggccaaaagtgttaataataaatatgttttgtcaaatgtagaagtaactacagcattttgtaaataacggacaaataaaagtaacaattattacagtagctaataaaaagcatagaagaaagataagaaatatttctatatatacatacacattatttgtcttccttcttttgcctttataaatatatgcatgttttttttttttgtccgttcttaaattttgtatgtaatgtggaaattaaagagtaattaacataaataatgttttggtgtgagaaagcttttgtttgataaaatgggtatgcatt

SEQ ID NO: 44282 - DNA, 2292 bp, Cannabis sativa
aaaattatttctatatgttttaattttttactttttttttttatagtaaaactctcttaaatttattttttttataaatttaaatctcaactgtgtatatgtgataataaaacttccaaattaatataataataatctagttgatatataactcattgatatatctaacacttttatttttattttctacctttttttttttagaataaattgaggaatacctctttttttttttggaaataaatcatgtattttcttattaaaaataacaatcattcaagataatgaaacgcacttcaaaagaacaatcatccaactgaagtacatgacttgaagagaaacaagagctcctagcaagacagtgagttgttttgtttgcagatcgtttaacaaaacacaattcaacatatttaaaagacgataataaaccacgaacatcaagaacaagtaaatcaaattgagacgtcacagagatgttactttgaatagcttagacacacagatgttactttaaatagcttgaacacacaccaaacagattagtttcgataataatttgctgccaatcatgtcgagcaatctaactcaaagcctctttacattaactagcttaaagatataatgaaaatattatctataaaagtaaatatatcttaaaaatataaaaatgaaaataaaataaatgaaataaagtggtaatatatatttttttttataagttgtgcatttattacaccttgaacaagaacagaagacatagtactaaaatacagcattgtattggctctgacttgtcaccaaatacgacaattaactcatctgaatggaatattttctaacacataattaattaatttagtactgataatattaattaattaaacttaatttctctcttttattttatttatttattttttgttttatttccaatgtaaaacactacatcatgtgttgtcagtcagtcaccattgtttgtgcatcgtacgtacgtagatatattattaaccttattaattacaaaataaataaaataaatactatatatatactaatgttgcaataattaccgacaccattaatttcaaaaaaaaaaaaaaaaaaataccgacaccattcttatataaaataaataaataatattagaaatttctgtactacattgtagctattcatgaattaaaaacacacttagaaaattaggtttaaacctttacttaatatgtgtattagaaaaaataattatgtatgtgataaaatatgtaaattttatttttaatattataaattatttaatttttttgaaaatttataaataatctcaaataactataatgtacaataataaaaaaattaactacaaaattcttccgtatgccacaacaaataatagatttaccggaaagggtgcacggtacgtagaattatccaatattattaactaattattaaatagattttaacccaaaaaatttacattattcttattattttaaccctaaataatctccacacatatatatatatatatgttagaattaagaacttgcttaattttactaatggaaacttgatgtggataaaagttcaggaaacacaatttgagacttgtcaaagtttatgggggcacaatttgatacttattaaagttcgagggccacgattatttaatacatgaacaacaatcatgtgagtaaaatttaactgaaatggacaaaaatctttaaatttaataatctcaatagttcaaaaaaaatatttctaacgatcgagatttgaaaagtttatatgatacatattaaaattattcaagtaataaaaattctaattaagttatatagtactctatagaagccggtgagttattacaatattatatatattttgaatattttttcagtaattttatttttcaaatatgaattaaataaagatgaattaatccaactataagtttctttttttctttctaaaatccaactaagtttgttggtgccttcttttcaccttacattttgactaagtagagatcgagaagagtttgatgggaaagtggggccaaccaatcacatgcacacttataattataccaatcttaaaattaaatccccacaaattgaatccaaacagtttgattggatattgaataacatatatctaaccctaagtgtgtgtgtgtgttcaagtcaaacaccatagtctttcattgtctcctattatatatatcattattattattaagagacaagtactaataatctagggtttggttgatcatgtctatatatatat

SEQ ID NO: 44283 - DNA, 2978 bp, Cannabis sativa
aatgcttgactgtgccctatgtttcgaatgtactatttgatttttttaacacttgattgaactatttgtttatttactgtgatgtacatttgagcaacatttccttccagtacttttttttaaaaaaaaattgtttacatattgtttatttatttttgcaaatgacttaatgctgactttgtgtccgtacaagctacttattaactattaatattttttcttctaatgatttgtaattgtccattgcagtggaactactattatattctccaaaacgaccagttgttgactactctgtgatatttctgtggatgatggctgttggaacacttgtatgtgcttcactttggtcagagtttactgcccctgaacacacagatgagcgttataatgagttatcgcctaaggttagtgtatacagtttatagatattaaccattgtgcattgcctattgtgcatgtgtgcatgtgtgtgtaatacggcttttacatttatctgtgctagcttctatatcctaaatgaatacatatttttttttttcattgttacatactgatctgctacatatgtcctcaatttctagtttttttcaggcactgtgcaatctgtaataatttctcttgtcacccttataatcttttattctttttaccaactcagtgcttgcactttctttccccataaaatgcttgacttgattcagtctcatattatttgctcctaattatattcctatactagtctcttaatcatggtatcaatttcgttcaattaaataaatagttatgccctttatcgtttgtctactgtggtttgggtgttccttaattttttaatgtgctatgcttaaatttacttcagttacaaaattttctttctttgtctaggaatctggagtaaccaaagatgattctgagaaggaagttcttgatattagtgctaagggtgctgtagtttttgtaatagtagcttctacttttctggttctgctatatttttttatgtcatcttggttcatctgggtgctgatcgtacttttctgcattggtggtattgaggtaaaacaatttatctgctgtttaatttcttgctgatattaactaactataatcttcccttttgccaaagaagaagaagaagaagaaaactaatgataattttcttgaacaaagaatttaatgactcctctatgacatgcttatttgcgaaattgagtatttgacttttttttttctgtatttgaagtgtatgcaaagtttgacattcagatactaatgccttgtaatttttcttcataaaaatttaccccttactcaaagaagaatcatgtcaagctctggtctacaaatcattacagtgaattagacagttcatgttttttctgttgtcggttgcccttgcttattctaaattttatgttgacaaccgtggtgtttagttgtgtataccctcctgatatatgttactgtaatttccagggaatgcataattgcattgtgagtctgatttcaaggtacacttgctatatgttctttgtttgcaacaatcttttcagtgttggagccttaactcatattatattttttttttcataattattctgaaacagcaaatgtagaaactgtggcaagaaatcagtggatttacctttctttggagaggtgtctatcctctcgcttgttgtattgtttctctgtgcagcatttgcaattttctgggctgctaatcgaagagcttcttactcatgggttggccaagatgttcttgtaagttctgtgtactaatatgattccactacccccaattatttaattatctttatttttttccagagggagttcggacatgtggtttgttcccacaaggtctaaggctctcctggaaacctacatagcgtttgctataatttctgttctcccaatattataggattaggcgaggagcatggtttcaaaaaattaatgacttctgggttgtgttttagatgatagattataatctcttatttatacaacctatatttcttgttataaaatgtattttatttagatacttattcgtgtttgtttcctctggcagggaatttgcttgatgataacagtcttgcaaattgctcgcttaccgaatatcaaggtatttgtttttgcttttttgtgtaattaactactaccccttgtcttctaccctttcttttctccttatattcactacacatctcaggttgctactgtactactttgctgtgcatttgtctacgacatcttttgggttttcgtatcaccagtaatattccacgagagtgttatgattgcggtatgtttttaagatcaatttgtttgtatattttcttaagtctttttattcatctttactttgttgcaaaactgaaatggtggacagtattgaaggaaaaaggaaagaggaattgggtttaatggtttgcaattgtcatctcttgactgctttttgttggcgagaagtctaacaaagactgaatgctgagtaaatcattttgggacaatctcaatagtcttatatataactagtttatgtttagaagttagaaccatagaatcaaatggactaaattgttgttgattactgcatacgttatttggtttgcaatagtttccatgttgactggactacttcgatgtaggattttgagatgtgcatatgcaaattttagtttatttaggttcatgtatgctcatttatctggcccacatcagaatatctcctactaattatgccatagtttgtgtttaacatgtcagataataatatcatctgcatttttatgcttgtaggttgcccgtggtgataatagtggtggagaagccattcccatgcttttgagaattccccgaatttttgacccttggggtggttatgatatgattggttttggggacattctctttcctggcttgcttgtttcatttgcttttcggtagtgaatttatctctattaact

SEQ ID NO: 44284 - DNA, 4571 bp, Cannabis sativa
agttttatttagggcataaacccccacacgatccactatagcgacggtttaaaaccgtcggctatactataggccatggtttaaaagcgtcgactatagtatagcagacggttttaaaccgtggcctatagtatcgactatagctgacggtttaaaatcgtcgggaactcttttataataacatctttccactgtcgcctattctacccagtattcgtgatgcttgtataagcaacagttttatatactgtcgggaattctttacctgacgttgtaaaatgtcgagaattttgggttttttaatagtgaaagtctaaaaaattacatcgtctccaagccatgtcttcggagtatgtagttggaggaaccaagctgaattgtgtctaccggagaaatactccctcaggtacttgttcccaatttggcggagaacccaactatgaaatgtcgagagaaggtttcgatcaacaactataagtgggtccacattcacatgtgtcttcgatgttgtggacttcttcttcattttagtgtattcatcgaaccacttaggttgttttctctttctctagttctccactagttcttgagctatctgtaacacctttatctcagaatcctgagtatacctaatgttggtgaccttcgtgttgtcaggtgtacaaaacatatcatcatcatccagtctatagtcatttgggagaatgatttctttttccggtgactgaggctcttcttgtggttatggctgtggctatggttgtgtatctagtgtcggccttccaatcttgcaggagtctcattatggttttcaaatgacccataatctttctctgtcgtttttacagagcgttttggccttcccccaaagtaattttctccctctccacagtctccaaccttgccgaaatggcatagtatactagttcaggagccttgaggttctgggaatagatgctgacaggccaagaggaggatcctctaatggtggagatggtgcaggtggtgtactgtctctaaatattcaggcttcatgggcctgctcttctaatgttgaggcaagcttctgagcttggctgcgcagagcatcgtgagttggttgtccatcgtcgcccaacactaattcctccaagtcaacaaatattggcctctcattgctggtgatagtcctcacaaactcttcctcatttttttagggacataacataaattaaactatcaagtgaaaataaaaatcaatgtcttattgtacggaaattagaataatatatatgactgcaaagcgtaaaaaaacttacattttttgaaaacaatcttataacttcatccttgccgagtgtggtcttctccttactctctcagttagccattcttggaaagtgatgtgatttcctcactgcatattcattgcccaactccaagatggcctcataggcctaatactgcaacgctgcaatatagctatatgatgagtgttttgcctccttttgagaaactcccttctcaatcttcttatgcatccgattcttaacctctaaaaaatctttgttgcatgtttccatcaacttgttgaaggagatctctcctcacggatactcataaaagaattcgaggttatcaaccattctcacgacaaatggaagaacaacattcttctcctccttaccataacaaacaaggccatcccctacttgtacacatcaccagcttttgtgtaactctcgaaaactttgtgcacttggccaaggctaatggatgaatcaccattgaagtactcaacaatcgactgtttcgaatttcctttccattaaatttcgttctatgtaggcccgggtaaccagttcaaccccgtcaccaatgcaaactcgacctgactgaatctgcatctcttctagctttcaaaaaaaagtgtacctcgtccgacttctcagatttgatcttgtgcatgaataactgatggatcaaagccttggaaaaatttattggattcctctcgaagatttatttaaaaggagattcatttactttatcccataattggaattggtcaaattttaccttgatcttcggatagtaataacttccaccacaccaagtgacacagcctgtgtaatgctatgagactggaattataaggcgtggcaatcgtgtattttagaaaaatgacacaagggaaaatacaagttagaaatccttctgcacactatcagaccaatattggacctctatcaggcctgtatcggaccaaactcaaaaaccaaatttaataataaaaaaaaagctattacagatcgagagggcatttgaccccatcggacatagtatcggacaggtagatctcataaatcacgaaaagcgtcgcactccatcagacacactatcgtacaaactaatctcactaaacacaaaaagcatcggacaagcatattagatactatcagacctaacacaaagaggtaatgtcggaccatcagaccaaaccaattggactagtatcggactctatcgaacctttatcttcaacctagaatttttctatcaaacccacacccataggacctacgtcgatcctccatcagacacaatcgggcataaacactatctcacggtttaaacagaggacccgaaaaaatcgtaaatctaatcaaacatacacatatcacagatcaggcatcacaaaactaaaatatactctaaatcaatgaattgtatttagagatgttgaaacatgcctaatcgcaatagtctcccataatgagggcgtaattacagaaatctaatagataaataccctttccaatgcgatacgcaagaagatttgattccccaatatcatttggaatattacatcgttctgtcttcagtgtatgtggatcactttattctatcggctgaataatcatcatcaccatatggacccaacctgtctcgtgcccttccggaaccgcaatagtcacatatttttggactagctacaatcatatattgctatcagtcaacacagaatatgaaatctcacacatgagggatcaacacagctaaccctagctacctctcactatgccaactgcatgtacgtacaaacccttgtaccatcgataaatattgccatgttggcctatatatattggtcctcatgagctatatatacataacaaacacgaggaaagtatattagcaatacgctatatatttctctaagtattattcattgcataaataatatttagacacattggttttaattttagtttggtccgacagtgtttacatgaggagaaggagagagagaatgcagccaaggatgacttgccggcattattttctgtattatacataattttgtatggtgttgctggtgggttgtccttggctacatttcactcttcactcttaatgtaagccatgtgacctatatatatacatatttatatatatatatatctttaatttgttgtacgaaggcaacctatatatgaattccagtcccgatgggcattttattagcggtattcgtatctccattccatatagtacgcacacaattgtataaaacatattttcattatcttattttagtatagtacgtactgtgaccatgaaaaatccaaaactcaaataatgaatatatccatatcaatctcttatttattactttatttttcaaaattaacattcaatgcaaagatcttcatgtatatcatgacatacatattcacattcggttctattgttttcagttttgtttgcccttgcagtgtttttttatctttgtagatcgattttctgtgatcaaattgtattttgaccttatattatcctgtattaatcagacgaagtataaacacagaaacagaaagcaaccaaaccaatagtacataaaaaaagataataatcgtcataataataaaaacaaaatgtataaatatgtatatatatacattcttgtccatagttatatggagaatggtactctatactccagatatggaaaagaaagttgttccaattccagccctaagcctctactaattctcagctggatctatttttggaacatttctgttaaagggccttgtttgagaccatgtgaatctcccaattagcaatttgctactttgttcaatgaaaacaatacaatttccatttctatattcagcaacagaggaaagaaagaaaacaataaatggttacaatctcacactacccttaacaactcagcttcatcacaaagtccttcagccagtgtggtctgtggtctgacgctctctcatttggctcgagtgtctcctagctagttgtaattttctctcctacttcaccatcagctatagagtgcagccacttcccttttttttttctttgacatggttcttccagctgagtcataccattatcccaattgaatatccccttttgtattactttaggatccaattaagtatggcctatcacttgggctacagaacgtttccaaaatcgttcgatgttgcatccactacaacaaatattcgaattcgcgactatcttggaaatgatttttttcagggaccgtcgctataaaaattaag

SEQ ID NO: 44285 - DNA, 3268 bp, Cannabis sativa
aaagtctcctttatataataattaaggtggtcctaataagttgtttgtggaaaatcaccctgatagttctccgaatcgaagagaatgattctaaacaaagaaaatagattatcacctgtcaatcaaacaatttttcttgaatacactgagggaccattcaatttcagtcccacgatcataaaaagaatagatagaagctttaagtgtcccaaataagaatggaaaagatgttcaccagttgctttcattaacttttaatgcttttggttatcacaaaaaacgtttaatgctttttatgaattgccttaggtggcctaataatcataaattagctagtttcatttttttttttctcaactgtgaaagcactcaaatttatgaatatattaatttatttcattatttaattacgtttgaaatattttcttatgataccccattgactattaattaattgtatgaagctatatcatcagcttccaactggctcaaatagtccaaatctcctgtaatgtgtgctacagttcacgtaagttaatatttattaggcccgaagctaaaagcaatgagattttgtcaggaaaaaaaaaagcaatgagataaacctgtcaaaatttttattttaagctttttaatgtttaaaagaaaaaaccgaaaataaatgctatttgtagtaatgaatctttcgctccttcattaaatggtaattatttttttttttactttctaaccaggtagatattaaaaaatacatttcataccatgccacctggattatttaccaaaatgatattgtgtaaaggtgtccttatggtgaggtcgaaaccaccgttgcatgcacctttatttagatattaaaaaagtctcttctttttttttttggtaatttttagttgggaagacttcaacaattgacttttgtcgctttttaggaaaaaatatatatattattacattttttttttgtcggttctctacctttgctcttttctttttatacatatacaattaaatactgaagtcaataatataataataaaagtaagttaaagaactcctagtttagttagttatgccaataagactcccaattgcaaaacataccttaaaaagagagaaaaatcatcgaagacatcaataccaagatccgaaagacaaggtctatcccattttgctttaaaagaggtaaaacaaactcttttgtgctaccaaaggctcttcttctctctctagatctctctctcctagcattggcaggtaccaaatgaaattcaatatttcagcattattcttgatttcactgtttaatttactcgtactggtactggaagctacctcttcctcaaagtacgaagataagctatggaactaccaatcaatccaacaacaaaacccagctttcaacttccatcgaaatttgttatcaatcggtgcaacttcaaacatcacaagagtacgtaggttccactctcacgaataaatatatattgtcacatttagaatatattgctacttttttgtggaaaatggtcatcatattttatcatcaataatcatgtaataatgtaataataattgagtgatgttatgtaattgattagattgggcgagtgttttacccaattgggtatggagcagatccaactggggttgaagatagtaccgaggcgataatgaaggcagtggaggatgcatttcatgttcataataatggcctggaattgttgcctggaatcaatgacttgggaggtgtggttattgattttcaaggtggaaactacaagataagccaacccataaggtttccttcaggtggaggcaatgttgtggtaagtgttctctgttatattcttctaaaagtttgtgctttaaaatttcatacgattctcaatttaaacgtaattaattaagcttttaatttacaaaaaaatatgttgatttaataatatcattcatcgtcagccaacaattatagtttccccttacttttttgtcctcgaaattggaacttgtcaccattcttctgtaataattattccccggagaaatgttatcaaaaaaaaaaaaaaaaaaaatattattccccggagaaagaaaacggtaagtaaaatgtatggcagtatgggaaaaaaaagtgtagaaagtaaaggtaagaaaatggtacatttattttttaattttttatgatatttttttttggttgcatcgcatgtgtatttatttatagtttagatacatattaattatatatcattcattatattatatattcaattttaaaattattctattattaatataattatttatttaacttaaaaaaaattatcattttaacaacactaacgcaagaagacacaagaagacaaagagaaaaaaagaattaacaatataaagttgtaacaaaaaattttattagaaagataatgtagtaatacaaaaagataaatcaacttgtcaaaactaagtaaaaaaaatcataatacaaaaacatattggggatgttgttttgcatattacaattaggtcattgctttgttatttttttgctgctttgtaattatcttcttgttgttttatagttgttatcatgttgtttgttaagttgttttagggttgttttatatttgtttttaagttatattttttttattttactgaaatacaatatttttttaattttgaaacattaacacagtatttttgaaaatttaatacagtgaaaatatataaaaacaaaatgtgacaataaaaatgtaaaagtgacgaaagagtggatacttttgtaagatcccttttaaatagctattatttcacaaaaaacaacaaaaatatggttgtacgaaattttaaatatttttacgttttttttatttacagaaaatacggtctttttatgttgtactcttgttaatttgttgttgattttttgttaactgtatgttattttttgttgttgtttggatgttatttttttgttacttttatataatttttttgttatttttgtgttgtttttatagaatatgtataaatataaaaaaaaaaaattaaaacataaaaatatatatttttttaaaaaataacattttatgtaactatcctatttatataacctatggggctagtggcctaatttcttctccctcttcttctttttttttttttctaaaaataatagatatatcctttctattttcacacctttttttaataaatctatttttagccccctaactcaagtttcttttttttttttttgcattct

SEQ ID NO: 44286 - DNA, 2664 bp, Cannabis sativa
ttaagtgtataaaaatcaaaacataagggggtttcgccgcaaattgctcaaaaaattaatagaggtgacacgggatacagcagacaaaaacattcaattgaacacaaggatcgacttcatatatttatatatatattataattatatgatatgatattctattgtaagtaataagatgatatattattgtactgtaatgtgcagtctgcgatcaatatagatgcatggcacttacgaagcccggtgtcatattatatatttaatatatatatagcgacacatttttttttttggaaaatacttattattattattattattaaacaaatagacatttgtttacaataacaaagtatataagtgaagagatagtctctaaccaactacaagtctcatccacctctaatgcgtattttctaattattattctaacacacaaccttgatttaaaaatatatacatcattatcatatatatttagttaaatgggatatagagtgaaaagccacacaaaagttactattgatcagataccataataattatctatttttgaagttgtattacatatgataaatagcaagatcatatatcattttggtttgttgccatttactacagattatcaaaaaaagctatttacttattacctaaaacaaaattaacttaatttttgtcaaattttcaagaccattttacttttgcaaattgacataattatgttccttaaactaaaattagaaaaaatattaaacaagtgctctatgagatatttgaaaaagaaaatttttaatttaaaatgagttaattaaaattttattaaatgtgtaatacaaaaaatatgaaatcaccttataataaaatatataattaataattgaccattttttttttgagcaaaattaattgaccaattaaactttacaaaaataaaataataattgaccaattaaaagagagagaattccctatccaagagagagaattaataacaatttatcgacaacaataaaaatttaagaaatcccattataaaatagatgtcaataataataataactgagtttcttaaacattaaaatatgactgtgtcggtgttaataagatccataaaaaatatttatttaacaaatttctgataaaaatatacatttacataccaaaaataaaagctcaaaaatatccaatattataatagtttttctttttttttttgagccaacagctaatttaaatctaaaactcgtccacccgcgattattgtaatatccggatttttttttaaagaatgttatatactattgaaacaaaatccaattacaccacttactaaaaaaaaccaaaaaaactatggtaatggtggggcaaggcaaattaattctatctacctgttttggaagttcaacttggtgatgcataccgcaaacatgagggcgaaaaaggcaccgaaagcaaccaaaatagccgctgtgggccccataaaattcgggtcatacccgaaatgattttcaacataccatttgacagtcgggtcgggtgtggtccctgctacctttatagtctcttctatgtccccatattgtgtcacaatcaatccatatactgtccatgccaaggggcaaatgtagtaataccatctccaccacttgggaatcatctgaattttcataacaattcatttattgtctaatttttaacttgattgaaccatattattcgtgtttatatgaatatatatgataattaaagacttactgatttgggaatgaagaagcctgaaaataaagtgaagaatgcataaaatgctgatgcaaaaatggcagcgacttcgtgatttggtgtgattgatacggtcatcattccatagtaggtgaagtagagaaaggagaagaaagagatgaagaagaaccagaggaactttggtagtgaccattggaagctcaccattgcatacactataacagaataatatgtagtttgaacaaatatgtatggtatctcaacaatcacctgcattcaacaaatgcttacagttacatgttatattaataaacttttcctgctacatcattttttttattggggagggatgttctcactgaaagagtgtttgttatggggcttcgggaccatggcaggggagggtcggcactcggctaagacgagccaggcctatgcctcgggtcaagcccccttctcccaaaaaaattcttattaaaatatgtataatttttattttttttttataaattttaaaaaatcatatattcttatacacgagggccaacgaattaactttttttcttctcttaagatccataaaatctgtaaaatcagtccaatgatataatttaagtgcaggatttatgtttgtgtagggtccaaccttaagtttattttggaggtataaatgatcgttttagtagattctttatctgttttgatatttagaaaaaaaatttagtctaatttttttttttttatgattaagtaagttgtaactatttaagatcacttataaatttttaaaaaatttcgaataatttacaatgttaaaaataagatttaaatagttactatagtcgcgcgtccaacaaaataggtaattcttaattttgttattgtaaattattcagaactttttgaaaatttacacgtgatcct

SEQ ID NO: 44287 - DNA, 1963 bp, Cannabis sativa
atcttgagaggatttgaaagagaagaccaagaacatagaatctttggtggtaagtttgatttccactccccaatctttttcagagatgccccaaactcttcctaaaattgttttaagaagagggcgattcatggggcggttggagcagaggcgtcccatagcacacagtaaggccacatctgaacctccattgggattaatctcccacccatcctcgtctagcaccgtgagattcgaagtacgagcaaggagatcttccatggtagagtccggcgtttctggcatagcttcaagaaggctcttctcgagagagagcatatgagtgtgtccttagaaattttaatagcaattattaaattaaaaattacatttaattttatttattttgtgttattatacatattttttttatgtatttttatagcttatgagttattcttaagaatttttaattttattttgcatagtactttgtacatatagaactattaacaatttatcatttatatttataattttaattttaattatttttatgtaaatgaatcgatcctcatgggaaaattacgagacccatcccaatagagaatatataggaatgggggtagagccaggaaaatatatactaattaaaggtggaaggggagcactcaccccaaaagaaaagaaggtttatgtatatttttttattttcaacatttacttaattatgaaattaattgattgtcaatcaaattaaataatttcattttattgaaaatccctaaacaatttattggtaaatagcaatacagtatttggtgtattaataattgtttaagggtttgaataaaatgaaattattagtgagttatttaattgattgacaatgaactaatttcataattaagtaaatgttgaaaattaaaaatatataataggctcaatggatgcatggtgtcaataacgtaataagattcattaatttggggcctaatgaatgatgagtatagtcagagtaatatgtgtatgtacacatacatacatgtatgtacatatatgtatataaatataaatatgagtgattcttgcttagaaggtaatataagagggtgaaaggaaaagaaaggatatatatagcataaacaaacgcaccgacttgcaataataattaaagaaaaggaaagtaaagtaaaagaaagtaagaaaaggccatgcatgatgtagcttgccccactacaactctcttttgcaaagaacttgttgggtgaagctttcatgcaccacaaccatcatgcttgcgtttaaaagttgtgaatggaaacaccccaataattttttatatatactacctagctagctaataagagagaaagagagagatgttatataaggccccacaaatagatgaaatgaagcactaattgggggcagtactgagatgtaacatagccaaaaattgactaggtggttggggttaaggggcaaaaacggttggaaggccttgccggctatcttgtggcacaaagttaaggcactagggccccctcccatctaatatattatatatactatatagtagtgaggtttttttttaataaataatgaaatgttattaatcgtaatcaactaaaataatagtctgcaatttaatcgggatatctctctgttagagacacgactagaattagaattagaaaaacgagtcaaatcatcagtcccctaattctcagatcatttgacaaaaaaattaaaataaaatcagatgaaaaaaattacaacatcacaagtaaccttaagaacccttatattttgtttcatccaccgctctgaaaacaaaacagtagaaactattgcagtaaatttattcaacctcgtagcttgagcactcaactattgtgtaaggtacgtaattgcactactaacaactccttcagtcccaaagaacttgttattccccaccactaataacgatttgatggtg

SEQ ID NO: 44288 - DNA, 1760 bp, Cannabis sativa
atgcagagtatttatagagatggtagtagaaatcttacgtgttcattttacctactctggtctgggttgtatctacctctagctgcctctccttatcctatgtattatgtggcttactaagtattgtaatatggtatctgttgagtaaatatggtatctgttgagtaaaatcaccgcaagcaccccccaaaaaaaaaggttttcctcagttcttttggcatgtttgtttgatgttgtttatgttatcctgataaatttgtaggtgatgcccgagaaattcttgtttggcagaagaccacctgttccactatgcaacaagaagatcaatataattgttggcgagccaatagattttgatcttccaaatatgaaaaggacagcgatttcaacgactcgtaatttttcacttccattgttagggtggccaaacactcctgatggtttagatgagccagcccaaaggagtctctactctacaatttcagagactattcgaacttccatggagagcttaaggattttgcgttaaaattccttatgttaaaactcaaggatctgtgtagaagcaaattataagggtcaacaaagtagatgtagtgagcagtaggtaactccttatatatcattccttttatggaaatgaggaacgcaaagatgagaagcttattcacttatcggatcctaaaaatgaagctggaaataaagtcctctctccatgtctcttcatccattttttcttgatcaaattaacaagtgaaatagtacgacattaaataaatgagttgggttcacttgtgtaattccatttcaatatataggttgcctcgtggtataaatataatcttatcagggttcttattcagcataaacaaaataaaaaatcgaaaattattaggtataatcgtgttaaattaatataaatgtcaaattgaatagtcgtatcacaagtcattagcttgaattttggagacaccacttagattgatcaacatataattggaggagaaatttcatcactatgtcctatttcatttggagaaattatagtaaatgactctaaattatactatgtgtaagtaaatatttttattttaaaatttgtagagaaatgattttttcacactatttattatttatattattttttgccataattttttttagaattaaaatcaaattattaaaagaacgtggtatatttatattagttttgttattttttttttattttaaagtgatgtagattttttaattttttatgggttgttgtaggttgatgatatatagattttgttgtacaatatatttcaattttattgtatgatatattattactagtaaataactcgtgttttgagacagatgtttaaatttttttatattatatgtatgacataaattatatattttatttgatgataactaagtaataaaattacattaaattttaattttattaatttttcatataatttttttaaaaaaaaatatgagaagttagatgtaaaatcgggtcaatctgacccattgatttagaatctaagtcttatatgtgtcctgtttaagacaataacagagtatatactgacaaaattaaaaaaaaaaaaaaattacagttttataaatatttggtacttatgtcactaaaaatattattggatttatgctacttacaaatttaaaatattaggtatttatatcgctatttatttaaatatcttattgtgattctctcttactgatgaaataagttatccatt

SEQ ID NO: 44289 - DNA, 1318 bp, Cannabis sativa
tcatcagctcgtcaatctagtccatcatcagctcgtcaaaccagtccatctccgagtttacgacatgctactccatcacgaagaccatctactcccccaagtaaaccctcgactcctgtcccaagatctttaaccccaaccccaactcctcgtagaatgagcactggttctggtagcgtgccctcatcaggggtgagaggagtctcccctgtaaagagcagtcgggggaactctgcatctcctaaaataagagcatggcaaaccaatattcctgggttctcctctgatgcacctccaaacctacgtacttctcttgctgatcgacctgcaagttatgtaaggggttcctcaccagcaacaagaaatggaagggactcttcctctaattacagaaggcaatcaatgtcaccaactgcgactagaagtgttagctcctctcatagtcatgagcgggatccatttagctctcaaagtagaggttctattgcttcttctggtgatgatgatgttgactctatacagtccatgcatgtgggtagtttagatcgatcaacaacaagaagagttgctaatttctcgaataatagaggtccttcccttgccaaaaagccaaccaaaatagcatctccatcgtctgctcctaaaagatcttttgattctgctcttcgacaaatggtaattcttaaaaagttgacacttttaagtttatgtgtctgtccttttgattatgtgtttccttgttatttctttagctggaggatgtttgttatgttgggcttatttattatagtgatagaagctattgaatgctatttatggggtttgttgcagattgaggggaaatgtcaaatttaatgtttgatagttttgatgttggttagctctgtttaaatcgacaacattcttttttacatatacatttgcaatctgtcaaaatcatttgaactcatttatcaatttttatcagtgataaattcattgtttgaggtcattttgagtgagtgatcaagtcattttagggtttgtttttctttactctacatggaccgcttgccaacattttgtgaatcttaatgcttctgtactactagtatagcacgtgctgactagaagtgccgaatcttttggatccaattaaacctttgagaagtgctttcatgaatcttgtagggttttttttccccttgctctctctctctctctctctgggctagttttgtggtggtttattttgcttcaaatttcaacgttctttgtgattctgcgctgttcatttgacatgtatgtttaagtcacaccttctcattatgaagttacc

SEQ ID NO: 44290 - DNA, 3156 bp, Cannabis sativa
ccactcaaccctatcgtaagccttgctcatgtccaatttgagagccatatatcatttcttcccttgacttttccttttgagatagtgcaaaacctcaaaggaaacaagaatattatccgatattaaccgactgggaataaaagcgctttggaaagacaaaatgatttgatcaaggagccctttcaatctattggcaagaaccttagaaacaattttatacaagacatgcaaagcgcaatcggacggaggtcccccatcacaatcggattcttcttcttaggaatgaggacaagattcgtatcattgaaaccaggtaacatctcccccgaagcaaaaaaaatctgcacagtagccaccacatctgccccaacaatggcccaacttttttggtagaaagctggagtcattccatccggacctagggatttatcaggattcatatcaaacaacgctgctttaacttcttcagtagaaaccgggttgagatgtaacattattaaaatcaccaactagacaccaaggcagagaataacgatctttgatgctcctcataaggttccaagtattagctctaagactccttttgggttcaccataaatacaagtcaaccgccattcaagcatgcccggaacacgaacaataacatcaatatgatgaacagaaaaacccaccacttcggcttcattactatccctccaaaaaaacgcaagaccccctccccttccctaacagtccaccgtgaacacaccatcaaagttaatagttgagcggatacgttctactctctccttactacacatcgtttcacaaaggaacacaaacttgggcttcttttgagatatcatctccttaaggaattgaagagtcaatgggttcccaagcccatgacaattccagcttaaacaactcataatgactggcgggtcctcaaagtaaggcccgcctgtgacaagttttttgaagctccaacagcactttcattatcctctataatcatagcatttcccgcctaggatacatctccatatgcttctgagcccatttttaatccaagcccattagtcaaatgtatgttatggactactatgtagcccacgtgtttgatccaccatcacctcatcttcactactaattgtcccatcttcattaacacccacccgcctcctttttgaatcaataataacacattcctcattattaggtgtgatactcttttgatccaaatcagccacctcatcaattaaccccttgccagctttttgtccactagctgcaacatttgaatacggctccaaatcatgagcaatattctttccttttgtcattatagctcaatcattctcatgcaataaagtaccttgatttcctccaccaataccattaaaggatcttctaaattaggaaacttcggagtcagcccctgagctttccaaccagcgcctgagttcatcagagacgacgaagaaactacctctggctttctcagccactgcgagccatagggaagattcatctttctaggcaccgctttcatccattctccataaggcttatcaatctgagccatcagtgtaataaacaatttggaacaaaaccgatcagtatggcctattattccacaaatgaaacaaaatggaggaacacgttcatatttgaaacaaacccaaacccaatcactatctttctttcttagtccccattttcgtttaagagggacttcgatgtccactgacactctaacccggaggtaatccctccaaacaccaacaaaattcttcgggtttgtctccacaaaagtaccaatataatttccaacagctctaagaacaacatccgacataagaccaggcactatatcatgaacctgaacccacatatccagtttatttagcttgatggctcgtggattatctctttccttcagcctttgaaaaatgagttattgtcgattacacgtccacggactgccgtcgatcaccctttgtatgtccacctcgtgataaaattgaaataaaaatagattgctttccaattgcttaacatacatacccattcccggcttccatagaaatgctagttgatgttgaacaaaatcaagatccataactctgccagataagaattttccaacaaggcaccatcgaccatcaaaggtacattcagtcacaacctcctcccctatctcaaaaccaccctgctcttcttcatccaacgtcagattagcacaaacatcttcaatcgatggacttactgaactactggctgccgtattcaccgcaaaaacagaaaacactagatagcaaagattaacccaaaagatcaaacacacatcaccatgtcaaaagacaagacgtaactttaagtattcttataattttaagcagtttaagtggtttaatctttcattaattctttttaccatatgtaaatatattaaattttattaattttattttaaaaatacataataattatttttataattaacaagaacactataaaaatattttagaagaattttatttatattttgtaatttttaaaattttttttaataccgtaatctatactgtagttgttttgtgtttttttatagagttttttttttttgaaatacaaatatcagtaaccaaagattgacaagagaaaacagttacaagtgatcttcacgatgaggaactgagattgttccaaaccatctctttgtctgttccaagagctgctcttgcaagattgtgggcaatggtattctctgttcttgggataaaaccaattgaggcacctggaaaagatgacaaagaggaagcaatagtggcaataaaacctgatagagtcgatcgatcaatggaatgcttttgaatcgacgaaccagagtctggcaatcagagacaatagaacttaggggaaaccgaactacctgacaccaaagcaaggcacagttgagagcttcggcttcaggaaattttggtgggaggcctgaagtcaatggaacagaaaaaccagcaacaatttgaccctgaatataagtgacaacagctccatatccatgttttgtagaggtgggagaaagagctgcctccacactaagctgaaactaggggtgttcataaaatagtcgatccaatccaatccgcacgatccaatccacaaaatgc

SEQ ID NO: 44291 - DNA, 976 bp, Cannabis sativa
  modified_base (31)..(36): a, c, t, g, unknown or other
ttaaaaaaaaaaaaaaattctttcaaaaaannnnnnaaaaaaaaaagaaaaacaaataatgttaatatataattgaatttttgacattgcagatctgatatatgtgtatataatgtacgaacctagtgagtcgccaacatgaaatggagtttctgcagtccaagcttgaagatctgaagtaagatcccaaccagaagagccgccgactgtgatgtttgcagcggagacattacacctaaagaaaaccgatccgattacagccaccatgacaattacgttcttcacaccccaatctgttctcaaatatctctccatatcgttcgatcgatctctgtacgtagtctgttctgcatacatacatatatacaccaaaaagtacattgaaattctttgattgatccaacactaaagtatgtacgaattcactaataaaataacaatgtgtaatatttacatttatatatatatatacctgacgatatccaaagctaatagctagatgaaaatggttcaatatcggagatgataatggtgtagcagaaacgaccgtacgaagtaacaccagtagaagatggtgatattagaatgaatgtttatagatgaaatgaaatgaattaatgagctatctcatcactacacacttgtgtatatatacacatacagagtgagcggttaggcgcgatagtattcttctgtcgaaacgcaatatgtatgaggcgcgtgcaattcacagcttgaatcgtctcgtactttcgcattgggtcaatcgcgcgcgagacaactgccacctcagctttaacggctttttaagattcatttatttataaaatgggcttctgggactatgagtatgagtatgatccatatgctcgtctcatccactctaaagtaaatagcttcttattattttcatactttttttctctaacaaccaaaaaaaaaaaagaaagtaatcttaagttgttttagtattatg

SEQ ID NO: 44292 - DNA, 2299 bp, Cannabis sativa
tggtacgtacctcaggataattgtcaccatcaatcttttgaagttgagtgatcagatccctggcagatttggtaaaacttttaagtccctgtgtcattaacttaatggttcatatttctattatgagaagtgaaaaacaagagctgaaacaaaggctttttaacaatgccattcatttatacattctaaaattataaccatatgatcgaatcaatatcttaatttaacattctcacataccacgccttgcacatccaatatggttgtgctttgatcaatgtgcttctttgctgcaattgaacaagctgggaacttagcaccaaatgccctctcaaactctcgaacatggtacttcacatagcggtccattgtagttacttgcatcaacttggtagcatctacttttcccagtctctcaatgtacacaggccttccatccttatcaactccatgatatccttggggatagtattccaagacctcactgagttccttgaagtcaaagtccttgtgcaaagaacaaatagagaggtaaattttcaaaagccaatgctatattgaacagtatatatcataacatatacaatcataaaacaatacctccataacagtgtcagcaccaaaatcctttctccactgaagcatgtcagaccacatttgctttgctttctcaacctcaaatttcctggctttcaagaacctgcagattgagagagtaagctaaaatgtaaatccattttcaaaactacaaaagtgatagtgatcaaactgaaatgaaattcaacctaagcaaagtatggtaatcatcatgcttagcaggcaatagctcctccaagataagtgcttgacggaaggcatcaacagcttgtacctcgcctgcatcatgctcatcttctatttcaacagacatgactttgctacttcttcggccctttctagtcaaggaattcctgaacttgcttgaggcattaatagctttttgtttcaaagacccaattctagtcttcctctcatcctcaaagttctcaaaatcaggaactgtcaaattaaaacacaatatcagagatcttaacctcaaccatatcattgtcacccttactaatcttaaaattcaactttcactaacacaaattacagagttttgagataacaacctgacaatatgcatgattatatcataaattagttattattggttattaatgtaaatgatataaagtgtgagatttttcaaccaaaatatttttattttgtgctgaatcattggaattgtttcatcaaaattaatagattttgcaccaaattggtaaaaaaaaaaaaagtacaccaaaatgatgcaaccgttggagattgtcttacatatcaaatttcactaacacaaagtactgagttttgagataaaaacctgtttttggagacaaaggcccagacatggttttttcttttactctctgagaattgtttcgttataggtttaaaagagtgagccaaccagggccagaagtatcaaacactcatatcacaagcgccagaaacgaacgcccttaaaaatttgcctgcacataacattataaacacaatgacatttaatcaaacactacacattcacaaatatcaattggcaataagaagagccaaatgtatgaagagatagttgaagattacagaaaatgggaaaatgggcaatgataattagaaaaacccaaaagatagaagaagaaaaagaaggttttgaaaatctacctagtgtgtatgaaatgggaggagtttggggaaagagagaagaagtaatgtaagaaagtgggttattattgtattgatggaggttagaaaatggcggagagacagtaatgattgatgatgaggaggagaagaagaagactatttttgggggttgacaagttaggcatatccccatttttttttttttgttttttttttttttgacaaggcatatccccatttttgaagttcgttaatttctgtaactgtaatcattctaaagaattgaaaggccactccgctgaaatcgttataaacacttttgtcagttaatttctttcgcgccaaaacttctcttccttttgtctttttgtctttatattcatccaaatataaatgtaggaaagcttttttgggagggagcacttacgtaggagcgttttctatttttatattttacaaaattatatctcaattttttttgggtaaataccattttggatcctctgttttacaaaagttaccaattggaccctgtgttttgtttaatgacaaaatggaccctgtattttttaaa

SEQ ID NO: 44293 - DNA, 1861 bp, Cannabis sativa
ttaatttctaaatttagggccattttacatctcaacttttttttttttttttttttatatagaagaaaaaaacttgagttaggggtccaatccaatgtttatatgatttatgtacaaatacgacatgtcgtacaattgatgatatgaacgaaggtatgtcgtttcacagaaacgttgatactttcaacttctccttcttcaccagtttgcggccccaaactctttctcactctctcggtaaacagccattgcagttctcagaatcttgaatcgttaccttacctggatttacattgtcacattcaagcttcgaatttataaatcttttttctcaaatttcttatttcaaactccaaattattttagatcggtatcttcatctttgtctttgttcgttgtgaattgaaaatcaaagaaagtgttgatgaggattcgatgcggggttttatgctctctacgccataacgccaatacccagttcagaaatctcgctatagaagccaaagacccggactttacccaagttgcaatggaagtttctaagattactcgaatgagacccaggtgggagcagactattctctccgactatccttcctttgatttctctgaccctaggttcttccacgagcttttgaagcaccaaaacaacgcttttctttcgcttcgttttttcacatgggtaagctctaattctgggttttcacctgattcaatttcttgtaatgtgcttttcgattcattggtagaagctaaggcatgtaaatctgcgaaaatgtttcttaagcttactggtttcactcccgaaccggcttcattgggatgttattttaggtgtctttttgaaaatgggttggttgaggaagccatggacgtttttgctaagttgaaaagtgatggagtgtgtttgtcgactgagacttggaatttggctttggtttgttgccttagaattaagaggactgatcttttttggcaattgtaccaagaaatgattgagtgtggtgttagtggggatgtgaagactgttgagtatctcattcatgctttctgtgatgagaatcaaattttcaaggcttatgaactcgttaggcaggttttggaagatggtttggctcctaaaaatgcttcttttaataaattagtatctggattcagcaaagagaagaactacgaaagagtttctgagcttcttcatatgatgattgcaacaaatagtaacccagatgtttatacatatcaagaggtgatcaatggactttgcaagaatcgaaaagttcttgagggttttcgagtttttaatgacctcaagaatagagggtatgctccagatagggtaatgtatacaacaatcatacatggtctttgcactggaggttggattggagaagctaggaagctttggttcgagatgattcgaaagggttatcttccaaatgaatacacttacaactcaatgattcatggtttctgtagggttggtgaatttgggaaaggcagagagttgtacaaggagatgtgtgataaaggttttggtgataatgtggtaagttacaacataatgattgttttgctttgctcagaaggaagtgtaagtgaagctgatcaaatgtttaaagaaatggccaagaagggtatcattcctgatttgagtacttataattgtctaattaaaggcttttgtaaagaggggaagatagaggagagcattgaactattaaatcagctcatgtctcgtggtgtcgaaaaatcgtcttcctcttatactcctttaataaaaaagctttgtcaggtgggagacatgaatgcagcaaagatgcttttggatgagatgattaaggcgggtttggagccgaggatc

SEQ ID NO: 44294 - DNA, 1165 bp, Cannabis sativa
  modified_base (49)..(51): a, c, t, g, unknown or other
attatccacgtgtcatttttttactggtatatttaaattaatttttaannnaaaaataaaaatttaataacctaaaccaatcagggattgccacgtgacagtttacttgactcttaacacagtttagtacttacaaaagttctagaattataataggtattattaccgtaaaaaattatactaaagtatttatttgcaactgggagttaaatttatgtatttataccacaaattactcaatttagaatgctttatagtgttaaaaaacatggttcaaacattcaactgcaaagaaacaaaacacgtgtgcaacagagtgcttgaacatgttttcatatcaaattatttagaatttttaaaaaacgggtgagattcttactataaccataatgaagaccatcatataaaaaaagtaagttataatttctttaaataccaaaaagatagatgcccttattggtgtccctgctataatcatgccctatatatataaaatattatatagtgagagaggcatgtgtaatttgccagtttaatgtagcataacttgctaagcaaaattcgaaggcacctatttgctttagcaactttgcaattttagaaatgttaagggtatcatgtttgatcaacaattgaagatttccttgaatagttttgcaagcttgtcatttgcagaaaacagttgcgggatttcttcgacacgacagttcttcacgaaactattgtgcaaatacttgacaccttcaagagcataagaagtccccatctttgggtggatttcttaatgcctgacgatgctcatgtacgagagcttgatgcatcctccagcagtgacgaagcgggtatctcggattttaccaaatttgaccttcttatgttagagacaagagcggtgatatcgaggtatgtttactaaaccttgtccaagaacttaataaaaggatgatgatagttgtgtggcttttctttcttgttatttgaattgtcaaatacttttgttttgctctgattgacatgatttttgtgctctaaatctaattgagaattacctattccatgcatgggatgatgatcttgcaaagcatatggtgttttatttaaagtatttaagaaaaaaatctagcggccttcaattttcattagtattttcttttcaacattaaga

SEQ ID NO: 44295 - DNA, 1557 bp, Cannabis sativa
  modified_base (1254)..(1276): a, c, t, g, unknown or other
tacatcttaaatataagggattcgatattaaattgtaaaaaataatataatcaattcaatagtgccaataccatatacaagttgctatagagtaatttagtattgggatcccatgtatctttttaatttaatgactaataatactaaaatatcataccctatactaaattgcattactaagggcaactctagggtcttttatcattttcttaaaagagtaaagaattttatttataaaaaactatgaacatgaacttaagttggattggacccatgttcatcttttcccctcagaaggaaagtattgttaaaaaaaactgccacgtggcccacttacaagattaaacctaacttcacctctctctctctaattaaaaaaggaaaaagtgtttaattagggcagtacaaaaaagtacataattacaaaagagagccatgcatgcaaataataaagaaaacaaatcttgaaagtttggagaaaattttaaatcttaattattattaccttggaagatcacagccgtcgggttgccatcgccaccggcgaaaatcttcgttggtccgtccattttggcggcaacgaaatccggggtcgagaaagtggcagctctcgttgtaggagtcgagaatacgagtctcatcccaaacccatctcccatacgaataatcacacgacgacgtcgttttggaattattattattattggaaagaaaaaagatgaagaagcctcgatcgaaaggggttgtgagattaacgagccttgaaataacgaatgaagagattattaggatgaataaagctaagatataacgaacatctcgttttggaacaaagaatatttggagcttttgacgttgttgatcttgggaggagcttttcagatccattggaaaaggtctctattattaattcatcgttgttaattaaaacatccaagactctcttttatttggatatatatatatataatattaataaaaaaaatgttattataatatataaatcaatctaattataatgctatgatacgttattctttattctttatttatataattagtcaactttatcccttccatgttagtttcgcacgtcctcatcactaacccttttttataggagacatttacaaaatacaaactgtatttttttttttaattaaatagatagcaaaaattgtaatttgtttttagaagaatcctattataatgagccttgtgtacgtaaacctagatattattattattattatnnnnnnnnnnnnnnnnnnnnnnnttattattattattatttgcaaatggaaaaaatgcattgccaaacaaggaaggtatagcaaggctaggccaggtaatattttcacgtctaaataatttataataatccccttaaaaattaatctatgaagtactagaatattatatttataataatgttattaaaattctcaatatggtgcaatgtatattagagtattgcagttttaaatttgatcgtgattattttagtaattgtaagttatatataaagtgttatgcgataaatatgtagatacctta

SEQ ID NO: 44296 - DNA, 1774 bp, Cannabis sativa
aaaatatttatatatatgtcataattcttgaataaaaaataattcaaatataaaaagttttaaaattcaatttaagtacttttggtttggtgttaactctttaatttgattagcttataaaataaagcctaatttttactagaaatgaatcttcctcctaaagaaaatattgatacagcaaagttcaaaccaggaaaatcagttaagaaaataaagaaattttacagctcaaattaacatagcaaaataaagagagtagttgtataagtacattgttcttccatagttaaagagtctcaacagttcagtgaagcaatattgcattcttgacaaaataatttccatgaaggaatcacagactcatactattactaacagcaaaacactcatgaactagaccaatattaagcgctacaattgatcaaatagagcaatctatgaagggtgtgtcaaagggagcccatgatttcattggctcctataaagtatttttgagttttccaattctcatatatataatgtcttccaaagttggtaaagttcagcagatgaaatggtctataaccaaaataaaataaagttaaacttccatccccaaaattctccatactaaccaaaggatctatcagcttatataacaaatagtagtctaggggaatctaagctatggtaccagagaaactccttgagtaatttgaaattcagactgactgataagattaaaagttatgtatatttatgtcttttatctaaaaacactgagttttaatagtactgggttgctctccagttctataatcaaacagtaaaaaccgcaaacccaaatctctttccatttgatccttttaagtaaactccactaagtacacaaagtattagtctttaattgaacaatattaagtatgtttcatacaaccatttgatcagtcttaacaatgaattcaaatcgtagtgaaaatgacaagtttcataacaaaatcatctataaaaaaatttctccttttattttcttgtacaattatttcctatcaagtataaaatcaaaaaccaaaaatattagggaaaatttgctcaaatcgaagaacctgacattttgaatgttgcaactaatcttgatcctcgtccttcttcttgggcttgcggtacttctcctcgacgtgcttggccatgaagagagccgtgttggcgacctttttgatgttgggaacgttgtagttttgggcgatgtaaactccgcaacatgtccccattatgaaggagaagctactccttattatccccatccaaatcgtatcgtctacgataaggcctgagagcgagaattaaggagatgaagaagaaattagggtttatgatcggatgattctggaagactcttgtctgtcgttgttgagaatttgaaatagcgttgtttttttttaaaaaaaaaaaggaaatagcgttgttgttatgcttgtattttgtttaattgaatatttaaaaataggggtgttcatcgaaaagttcaaaccgtcagtactacaccgcaccgtaaaaaaattacggtttgaaattctttgcggtgcagtcgtagtttgattttttcttaaaccgcgcagtgcggtgcaatttgcagttttaaattgttaatatgctgttcaaactacaccacaccacacattataaaataccaatttttatatttattcaggtacaatatgtgaatttccaacccaaagcccactagttattgtattgttaaaacttaaaaaaaaaaatcatatttattttcaag

SEQ ID NO: 44297 - DNA, 2573 bp, Cannabis sativa
tttttttttttaaagggcccaattttaaaatttcgcacaaggcccccaaaatgcttgggccggccctgctcatctcaccctctaatatttctccattatgtgtctcaaccactaatatttttacatttggcaaaagtaataataattaaaattgaactataaattagtaaccccataactctaactctataaccctttgaaattttgtagctccttctctaaattcataagataactctcttttaatagtatatatattatacatttacagtgtaagtatctcaattctcaataatgacactaagtacaaatgtcctcggtatagccccaaatgtcctcggtagaaccctctaacgaaaacatgttgtcgttagaatgtcctcgttagagcttcgtcggtagaaagaactttttaacgaggacatataaaaagttgtcggtaaaacttataccaagaacattgttgtcggtaaaacctttctacatattaaaaaaaaaattacaaatgagctaatattattttgtccatagataaattaatattatatatccatataaaaatatatacattattaattgaacttcactattaaatattaataatataaaattaggattaatacaagataattcaaattaagacaaatacatgaataatattacatacagtgtatataagaaatatttttagcaacacattcaattacaagcccaaccttcataattttgtaaaattatgtacttacaatacactatcctccataagtgttattaggaacggttttcctactctaacttttataactttgatatcatccgaagtaccttcttgcttatcgaatcttcgatttaaaattgtacctctaagtagcgccataaactttataatgaaggattgagtaattttctgcaacaatcaagaaaaaatatttatgtaagtgaatacacaatttaaactttaaatataaaattaccttatttagttgaaaagtatttccatgaacaacttcttaaagactcaaaaaaaaaaaaaaaaataccacaacaaataaaattcaacttagttagatataattataaagggaattagctactttgatcaactcataaattagttagccatgagagatcataaagcctcttttaaagtttgacaagaacatgcaaataaatacaatttttagatcaaagatgtatattttcttttacaaatccaaccgattgaataaattgaaaatagaaagatgaattgcattggtgtagaaaaataaaatactctaattattatttttttctgtagtacaacaacaatagcatacaaattattaaagatccctatcataagaataagaatattatctaccatagaaaattaaaactcaattagtagagaagctagaataccattaatatagtttgtcataacaagaatatgacatgtttatgtacagtgaaatggagtaacatcatccctgaaaaatagtaactatacacattactttacaatatttttgtacctgtactcgctattgtccatggtaattttgctctcatctttgcaagataatgtcatcgctactctcatcgcattaccaacttcaaatttgatttgttgaaccctctttttgaaagttgttcaaatatgaaaaacacttaatgcattgataataaactatattgaagtagagtatcctatatgacattgagcacacaaatcataaataaacccaccaataagagtttatactctgccatatctcgcttggtttatattaactcaagcaccatactaattcaatctaaaaaataaaaatctaattcaaaacctaaagccaaaatttttttatacgaacaaaaatcaaaatgttagaacatctaggccaagaaacccaattcacaaatgaaaatattgctcataaactaactcaaaccacaacactattcaataagtaaatttgtaagtaaagaaagaataacaaacatatatatttacaaaaattgaggattcttttttattttttgaatcccagacaatgaaaagtaaaaaaaaaaatgaaaaacaaacctatgtcggttggtctccgtaagctattgtgcgccatggtgggtctaggtgagctgccaccgaaagaaataagataaaaaaaactaaaaaatagaaaatatatgataaaaaatacatacacaaagagaaatacagtggagacaaatggaagaaaagattggagctaaagtgaaattatttcagatctaaaacagaaaagtaaaaaaaaaatcatttgtatgtaaataatttatatatatatatatatatatttatacttacggagagggagcctgataaccaacaaactgtttgaccgtttttattgtttaaattggttgcactgtttctttctgttttctgttacaattctgatataacagaattgatgcttattcttgattgtaaagtctataaataaatgaattctctcctcagttaattcaagcaagtattcttgctactgaggctttctctacatctctctagtttctctgttctgtttttggctctctgtttaagcttttac

SEQ ID NO: 44298 - DNA, 2679 bp, Cannabis sativa
gtgttctatgttatatacaaatagatcttgggttaattgttaatttatctaacagcctattttagttttacgtctgcaaagttattctaacttaaaaatacactaattaattgacactctatactaatttttctaatgatttatgcttgaaagttgagtagttattcaagtgcataccaatttcattgtctgatcaagcagttacttataattgaaatttggaaatatgaaatgaaagtacactattttttctccatcttttatgagccattattgttctaatctatgagtcatgacatggatatcatcatcacttataattacgatcatatattataaatattattataccacctactaattaatatgcacagagaaaaggtctggtaattaatcacgcatgatttttttttattattattattattttacgatctacatatattttaaattgattggatcttgtagtatttgtcaaaatcaaaattcctagtgaaggaatcatataatgcaaacgatgaataaattcatataggacaaaagacaattgagcaaagcaatagccatgtatccttttctacatttttgatttattataatcacattatgaaattatttttttaattttattatttacaaattagtgaaaccaattcaactttctcttttttgaaaaagcaagtgtcttgagcatgatcaataaggcaagttgatcagcctgattgagtttgacagattatgaagcgtgtgggggttcacacacgtattaaggcaaagctaagctattagattattagaattagacttagatatgatatgagtgggtgaggcacatttttggaattctctgtggatatataaatcaaggtatcttttaaataaagcatcaaatctagctttcctttcttctctctcagttaaaagttaaaaaagggttaaattcctcattttcaaaattaccaaattaataacaaaagttggaaagtttgactagaggattaatcttgttttttagaagaggattaatttttttgtattttattggggagatatacatacattatgcacgccaaactatttcgtgggacaagtaaagttagtggttacatataatacattgcaacttaagtttagattaattaacatattgacctgaccaagtcttaaattattaaaggccatattctcttctaccctaatcaatctacatttcaatgttaactattctattaaagttttttttttcattgaaaaaattatgaatcataaggaccaccattaaataattgaatacaaattcttgaactttaattgcactgttttatttgttatattgtaaaattatgatgtttcttgagctcccaagcaaaatcttcagagagacagatagagattaaaatgaagacaaagaaggtgggcaagtgatgaaaattggaaaaggggtgggtacgtatttgtcttggtatatgcattggtgtccttttgtattatttatttactttagatgattccaacttatctagtaaaggatatttatatatataaatattagcagatttggttgaccagaaaatatacgtgctagaagaatccactgaatttatcttacctgagaaagattcttacacacattatttatttactcttctatattctttttaataataataataatgcaaacattgctcaaaacatatctattttaaatacgtgtatctcatatagatatataactcaacttccaggaccaaaatctttcagttttatcttgtcattaaacaaattaatattcaactcaattgatgagaaccttcattctacttttatttttattttatttttcttggcatccttaaatacaatgccaattggtatagcagtatatctcgacagaatagatccatgtattatattttttaattttgatgatacaaaatgtatacattaaaattaatatctataccaaataataacgaagttgtgttgtatatatgacgagattctctttcgtacaagacacacatttgtagattatagtttcgtactaatattaataaagatatacctttaattgcttcttaatcgataaatttcttattattattattatggtttccatatatataattctaattacgttatcccttcccaggtcaaagttctgtttagatcaaattaaaatggaatcgtacgtgatttggtctcaaatttgaataacacaaatgacaacggcttcgatattgaaaaactttagctcaaataatgggactaaaacctctttaaaaggaagaccctcaacttttatcttcttttttttttgaaacagaagaccctcttaatttgataatagaatatttcactttcgaacaataaattaataaataaaaatgtataatatatataagagaaagggtgagaaatgaattattgctgactcgtggtgatactttaatagtagtccactagttcttacccacacgctattctttgctcctcttttaagttcttcgtttgtttttggttataattaattaagtgtaaataactatagcatttttttcgttgaaaaaatggattttataacaaaaaataatataattacaaaaaaatatatattttaaaaacttgtacattttaaaaataatttttttatagttttttataattatattatttttg

SEQ ID NO: 44299 - DNA, 2308 bp, Cannabis sativa
aaaaatattgcataaaatacaattaaatataatacaatacaatacaatacgacctaatacgccgttccaaacgagccctgacagaacagatattgcaggaatcgacagcataatttgaagaagttgatatgatcaatttggttttaaaactcatcaagcttcttagctgcaaaagtgaatataagaaagttgacaagatcattcaactaataatcacaacatgagctgtctttagtaaggcctttagtaagataatctcataaaggtagaggtataagtaacatacatggcaatgcagaaatatggtatcacaaattaaaagaagacatcacagagctcaggctgctactgcttcgggccttttggcatttttgattcctctaatagctgcaacaaaagtaaagcaaacattttagtcatctcagatctcatctagagaaggaaaaaaaatgtcaaatgattccaggttttccgtaaatttgccttaagaaaaaaatgaaattgaaaaaaaatcatgcattccataccttcagcataatctttagctccaaaaacagctgaaccagcaacaatagcatttgctccagcctcaattacctgccagcaccataagaaagacaaattcagaattttagatgcaaccaatttagttcttcagtgaagaaagactgacttctaaggtattattataactcagtaattaaatgttctcacactcctgccttttttactttgtattgtaagttggatctcattaactatagagagaccatcaaagataatatgacagaagttgttcacttgggtcatatggctttcaaacctcattttttgttatgcctttgaatgtttgtttagactcccaatggaggagagagaattcattgtgctttcgaatataaatgtaggaaagtatttaggtaggtacattacttttgcccttaccataggggcgtttcttatttccgatatatcgagaaattataaaccaattttctatatcatggtgtatgttattgttatagcaaacatcctttcagttttaaaaaaattccaagtattttatgataccaagaatagaatcataaaatatttagaatttcctaaaagcagatgcctgctataagtataatatacacctttaggttataatttctctgaagtgcacaaaacagagaatgccactacaatataggcaaaagtaatgcccttaccatataagctccctataattttgcatgatagcattatgcgttatcgttactttacttggttacattgtaactttaattaggtttaacagaccacggaccttgtatgcatttgatggacctactccaccatccacttcaatccatggattcacaccctgcaacaacaggataaataaaatgccaacatctcactatatcaatacaagacctataaatggctatccagcgaaagagaaactcacgaatgagaagtgcaattataccttctctgcacacaatcttctcaactcggaaattttctttacttgactctcaataaagctctgtccaccgaagccagggttgacagacataatcaagactagatcaacaactgcaaaatccaaaaataggttgctcctttaaaattgtttggatggtaaaaattcaaatgatctcatttcagtacatgactgctagtcaatagtccctgtgaatcttactgcaactacttttttaaatcattgtcattattattactcaagtaactcaacatcattatcaatcgaattcccccctttggaagctacagataagatacgttacagtcttactaagtttttaacatagttctatcaaaaaaaaaaaaaagttctaaacatagttcattattttataatttgtaatacttgttaattgaaaggaatgaactcaacagaaaagaccaataacttccagcaagaaaaaaaagagagaaacaactcaccatcaagaacgtactctatagcacctaaaggggtaccagggtttaggacaactccagccttagctccgagactttttatctggagatagcgaaaaatgtaatattgtcagaagcgagtgagtagcagcactggaatccaaacagggcatttcaaattttattgcactactcaaagctatcaagaagacaagtgcttttacattcagaaactagctctgctgtggcataagcattaataaagccatataccagctaatgaaacatcatatttactacttaaaaactaacacacttttaatactagaccaacttcaaccatttgatctacaaacattaccaaaattccatt

SEQ ID NO: 44300 - DNA, 2847 bp, Cannabis sativa
  modified_base (2268)..(2283): a, c, t, g, unknown or other
  modified_base (2761)..(2761): a, c, t, g, unknown or other
cttgtttggcaaagttgttagtgattgcaaggatttacttagtactttgcgtaatgtttctttttattttgtaaaacgatcagcaaatgtagcggtttgcaagagtctctatatctcaccctgattgcattttcaatttagacattgttccggttgagctgttaccgaacttggtaacagaattattcgtttaataaatgatgactttcatttaaaaaaaaaagtagatattttttaattatatgcaagtctaaataaatatgattaaatattttattaattttttattatatatatttctatatataaaggtaaattgatgaattaatgttatttattttatctggttgattgagagagaaataaattaaattaatgaggattattattaattaattccattatttaaaagtggactcagagatgacctgcacatattattgtaagagcagggacactctggttgatttttcaatgttcaatatttgaattgactctcttgcatgttggttgcaacttgagctcaaaacagtgtacaaccaataatacaattacaatacatggtaaaggaagtccactgttaacatatttatataaatatcaattacaattcaatatatagatagaaacaaaattgtgatcaattgctcctttcaactagtactactagtgaggaataataatatatgaaccacacaaaattgtagtgggtatccaaaactttctacccatactcaaacttcccaaccttaattagacccacacaaacataacaataccacttttttccttttgtctttattatcaagctactattataatattattcttcctatttttgaacaagtaactttgacgtgaaacttcataaaattaaatacatgaaaactactttgctatagtttatgactgcgcacgtcagagttgtcaattacctaaataagtataaggtatatatatatatatatatatagacacacacctctatatatgaaaagaaaaactcactaaccttttctaaatttagtgtctttgaaattgactttaaattttttttttaatttgttaaggaccggtgtcgaggatactcccatagatttaaattcattagtaaagaaaacccattaatttgctaaacaaaggctgatgatcaccgatttccaagttctgaaaaatgttaaaatacactagtactatttaacaccacgtacgagtgttttatcgttattgatgttaaaaatatttaatttcatataatttaatataataattattatagaatatcaataattatttataaagtgtcacctttaaatgatgctaagagcatctccaatagcaaattgtgtcaaaccaaaaattaatattgatgccaaaacttgacattaatgtcatactcatttttctaataaagtttatacaaataatatattaaataataatgtatgtgctataatcattataaaaacactgttacttttagtgatttttttttttttgatgaaaatatcagaaatttcattactccaaaacaaacaattacatcctaagagcaacaataaggcctccatgtatactgtacaatatatatctgtgtatggctaaaaacaattttacaagctttcaatccaacatttatcctttgttgtagcttttttttcgaagacacaactaaatctgtttttgactaataatctgatctattgcatcaaaagagtggctgtttgctggttcccattccacagtctttcattttgagcagtccacaacatgtaaaccagagctgctacagccgtgcatagcacctgttttctggttattgaatgtcttcacttctcaattttctttgggatttccagggctaccgatttaatgttccagtgtagtcatttctcaccaactcgagcacttcctgtgagaaaggacatgagaaaaaatatgctctgctgtttcatcagcttgtaaacagaacaaacaagctgcattgccaataatattgtgcttgtgcaacctatctttggttttcaatctgtcttgtgacttttagtgaatttttagtcacaacataaatttgttgtgaatgtgacttttagtcacaataaaaaattatttatgactaaaacatagcatttagatacaagttgtcactaatttagttatagcaacaacaagtatagtgactaaaaatatatttagtcacaataaattatataatttttgtgattaatatctttagctacggactttagtcacaacataggaataatnnnnnnnnnnnnnnnncaacttttttacttttagttacaagttttgtcgttactaaaagtaattaaattttgttgtagtgaataataaatttataaagtacttattattgggagtattttaaaaaataagagcataaataaaataaaatataatattttaaatggtgtgaagaattttattacatttaaaaagtactactacattggtgacttataggattgctcttatattatataatatgtttaatagaaagattgaagatggcatggcagttaagtttgactatatatcaccaactccttaagaccagttccatttttatatgtatatagcagatacatagaataccttataatgtacgcacatggcaaaatttacaaaaaccaacaatttcaatttatataataaacaaagagaaaccttttaatttacttctcattttcaattacgaggtgttccttgttatggtcacatatctattctatataaagtntgcctatataacagaattcttgctttttgagaaattcatgagtcactttttatttatatataataaaataaatcccattaaatcaa

SEQ ID NO: 44301 - DNA, 1681 bp, Cannabis sativa
aaatatatgttgtaactaagtaaaatacatatacatttttttctcgatttttttttcaggggggtcgactgccccccctcgctacaatgtgggtccgcccctgaccctaaagaccgaatccctcaacccaactccagtcccataccagagtatgtgagagaaatataaaaaggaaaaataggaccaaaaaataaaaattattttttagataaaaaaacattatgatatttttattttttttaacttagtttttaaaaattttagctaaacactctttaaatattttttaaaatcaattttatttttaaaaaataaaatcagtttctaagttatgaaattaaatacttctttaattaaaaaatgaaaattaaatttaaattaatggtataatttcaaatttttcattttattttattggaaaatcaataaatttagtgtcctaattagcacagttctgacttatatgcagggcttgtattggaaataatggaagcataaactatggaatattctattttgtagggattaattactctctatttacatttcaatcaaaataagtaattgatttatttattaaaatctgatttttctaatattataatttatatctcaattacgctataattgactaacgtgactctgataatttccattattatctttctaaatattttttgttttgtataaaataatatttgagatccaaacataataataagtgtatccctttaaatataatatgtatataaataaataaaataagtgtattaatgtggaccacacttgaagataaggctccttgttgtttttattattgttttgttaaaatttttaacaaatgaaaatcttctgatttttttttttactcctattaaaatttaataagatgtactatttactattgaaaaatagaatcaagaatagtaaatatataataaggaacaaaatcatgtgttatattttatggaataataaaataagactttatagaagcttttgatgtttagtccaatagattccaacatattgatggattggtatgattagatacaatacaaggtggaatatatatttatatatataatttataaaagcatttgcctaaacgacatgagtagttgaaactataatcttttaatactaaagaataccacataatttatatataatattcagaattttaagtttgtaaacaatataaatttaatatttttttttcaacggtattagtacctagtgttagtgaaagtataatttatcgtctaatttcgtcagtacaggctccgtcagtacaaattttataggtgtattaataaaactgaataaaaattataattttattaatattgagtacttatgctgctaaaaaaatattaagtttataaacacaaaactttaattatattttattgtttataaatatgtgtatattttttatgtttgatttctgatagcttattggaattttagtatagattttttttctgtggtatagtaaatagcttaataagtttattattgttgatttttctctagagacaatattttcatataataaattttgtccgatttatctattaatgaatatttatgtttttcttaaaacaaaaatgaaaaaaaaaaatgtaatattgatgtataagaatcaatactcataatatatattaattaattagta

SEQ ID NO: 44302 - DNA, 2759 bp, Cannabis sativa
gcaattgctgctgtaagctaataatgggggtccaagagggaccaaagcaaacctacgagccaagctgactttctgagtgagaaaaaagaaacattaaaaatgtcaaaaagccataatgaaacagactttctaacgaggatggaaatatcacgtcaaggttgggggggcagtagaaaatgaaatcacaaggttcttaacatgccaatcatcatactactaaaccagtataccaagttggtgccggggataaacgctaacacttttaattggtttagctagtatcgactaacatacttaattgaaagacctgaattaaaattagaagaaacaccacataactgcccccctccccctaccccaaaaataaataaataaaaattacctgcaaatgcacaacacatgactgcacggcaacaaaagcttgtttgaaaatttcaaaagagaaggcttcagtaggaatatcatatgggtattgctgaaaaggcaataaagaaaaccccagtatgtcaaatcattagcaaactaaataaacgtgtgtataacaaattactaattacagtatatgtaaataacctgaaaaagagacccagccataaaccacacagtgtcaagctcgtcatattctcttttaattccttcagcccttgcaagaacttcagcctgattcaacattaagtcaaagaaggcctaaaaatctaaaacagcaaggcctccattcaatttacatacaggtagaaagtggtagcagcatttattttacaaagaagcagaaactaccttagtgggactgcctgtcaagtaatcaagttcatcttttgaccacaaaagaggagattccacagccaactgtcccctccctcgctgacgatcaagctctcttatgtaagggaaccaaaaagacttttttccttgcttcttttcatacatcaaatacaaagccaagcatgccagctccgacaatttatttgtagttaacaattccgctgcaacatgaaccaataatttaatacaagaattgtctccatttcgttaatgtatatgttttcatttcagaccatacttagcaaatccataaagccagacaaagaaagtcacgatctcaataaagagacaaaatttaggataaagtaacacaaaacgaatgcaccttaccaattgtctcgttccccaatactctctcaagcgttacgactagggaattgggcacagaaaatgctatatccccaatctgcagatatgaagtcaacaaatttcatcaaagaactaataaattcgaaattaatacaaaacaaataccaaatagattgaaaaactcacctgaagatcttcactagcagcaacgtagtgaataggtttatgcttctcattaagggaaggcctatctttaagcacaaccttacaaggaggaaggccattcttgtgcatccaagacttcaaatcctcctcatcctctttcttgctggcaacatcacgatacttcccgtcctcctccttccgcgacccggcgaccaacgtatccgaattagacgcaaaacagagatttctccggcgaaaaaatgacggagaagaagaagtagtagcgggaagagtaggatacttccgaagtgaaattgatacggtggaatgaaccaagagaggtcgaatgggagaggaagagcgaatcggagagcaaatgcatctgtcgtataaagaaccaagttccatgtttaggtttttagggttttttggggttaaagttttgaagaagagaagagagtaaggtgaagcagtgtttggtgggtggtggtgttgttgaagttagggaattttgatgatttttttagagtgattttgattgaaattgatatggtgggtgtgtttggataagacacataaaattgtgtgttttttagtattacttcattactcgtgccaatgctgctgattggagggaaacaaaaatcttattctctatttttatcttattttttgaaaacttaattatttatatatttttatttttgaataatttgtgatataatatataaataaatatttaattttagtttttgatattaatatttaagttatattttcaaaattgagataggcaataagtctatcaactcaacattcacatggcaatttttgattagtacttgtaattaaatttttattttttatttaaatatactaataaaaaaaattaaactataacaaaaaattaaatttcatatttattaaacttaagtattcagttatttacattgtaaattattcttttacttttaatttttaactaggacaaaaaaaattgtgtgtcaatttatatatatatatataagatagatatattacatgtctttaggaaaattttaaaaaattaataacatctcaaattatttagaattatgcaatacatgttgttgaccgaggttttcagcaatcgatttaataatatatgtaagaaagctgtaagaagtttaatccatgggatttttacatggttggggcattaacgagccttagtccacgatgttttttataattatgagagtatttattacagagaatgttcttagtagatattcctcttatttgctctctttaattcttatgagcccagaagtctcgacccctgacttagtgtgtttagggggtatttataatattgttctggggatccctagaactgagtcacttgtctttttgtgcgagttcaataggggcacatattcctagtagatgcaaaatatgaaatacacgacctataccgtagg

SEQ ID NO: 44303 - DNA, 1291 bp, Cannabis sativa
tcctagtgttattttttctccagttagtcagagtatagagactgatggatctaagaatccaattgatcatgccagacattcgttgcgactgactatagcagctttccataatgtatgaaagcaaaaaatattgatagattgaattacttacattatataaactttcctctcaggcatggatattatacaaagaagggaaaagtttggaacttgttattgatagattgcatgaggagtcatgtaacataccccaagtattgagatcaattcaggtggctttgttatgtgttcaaaataatccacaagataggccaaatatgtcatatgtggttttgatgctgagtagtgacattccattggaagaaccgaaagagcctggtttcttcactaatagggatctaattgattcagattctatgtcgactattcgtgaaaaatctactacactcaacagactaactattacaatgctagaagctcgataaaaaaagatttagttcaagtcattggaattgttgattgtaaattttattctacagcttacataaatcgaaagatgaattattgattgataaaaaattttacatgttgcaccgttctttttcatcttggctcaaattatttacaaaaattaggttatttattacactttattcaaattaatattaataattatgtatatggctttcaaaagaaaaaaaattaaaataaaatttttgcttccgaactttttaccctaccaaattttggcactcacttatgtttaattttgcttatatggcagtattattttaaataaaaaattatgtggcaagacatgtcaatattaattttgagtgatgtggatatttcaatgtaacctaaataattttttttttttttttacattaatgaattaaaacaacatataaaataaaattattataaaaagataactgtaaacaattaaaccttagctatcctttcctattttctctctcttgttcatgcacggttgtgttcttcacgcctagtgatttttttttttttttttttgcagaaaaaaaaaattgggtaaataaaatctgggcttcacgcacgacgatcatcacgcttgtgtcattaacctatgagtatcaataaacagtaaaagcaaatcatataacaatcttgatgatccggagaaacagcaaggtggaggaagccaccaaggagttagaatccgacatgagggctcagtatccaaggttgttcaggttagatttcagggacagaatcctttaaggggggggggaataattgtaaagaccgc

SEQ ID NO: 44304 - DNA, 3249 bp, Cannabis sativa
atatcttgtttccctaatttttcttggcaatggtatggatagttctttgggcattgtgattaataactatgtttcatttctgttgggtgcggtatataaggttgagtctggatttagttgattttcactctgtatttatgttgggtgttaacatctcggctgcgtgtttgctctgtttcattttattatgtttgagtctttgagatagtaaggcttgattagatttgtgctgagattttttttttttgtatgttttgggggaaaaattgtaatattcaagacgctgtcattttgtattcttccctttaatttatttatgttgaatagtagcagatatttcattggtgtttctttaattttattgctatttctttaatatccttaactatgtatgggatgtctggcttcagattatttggtgaagaaaataaatggggggtattttgttggtttaatttggtaataaagaaagcagttaatcaattaacttttatgagatgtttgacggtaattagaaaaatgttaaaagagcaaaattttatgagattagttgaattgcccatgtgtaaggatgatgaaggagaccgattagttgccttctagacatgtttgaaaactgaatattgtttgttgatataaacaaagaccttcatattgataatgcttgagaatatttaactcaaaagtaaattttcttgaagattatatcttaccaaaggaaaagaaaaacttttgtttgggggaaagggaaaacagtggttaagaaccatatggaccctgcacccaatttcaaatagagtttttcaattcatttgtaggattcatggtcaacgaagttatagtattccaagcaaagggagaccagttaagtatactagtggattcaatgaggggcatttgattatctcttccaaagctgacaaaaataattaaagagatagtaacacagaaaaaattcaactgcccattgtcaaaattcccttctcctagcttgcttccttattcagttaactgtatcttactatatgtgtgtgtgtactcatattagagttgacaattgagttttcgcgtctatcccatattagtaggtacttttatccaggttctccttcgatagcaaacaaaggggtctgaaggggggttttccatctgctgtgagtgggatctcattggccataaaatgaagtctcattaatgtttattgttaatttcttcatattatcgcctttcacactttgatgagtttttttaggtgggagaaggagatgtgcttcttaattggtttgaacttctcaaaaatttatgccttgttgaacgaactgatggaatgaattaatgttaagattcttttggttcataattaactgcttaatccaatgtgttaatgcaggttcaagctcacagttgaagtttcaatggccaaaaaatctgatccaagaccaacaatgctatctgtatacctttatattcccaatatcattggtgggcattggattttattgatttattttgtatcttttaaattacttgtaacattacatttggctgcattggaatcaatgaaaaaaaaaaacatgttcatctggaattctactctatcgtgaatttactcgagactaaataaatattggtgttttcatttattttctttttatgttctttgttttaaatatacatacatcattgtgattttcatttttgataattataattacagttatttgataaagatagttttgggggccagtctagttgttatgcttcccaaacgactataaaacgcaccaagttcctattaatatttatgactgtattattcagatagatctttagaaaattgtataaagcacccccttggatgagtccatggcatatttaaatgtgccctctgctgtgaaatctatgaaataactgatcaactctctttgtaattggcttcaggatacataagggttctaatgaactgttttgcctttgcccaatgcttttccaacaaaaagctattctccatcctttattttattaggtaagaaataatatttaaggcctattactttttagttttattttcttaagcatttgcgcatagaaagtgttatatgtgactgaatgtgcttttctcagctttgtgtgtgatggcatagatggttggtgtgctcgcaaattcaatcaaggtaacgaactatacattgacaattttgtggaatatctgtcaaattataggagcaatatacagcagttagctttcaacaatgcatagaatgtaacaaataagttgtttctttctttcctctgccagtttctacatttggagctgttttggacatggtaacagacaggtgtcatgttaactcccctctctctctctctctatgaacacacatatatcatttggaactgtttcattagtattttgattttctttttttttttaaactaatttgtgctgaacactcttgtccttacaaggttttgattcatgtgctatatatctcaggattagcactgcttgtctacttgtaattctttcccaagtgtaccggtaatattacatctttatgttcgtcatattttatggaagtttccgttatttatgtaagatttatatttttaagttttggtttcgtgtataatgcaggcctggtttggttttcctctcattgcttgcgttagatattgccagtcactggttgcagatgtacaggtagttttctttttctccattgttttttatttggaacttattctttaaatagagtcgaaactttgtcctaacatttttatttgcttgactctaatgctttttatttcagtactttcttgtcgggcaaggttagtcataaagatgtgaaagatagcactaattggcttttcaagttatattacggaaataggatgtttatggcatactgctgtgtggcttgcgaggtaatttgctgcgtctgtttgtgtacaccagttttctgtaactgcagcatttctctaattttaactaattgagcttctgcaggttctttacatattgttgtttcttcttgcaaagaatgactctgagaatttgatgaatgtaagtgattacgacatcgccaactcaatttttgtgtgattgtgattcctactaatatcttaatttctgatcccctctttcaggttttagtaagctcagcaaaacaaaatgcactgcttgctgctctacttgggttgagtttatttggatgggcggtcaagcaagctgttaatgttatacag

SEQ ID NO: 44305 - DNA, 832 bp, Cannabis sativa
taaatttttcaaattgaaaaaaattctaaaatgtaaatgcaaaataaacccaaaaaaaaaaaaaaagataaaatccattaaactagaaacaaaagcttaaaatgagtttgaatattaaatttccaaaaatatgacatatcaaagactataaaaaaaacattaaatgtgaaaaaaaaaatcataacaaagtgacaaatttataagtgtcatatttttataactttcttattaattcccatatattagtaacctattcactctaaacttttgcgaattggattaaatttgaacttttgtacaaattaaattgaatccaaaatattaaattagcaataagaaaaatagtacgaattaaaaaaaaaaatccaataaagacaattcaaaccccaaaaattaacaattatcatctagaatcattttggtcactaaatcatcatcaacaatcaaaatcaacccattaatattttttcacatgtccatatagtcgccataaaatcaaagcatctctccactttctctctagaaatatagaaatatgaattaattctttagtaaacaattctagtaataaataaaaactcaaagttaccatcatctagggaggtgaggtgacaccctatgttgctgccatgaactcccttttgtttgttttgtttgctttttcctctgggtttctttcaatgaagatttcagtttaaaaaaaaaaacacaaaattttcagccaggtaactccattattgctattcagaatcttgcgtagataataataataaacaggacactaagagcattgacatgaagatgaaagcatcaatcgaccaataagtaaaat

SEQ ID NO: 44306 - DNA, 4030 bp, Cannabis sativa
tgggcttaggccgccacggactatttagttcctaaaagaccttgtgggttgaaataagcctatgattgtttttctttgtgaaactttgtgtgataaaaggaaagtggagatggtaagtagacaaatgggctttgagggttgttatgttgttgaagcccaaggaagaagtggtgggctctctttactttggcaaaatagcaatgatgttaaagtaaatattttttccaaaaatcatatagattgtgttgtttctaccagtggtacaccagattttagactgtcgggcatctatggtgaaccgaaccaaagtcaaaggagacttagatggaatctaattcaaactctcaaagaagaatcccctgacccgtgggttcttataggggattttaacaatgtattgagtcaagaagataaaaaaggtggaaggccacacccctcgtggctcattgatggtttccaggaaacccatcatgcgtgtaacctttgtgatatggagattcgggggcatccttttacatgggagaaaagtcgaggcactactcactggattgaagctcaactcgacagggcaattgtgtctcaaaactggttagaccttttccctatggctctttcgcataatcttcaattgtctacttcggatcactccccgttactattggattttcaacctcaaaattctggtactgctctgaaaccattccgttttgagaacttctggttaggaaatcctgattgtgagcagattattagggagaattggggggatggtgtgaatgctgatatccaaagtaagataaaaaaactgtggtgaagctcttcttgcttggggtaacactaatgtgggaaacatctctgctcaattaaaagattgcaacaaaaagcttagattgttgaaaaaagaagagattcggagggcatctgcctattcatggaaacaaggcaaaaattgttcgatattcttcatcaaaaagaaatcttcttgaggcagcgttcgaaacaattatggttgcaagtgggtgataagaatagtaagtattttcatgcctgcgctaataagcgtagatgaaataatcaaatctctagcttgggggatgaaaatggtttgttggtctcttgggataatggacttgctaatgttatgacaaagtattttgaggagctttttctggcgggttcggctgattggaatgatgttttacaatgtgtggattctttgataacgacccatcaaaatgaagagcttcttagaccgatttcggaaagtgaagtgaagaaggcgttgtttcaaatgcatcctgataagtcaccaggtccggatggtttgaacccaacattctatcaaaagtattggcacatcgtggggcaagatgtcgtagtctcggttcaacaattctttcattctaggttgatgcctatgggaataaatgatacaaacgtggtgcttattcctaagaagaaaaacccagaccgtgtgagtgatttacgaccaatatcactttgcaatgtgctctccaaaattatgacgaaagttctcgctaatcgcatgaaacatctgcttgatcaagtgatatcaatgaatcaaagtgcttttatctcggggagattgatcacagacaacattatgattgcctttgaagtgctacattacttgaagcgaaaacaaacgggtcgtgatgggtatatggctttaaagatggacttaagtaaagcctatgatcgggtggagtggtctttcctctttgccattatggctaagatgggctttgacaacatgtggatcttgctcattcagcaatgcttgacaacggtgcgttacaatgtggtgagtggtggctttaatctgggtccgattgtgccttctagggggattcgacaaggtgatccaatctcaccttatttgttcttgatctgtgccaaaggtttatctgctatgattcgaagatttgaagcaacaaagtgtttgcatgggtgtagagtagccaatagagctcctgtgatctctcatttgttgttcgctgatgatagttacatttattgcaaggcaactgatagagaagctaatgaagtgtttcggatcttggctttgtttgagaaagcaacgggtcaacaagttaaatatgccaagtcttctgtgttcttttcaaccaacacaacaagtcaaacgaaaactcttatttgttcaaaaatgggaattcagcctgctagtgaaaatagcaaatgcttaggcctcccaagttttatgaacaggaacaagaatgcggttctcagatatcttaaggacaaggttcggcaaagaatacaaagctgggataataagttcttgtctcgtgcaggaaaagaagtcttaattaaatctgtgcttcagtcgctgccttcatatgctatgaatgttttcctattaacagatgagatttgtaaggacattgaacgcataatgagtaaattctggtggagatctaaggcgaatcaagataatggaatttactggatgagttggaaaagattggggcgtggaaaagaagaaggaggcatgggttttagatgcctcagagattttaacgttactcttcttgccaagtaaggttggcggttacttgagaaagaggatagtttggttggaagaatctttaaagcaagatattatcccatggggaattatctctcagccgacattggtagcaatccaagctatgtttggcgaagcattcatgaagctcaagcggttgttaaacagggtattcaaaggtgtattggatcgggtctaactacaagcatattgaaagatccttggcttagtgatgagcaacacccttatattgagtcttcccatccgacacttcataatcagaatgttgcagctctgttaaagatttcaacaaaagaaatggatgatgagatactcaatgatgtcctttcagcaagagactacaacctggtcaagtccattcctttaagtcattctgttaatgaagataaatggtactagtgtaaggagcacacgggtctgttcaccgttagaagtgcataccagatgattcaagacaacaaagcgtcgaatgatcaacctgataactcgggtttctggcgttgtctttggcaactaaaagtacccccaaaagttaaaaatctcctctggcgtgcgtgttccaactgcctccccacttgttttcagctgtccttaaaaaaagtcccccttaatgtcaattgtccaatatgccaaggtgttgtcgaaaccatattgcatattcttgttgattgtcctttctctcacaactgctggcaggctactgctatatcccgtttcccctcacctgcaacaagcttcgcgggctggtttgatgaaggtttaaagctgtggaacaaggatgaacaacttggcactgctatgctatgttggtctatttcgagtaatcggaacaacaaggtatggaactccaaacaatcttctattgaggaagtggtatcaaaagcatctcttaactttgtgtcttggaataattctcaaaaaaactcctacttatctcctactggtcacggtcagcaaggaagatttattgagcattggattaagctgattgaccctttcatcaaagttaatgtggatggtgccatcttctcaaatgaggcctgtttcggatttggttttgtagcaagaaatagctctggcaatgttattgaagtggttcaaatgtgtaagcaaggtgtgtggagtccactaatggtggaagcaatgggaatgaaggaagctctaagttggataaagaggaatgattggcaccatgtcataattgagtccgactgcttacgcttattaatgatatcaagaatgctaaaactttagcttctccttatggctttgttttacaagattgtagacgtttgttaacctctttatctaatgttgattgttgttttgttaaacggtctgctaatggtcttgcccatgctttggcgcgggcttctcttcacgaggttgatcgtgttcttagtgggaactgtttacccactttttattgttctattgttt

SEQ ID NO: 44307 - DNA, 3100 bp, Cannabis sativa
  modified_base (46)..(83): a, c, t, g, unknown or other
  modified_base (1604)..(1606): a, c, t, g, unknown or other
catgtgaaccatgcaacattcaatattatttctgatctatattaannnnnnnnnnnnnnnnnnnnnnnnnnnnnnnnnnnnnnggcataaaacccaacaggaaccaatgctccttgaggatttgtttctggataatgaatcaggtggggacctcttccaagcaattatgggggagaatttccccttgcgctgaatatcttagttagtctgggtaactaacttcttggaaccttcctttaaacttccataatatctagaagagctcggaggggagttatgaaaaccgatgacgaagttgaagcggtggagcaaactcttgccctaaaattattggtaaatttgtctccatgggaaatggaccagcacaaatataagttccagacttatgacaacctttgaaaatacaagtcataaagaggacttgaatgtgttccaggattgttctggaaccgattgtctatattaggagaaaaactgagccagtgctctgaaggaggttttggtgcttagagctggggttatgtggcgatgggagcccaccttcctttgagatgctactttgcaaagttatgctcggtagacagaggggctccgtacaagtttatttcccaagtgtactgtttgcttgctaggtggtacgtctcgtgcttccagaagaaaaaaggtactcttactccaaaagagatcttgtatttttacgtggtcaaagcacaaaatatgagaaactattgagacaaagttggcttttataggttggagaagtattccaaggactcgatgtgtccagttagtaccgtgaagtacacataccgttagggtttatgccctgaaaatcctataaagacatttttgattatgcataaagagttgaacattttgatatatgcatgaatgttaaattattaatatttattattgaataatttatataaatatcgaaaatttccttattcatgtatgagattatgatttgtagctgtatagagaactaagatcacttagctatgaataaaccagtcagcaacatattaaagttatagaatctttaatcaatagttcctagtacgattcattgatgcccgttcttctatgcaagtaatctcagttcagattatgatgtagtatgacatctaagtgaaggtgttgtacataatagagattatatatgataaggactgatatgaataaagctgtctttattaaacatgtcgttaattcatatcataatgatgatcaatagtagatcaacctaaatcttgggtaatcatgaactcatgttcatgttattagtttctagaattcacttgttaaagtttctcaaagaagatgattcttataacttttgttttgggagtctaataatgtggatggctgggaacatgatctataattatagagaatgttgactttcctaacggatcgaatattggttccctttaagtgttaattctagaaatgtaaagttgtgcacaaatttggttggatctaaattatacttttcctaatgattaatgatactaaaggataaagaattaattagaagggtaagatagtattttgatcaaaactaattatgaacggacacaaggagggctaatcactgnnnttaattatatcaatggacactgcagtaaaacttagtaaatataattctataattactaagtgttattcgcattttcggcattggacatgtggattttaggttagcatccaagaccccattagtgggaccttcagcaaaggtaaagtgggctaagcccatctggatatgtccttccaggaacgtatcttggttctacactcgcaaagccttccgccctcaacaagccgtacttggaggacatgtctggtaccacgagaccggagagataagactgtgcgttcccaaaagacccttccggtttccctttatattcctgcacacaaatacagaaactccaattgtcatatcacaacagagcatcgtaccaagattaaaggcgaaacttcctataacaagtaatatgcaattaattctgattaattgcccacaatcagtgtacgcggcccacgagtattatttactgtaaacttcccaaatgagggaaagagaaaacctattgtaattctcaaactactataaataccccacgaatcctttggattaggagttgaaatatcttgcaaactttgctcaggaaaacttgagaacatacattctgtgtatttcttaaggcatttacaaacaaaagacctattgaataatactgactcgtggactaaggctagttaatgccccaatcacgttaaaatctgttcgtctcattttatactttctcttttgattatttattcttcacttcttattattaatattctatttctaaaaatcttggtaaacgttttggtgctttcattgggatcggaagaaagtagtgagaccacttgtagattacgctcgagtaatcacgaccctcagctgaaccaaatctggctttcgtttcactagagttggagattctagtgaccttaaaggtcactagtcgttagaaaagttgtcgagacaaagatcagaattgagacgatcccattattaaggacgaaaaatccaaagaaattagttatgaggtcattgaagttaataccaacgacgcaactgaggatatgcatgaagatgaccctcaggagaaagtagctaatgataacacttgagagaatagctagcctgatgagtcagaccccatggtcatcatagcaagacaacttcaactggctaatagcaggttaacttggcaagatcaattcaacgagttcctactcggaaagatgaccagagtggaggcagtgatgaatgccctaactaaactatcttctaacgtgctagctcctcaaaccacagatgcacctgagaaagcagatctgaaggaccctagattttcaggcgttcgtaaagacaaaggcaaaggaatcgatgtggaagaaccgaagaaggctctttatgcaaaacaacgtaagaactctaaaactactgaccaacctcaatagaagaggaaagggaaccattcctcagggcatggtgaccaaaaaaattctagaggtagagtcacacaaaaaagaa

SEQ ID NO: 44308 - DNA, 3585 bp, Cannabis sativa
tcgaactttcaaatcttgccatatagcagcagccgattcatcataaagaatgctagaggatatttcctttgaaacagagtttaggatccaagaaataacaatattgttgtttccaatccaagcattatacaaagtaagttcattaagagagggtttagaaatcgaaccatctaagaacccgagtttgttcttgacagaaatagccaattgcatcgccctactccaggacatatagttgtcttgtccggttagcaattgagagaccaacacgtttcctggattatctgcatgatgaagatagtacgggttggaaggatcttccagaggatttctttgttgcatcgtagaattcatggcttccctgatggcagtctggtttgagttatctccaatcgcagtaagactcgtctgatcattattagacatttcttgagaggaaaaaggatcaaacagagagtttgatcagaggaaaatagggaaaagaaaacacagagtagtcgaagaaactagctctgggaacaagcacgccggagaagaagaacacaaggcggtcagaattgggatcgagggaaagcatctctttcccgctctgataccatattgcggaattgaatgaaaagcaaaaaagtaattgtatttgataatcgatctagtttacaaaggaagctaatatagctatttatattacaatagagttggttaaaggagcataactaacttaactaaaagaaaggaaagaacctaagaaacagaattaactaacttatccaaaccaacttacacttacacttaacagaattaactacccttaacagtccatctagagagaagttaaagtaaacttgttaataatcatcatgttaaaatacgagaattttgtggtagtgcaatgcattcgtaatgctatttagcattattaattctaattgaaaaagagtattattattaggtactaacggaacaagtgcccaacaccaccatgcaataacatcttgaaaaaagtaaatgatattaatatctaaagtgtccaatacaactaattgattatattgttattaattagtgtaaacaatatcaagtctcacatatttttaattttaataataaataatataaaaaactacaaaatctaatcactgtgccaccacttttatagcaaggtgctacttttttttttgctaaatacgtttttttattgatagtaatgtctcttttacgtgaataaagaaaaattataacacagtctttttatgtgatggtgtacatactcgtgttgtaaaagcaatcattttacaaattttgaaaattcaaaattacggtgtcaaaaaattaagattaggctcaaataataaattgcatgcatgcttgttaattttctattttaaattttatttctttcaacagtagaatccttctcaaatttagcgagatgtctactctaaggacaatatataaatattgtcatacaaaataaataaattataatttttttatatactgaaaataaaaatactcctaccgagcagcaaagacaaaaatctcaccccctattataatagtttccaatgtatatacgttaaaaaaaaaattagacaattttttatattaaaagagaagtgttctcattaaatcaaacaacacaattacatcaagcaacacttgtctaaccaaagctcgaaaaagcttagattaaaaataataccaactacttaccacaacagtaataaatttgtctttagaagacatattcctcctgcctaaactactaaaacgagatttgataccttgctttatcatattatttctatattgaacaatgtaagatctacattcaaaaatacaaaaatttctattatcccaaataaaataaaccacagcaactatcacaacaatcgccacctaacattgatccaactgcccaatctaagtctccagtctaagaacacagtgggccacgtggtgaaactcacccatccatgaactttacgtagaagcgcaatagaaaatagacatagagaaaacaagtgatcataactctcaagaaaatcatgacacacgggacagtacagagatttaatggagagttgcagcctttaaaatttatctctggtcatcaactgagagttcaccatctgctaaagtatgaatctatgcttaggaatcgaatgtttactacaaactacccaagcataatcaaccttctcagcattaatgagagagttgtagaatttgcttaccttaagtaacaccagcatcaagtatcattgcctcagagatatttgatctaagcttgaagagtttacttccaataccaattaggttctcctctaaccgtgtggagccaaaaaaattgccctctcaagtaaatactttgcactcatttaacccaaagtacatcaggtttaacagtaatatcccatatgtattttttgatcattgcttttaaaccccagtcctccataatgtttcgggagacactttatcccaataagcaaagtgaagcttgcatctgtaatccttggtaccccatgaaaaattcctacaaagtttgtcattctctctaataacactttagggaagaataagaattcctacaatgatatatatgagtagtccatacatcttatatatggtatttagtttctatgcattatcaatgccagactctctaacattccctctcaagatggtgattattttttgttcatcaatcttacacggctcgatcacaagtggctctttttggctcatctttttggaccaatctttagatttgaatcagatactcgttagagtttagtttgactttgataccatattagaatatagaagtgcgcggtttagaaagtaggattaggtaagtatatagtaaggtgtataagatcccattttaaaattaattggtaagcagaagaataattcatgcatctcatgtatagtatttagtttccacacattatcaataccagactctttaacatttgataatataaattattttaaattttcgagactcagtaaaatatttactacaactacaatatacatatatagtcataaaaaaaaattgagtcatagattgtttaagtactaataaaaataaaaaaaaaataaaaaaaaaaaaaacaccctacaaatgaggacaaaagtagtatatatgccttaaaccactttgaaaatatatcatgtaattatttaattagtcattgagcacatgacctacctaaaatatcaagatagttaagtttaattaaaggccccgccgtctcaccacattaacgttatatagctttacacaagatgaataaatatctatatataattattatgtatatacttgatcttcatctctttcaattatataccattttattttaaaataataataataattttcacatttgtttctataattataatactttttaagtccacttaatcaggcaaattaaacactacgtattcttttggattgtcaccatatacaccctaacttataattatatacatatatatataactaaaattaaagtagacaaaataatttagaaggcccagttattgtactatatataatatatatat

SEQ ID NO: 44309 - DNA, 2335 bp, Cannabis sativa
  modified_base (670)..(673): a, c, t, g, unknown or other
acacgtagacattctaacatgatacttaacacccaaaatggatagaaatattaaactgctaacagaacacgagtatttgaggttttaccactaaaattttaaaattgaaggttagttgcaataaactaagcacttatagaggttatgctgcaaattactcttaattttacataattttataacaataccacaatgagaaataaatatactattaaaacattagaatttaaatatatactaataaatacttaaatttttaacttatatcttttaaaataaattaatagtttatttttactaatactgatatttttacattttctaaaaacttttataatagaattatattacttagtctgtattatatttaagtgttattattattttaattgatatataattaataaataaatttgttataaaataatatagaatagagaaagaaataaaagaacaagaaaaaaaaaaaaaaaacaagagaatgagagagtgaatgagatttttttcactagtttattctaatagggtgaatctctatttatacaaaaatataattagaataatggaaaactaaatgagtgaaataaaggaaaatataatgaagcattaattgtggtaatttatttagtaatttggacatccatttataatattttataacactctcctnnnnatgtctataaaaattgcctcattaaaaaccttgctaaaaatctcgcggtaaaagaaagattgcagtgtaaattactttcccctcatttatgttacagataatgcagtagagactcataaagtattagtttcaatgattgtgataggaatttgtagttgacttgcctaagtgatgctatgaaaaagagtttttgcttccatctcatctgagtgaaaataactttggactggtctagataaggcagcaataacagacctattgtgatcctgaataactgctctgatgcccaaggttttggtgttcatattgaccgcaacatccacattcaatttgaagccatttagatcaggtggcttccatgagactcctccgtcggcttggaaagttgagttgtttcagtaggagcagtcatggcagtaatctttgtagcacagttttgagtaagggtgtagctatcatagtatgagattgcataagaagctacataggacccatctcatcttgacccaccatgaaaaacacaattactttccgtccacataatataggtgagagtttcaaatttacttttacagtatagcgatgatagatgaatcacataatctccatcttgcatatggtgaggtttttgaaattcaattatgaattttgaagcctttacatattggcaagtgaacaaagcatgtcctatggattcctaagcatggttacacagtgagcaagtcaccgagtcaattgcctttcttctattaagggcaatagcaacaggtaaagcattttggataaccttccaagcaaaaatcttaattttgggggtagagttaattttggatcctctttccccgtatacatcttctaggttgccatcttgaatttcaggggtagttcaaggacttcaatctctagggataagggtgatccgcatgctcagtccagctcgagatcaatgaggtttgggctggtcaggcatgcaccttgtttttaagttgatccaattgtgcttgcacaaatggatgaactggttcagcctgttgaccgacatgtatcacattaggatctctttgagctagatgcttgatgtggatgcctggctggacagccgtttggacatattgttcgttcaggcccccttcttctattcaagtcagtcctgaggtcatgtggagcacccaacctattaaatatcaaggtaccaagtggtctcggtgtctgacttgtttggcgggttggttggccagagatgtcagttgggatgaagttattaggtgtaactccacccaaagggcggtcaggaaggatctagctgtataccgtttggcccacaggttggacctgtggctgtggattggacggctaactattgtgagtttgggcggcatgcccagcatcatactcttctataccgcccagggggatattagacgtggtggctcttaattagcgacttggtaggccctccttatcaatacagtggcctgccttgtacaatcatcaatggctgcttgttgatcccttaaagtttccatttccctaaccctccattctataaattgacgtttttgctcatcgaatgcgaggcttatagcggcacggagatcctcctgatcatggtgtaaagcgttattatgaccttccatgagtccaagggttgttcggaggttt

SEQ ID NO: 44310 - DNA, 1405 bp, Cannabis sativa
ttcagtactacacaaagtgttgtcatggaatatgaaaatgcagcactgtgtttgtgtgtggaagagaaagagatagaaaaataacccatgtgcagttatggggtatagccctatcattgtatgttgaaagattatgtacaacaaattccggcttactaggctatattcttcaagccaattttcttcttcacaagcagccagccaccggtcaatcctatccattatttcctttcggcttatagcctcttctttagctttaagtatctgcgcttcaatgtttgcgagaagttcggatggatctaccagacctgaacagaaacagcattttcatatttgcaaatatttctagccaaacaaataccataaataaaatgcatcttattttcttgatgagaaacaatccaagaagtatatacctgaatctatcattgcagttgatttttcgatagctgtgctagtatcaggctcaatatgagtcattcggcatatttcttccaattccgatctctttttaataacaagctccttcattctgcttgcttttaatttagtgagcctctcaacttcttgtgatgcctgtcgaaaagaatccgaaacttgaggatctaaccttgtaagaactaaaatttaaatgtattgaaaccactttcacacctgatcaatgatctccattgaaagaaaaccttgttctgtaatttctgtttctgattttccaaggataaaagcaatcttcgaaaagttattcttttcttctcttgatgaatccatcaagttccaaagctcagacaacgacgccacaatatctttcagctgaaattgataaaaaagtttcaatatagacgtgtaagagaaagtaaatgaccatttaccgaggcaacaacaaggcacgagcaataccttctgtattctcacttttctttctgttttcaatttgagaatggtcagttccaacccttccaatgtgctattgctgatgtttgtcgactgttctatgctcgtcccatgcaagctcggatgcacctcacttacagtttgcccaaaatccaaattaagcaccgcacagagagaatggacctcattgacatgctccaaaaccttgtgaagacgatcggactgtccaaagaacagttcatacacgttatcagaatatataaaagataatcagaactaactcgggaatcacaagcatcaatgctgcaatgagctttaaaagaatatagtgtgagtatacagaaaaattaagaagagtttcagctatttgctcaaatttccaattgacaatctatcaaaattaggttcagaactcgaaatatgtaaatttcctatccaatttggaataatgagatgacaaactaatcccaaaagtaagggaagaaatacatgtcagggtagctatgaatgaatg

SEQ ID NO: 44311 - DNA, 3024 bp, Cannabis sativa
tatatatatatatacatacattctttcagttaaagttagttgtaattgccaaactataatctaatacttagaaagtttttactacctatatgtgattttaatttgagcttttggttagtaacaaaacatgaggtgacttcttagtacgttgggactgaaatttttggagcttaaaacaaaatatggtatttttattaaattttaaatataaaatggtatatttaaaaaaaatggatctttttagtgggagcccaagacacagtgcctaggaccggcctatttcttcagaatgattagcaatttttgagaggtgtttttaaatttttaattttttagttttttattgtgaggcaaatattttttaaaaatattgtattttttttaataatattgtgtaagttttattttgtgtattgtattaagtttttatggttgttctatagttgttttttagttgttctactgttgttttaattattctgttgtgttttttacaattattttaccaaaagactatttttttggtaaaaaattaaaattagaaatttttatttaaattttagtattttagtaaaaatccctttttgatatgtgaaattctttatttaaagatcattaattaatattacttgccacttataagtgtgttattatcatatttgtgtgtaaattatatgtccacgtattattaatgatattagttatatatgtatattcaattttaaattacatatggtaattaattttacatagttttagatattttttagtattttgtatatttaaatactaacttttgaattatttatcataaggcaggttcacacttctaagaaagcatgtgtttctatttacccaagtactgtacagaatggcattgtatggttttggccaaatacacatcccaaatataaaaatattattacaaagcaaaaaccaccttatattgctgaaatggatgatccatcattttctcaaacaatattaaatagagaatttcattatgggtaagccaatgagattttaataattagattacattatatgtaaaattatttgtataatgtgaatttaatttgtgtatgtttttagatatgaggtgatgattgagaatcttatggaccctgcacatgttccatatgctcattatggattaatgcaaacacgcatacctggtaattattataattaattaacagctttattttgcccatatattataattaaaaaaatgctctccgtacagtttggagaatttctctccgtacagcttgcgttttcccatttcgctgtactgggctgacgagtttgtacgtgttctgagtggaggtaacggttttccctgtgattttgctgtatttgatcctctggtgatctagggttgagtgtgtgctcattattcccctgtatctgtgtgatattttgctctggttttctcttgtgtgctttggtttttgtttccctttcagtgttcttttgtagcgttggtgaagttttgagtatggcgagtagttcgactgataaacaagttgaggtctgtggagtggaagatttcaagctctctcttgatgagaacccagagcttgggaatgatgtggtggaaaagagtgtggtggcaaaactgtattctaaaagaactattttcaatggtttgctgagatctattctgggaaggaagtggagacttgccaatggctggaaactgattgaagttggccttaatacttttattatccaactcactaggaagcaggaagcggttaatatcgttcggaatggcccctggacgattggtaatggttttttggtggtgaaggcgatgccggaggatggtagatggaaatctgcggatttgaactctacacccatttgggtaagagtgtatgaagtgcctcctaggttctggactcagaagaatgcgaatgctattgcaaagaagattgggacggtggtgtcgattgaccgactttggcgaaatggattcccaacgaacgaatatatccggcttcaggttagcattcatctcaacaaacctttgtttgtgggtcttttcttacctatggaggaaggtgttagtctgtggtgttattttaagtatgaaaatatgccctccgtttgttataagtgtggtattgtggggcatgaggaactttattgcagaagaaaaagaaggttgattgcagatgatttcaatagaacagtccctatgtatggcccgtggattcggctgggatctcgtaagaaggattgtttttcggaatatgagatatatgaacaagatagaatgaaccgggaggtgctggaggctcaaaatcaagcggaggctagagctcttctcattccgggggaggataactttgaaccggctctcgctggtacagagattcatttggaagcccttgttgaagcggcggccgctaacggagataggggaaatagtatacctgaggaagcggtgaccacaaatcctcctgaagaaggagagacggcgggggacggtgggttgccggtttatgcccaacgtagtgaagaggggcaaaagggtaatttatcgttgaaggacgtgcatggcacaccagggaatgtgatacacattgagaataaggataacacgtgtggtttttcggagggggcccaccaaatttgtttgaataaaaaggatgaggttaaaaaagttggtgaggtggatagtagtcatgtggatcatttggctatggttttcaaagctactttgggctcaaggaatgggtcggcccataagagatctaggcctgtaaggggtaaagggaagatgcttgctattaatgatgggccaaaattgtcttatgataatgctagtggtgttgggaaaaaaagaagattagaggtgttggaagggggctcaacagaccgtccttggaaaattttgtctcatggtgaagctgggaatgaggaagatggaaaaaaggatagtgatcagagtaagggagaagaggcagaggactccaagaagtttcccaatggggagtcggtttctacccaaaa

SEQ ID NO: 44312 - DNA, 2312 bp, Cannabis sativa
gttaaaaatttttcttgaactattgagattggtagatttaaagacttttgtccaattttatttaattttactaatttaatgttgtccacgtactaaatcatgctttttggattttgatatctaccaaattatatcccttgaactttgacatgtgccaaattatgtttcctgaactttcatccatgttagagttttcttaataaaattaaaaaaaaaaaatcataaatccaacaatctcaatagttcagagaaattttttaacgatttttaaagtctaacaaacatgatttagtacatgtcaaagttctgagggtaaaaaatttaattagccaataatttactttgaataacattactagtatgcataaatcaaactaaattagcttagtgatgattggctcctttcatttttgggttagtaaatatttttccctttatataaaacatttgaatatttgcacaatgtctttccaaaggcacttttaatagaaatttgtcattatatttttaaacttttattgcaatttttcttttgttccccttcccatgcagtaagtttttgtatatttccatttaatattaattatattctaagttaacatattatagtgattcatttagcactagaaaaatatagttgaaaataatttattttattttttggatcacaaattgccaaattcaataaatttaaaagagaaacaataattatttcaaatgttcaactctaaaaaaaaatcatttcaaattaaataatgtagtacacgttatgggtttatgaaatcaattttttgggatatccacctaagccatgtgatagaaataaattgaattcaatggatctaccaaaaaagaaaaaaaagaaatcattttcatgagctcctttattgatcttgatggttaagttgtttatctatctatttgatttaatagctttaacaatataaagaaaattatttccaaacaattacttttaaagctcaattattagttaaaaatcatcattaaacataacaaatctatacaacaataaaattacaaaaaaatctatgtccaaatagctttaatctacaaacattgtagcaattaataaatagaattacaagaattttcaagtttattagtattaacaatataaaaatttatttactaattagtaaatggaaaaaaaaaaagttaatttattgacaggcaataaatataagaaaattttgttttagccaaaataatcatgaaacttatgaaaagtaattatataaaattgggtgaaaactatgcatttgcttaaaggggcatgaaaatatattgagagttcttccaattaatattagaaagtaagtagtgcctttcacactataatatccataaacgtattgaataaggcaaattattataaaataatagagatctttttatatgtataattttgtttatgcttcttgagtactaatcaaaaacataaaaacaaatataatttgtggaaaaagtaagactaaaaggtgtaaaataggattagcaactagaataataattggcaagaaaaacaagaacaaacagagtacaagaaatcggaaacgataaatgtagaaaataaagaaaataacaccaagatatatactaattcaaaatcgatagattgatgtgatctataactctacttcagtttcaaaacaccaccgtaaaatttctttattgattgatcaagaatatgtacaatacagtggatacaagattttctgttggccctcacaaagtgtttcaacactcatactttcacccaagaattttcttcatctatagaagattcttcttacaaaactcaaacccaatatctcttttttctctgcacctctcaatcttttctttttctctcaaaatctcaatctcatctgtacagagttctccaactcttaattttcagtcatatttcaaaagtgagtcaaggtggtatatatagccttaggatcaagatctcaaagtcggtggctgcaagaaacgagattcttaagttagttagaaacaactaacttaaccaactcctcatttagcgaagactccacgtcaacgttagatctagggcttccgagaacataaacgaacttccagacacgaggaccacagactttactaaagacgctttcggacaggataaaagtctgttgaagtagactatccgaaacggtcattccaagaggaataactagccagctggaactccttttcaaaaaagggctagctatcctgaagaatgaacccggaatggacatgatagacatccaaaaactcttttccggacttgactatcatacttc

SEQ ID NO: 44313 - DNA, 2253 bp, Cannabis sativa
aaatatgctagcatatttttagtgaataaattaattttaagcatataatatcaaatttcctttataaaatataaaagaaaaatatttttgaaaattccccgtttttaggtagaaaaaatagttaagctttgtctccgcctttctttgatcttccgcatttacattagactgaaaatgaagtttcatatagctaaggtgcttattgtagacaattcatactaaatagagaaagtgacactcatacttgtaatttataaatttgagaagctaaaagggttgaaactagctactactatggaggaaatgcctatctctacaacacctccaacggcggaggccgattcggtgccgcatccggtagaagcgccaccagcccaataccactctccctctttgacacgtgtccctctcatccctacctcggcagaagacggcggtgacaagatagaaactacctcgaaaacaccaaaatcgttgacaccaagaattagaactccgcggttcattactcccataggaagccctattagaagggctctgaaactcactaggctagaccctcaagatgcttggcttccaatcactgagtcaaggaatggaaatgcctactacgctgcttttcacactctttgttctggcattggtattcaagcacttgttctcccagttgcattcaccattcttggctggtaattattaattaagatataatcatatatatataattaataaaacgttgatatatcgatgggtttaatattataggacatggggaattatatgcttggctgtggcattcaaatggcagctttacaccttgtacttactcgtacaacttcatgaatctcccgaaactgggatacgttactgcagatatcttcaactttcccatgcaacttttggtacgtacatatatgtagtattttactctctttgttttcgaaaatgatttatctgttgtacgatgattattttcatgtcaatcaggtagcaaattatcaaggttgttaaccctattcccaatattgtatctatctggaggaacatgtgtggcgttgatcatcgtaggagggtcaacgtcaaaaatgttcttccagacagtgtgcggtgcaacgtgcactgccaagtccttaaccccggtggagtggtacttggtgttcacatgcaccgccgtgcttctgtctcagctacccaatttgaactcgatcgctggggtgtccctaatcgggtctgtcacggcagtcggctactgcactctgatatgggtggtttctgtgtcaaagggtacgcttcctggtgtgtcatacaatcccatagaagccaaaactgatctccgccaattttttgatgtgctcaacgcacttggaataattgcctttgctttcagaggccataatctcatactcgaaatccaggtaaatatatatttaatttatgtatatatcatttttaaataaagaaaaaaaaggttataattggatggctatttttagtattttgagttttactacaggtaaagttcaaccttaattctgcaattctttttaatatttttttttaaaaaaaaaaatattcagaaagtgtcatacatacatacatatagcactttaattacttaacacctatactctgtaattagtcattagcggtttctcttataaatttaaaaaatttagaatcttactgaatttttctaaaaaaatattatcttttaatagacaatcgtaaaataataaaacataataatcaaaacaacacttcaacaattaaaatacttcaatgaaacaataataaaaatttaatatagtacacattataatatacagtgatattttttaaaaaaactaaatatttatgaaaaaaattctgctcacaataaaaataaaattgaatattttaatatgtagtataaaaatcctttttgcatgatgtgtaattttccttcaaatagcctcaccaaaaataacttgaataatctattataatttgaataaatttatttatactatttttataaaatttatataatatattatatagattatgtttaattgttgaatttattattatttaattttgaatttcttggtgtttaatttgaaattaaaacttcataaataaaaataataaataaattataataaagtgttaattatttggtaaatggattaaaaattattaggttgtcaaaaatttatttttttaatcagccaaataattatatttatttaggtacaactcaatgtgtataca

SEQ ID NO: 44314 - DNA, 1792 bp, Cannabis sativa
ttttttttttttttttttaactgagtgatctcatctgatcccatgtggtcgagcaataattttacttggcattggtcgagcgactctggagatcattctttggccaagccattttttttgactagtgttggccaagagactctaggggtcactctttagccaaactattttttcgctgtggttagcgggcatctacttgagggagtatggctctttgagcagtctcaactcttattatttcttaattcttttacttggatgggagggggcttattgtacttgactgcgttcccccttgatttataagtgtttgcttacgtttgagaggcttccctctcatttcatcattatgccatgagcatctttcaagagctctttaggctcgaagactttcacaaggagaggtgtatttctttcatcgagcaagggtagataatccttgccaactaattttttttttgcacatacttctctcattcactgttgtcgtcattttttaatggaatagaatggatattgccttaccgttctgcaacaaagtgtgcttgacggattccaatgtaatatataacaatttagatgctatttgggtaaccctttgtttcattacattagaacatcaagatgaaaaaaaatgagagaaaactaaatttggtggccctacaagttatttccttgattcctcggtctgaatggctaaacaaaaatacaccagacttgccctttcaacaatggtatttcttcaagtgtgttgcgttccacgccctcagtatcaccatgtcatctatgcgagccagcttgtaggtcccgagcaggatgactttggcaatctgataggggccttcccaattggctcttaaaactcctactcctggatccctaatgtttggaaggacctttcttagcaccaagtctctggtcttgaaggcatgcatgtggactcttgaattatactatcgtgttgtcctttgttcatacactgccaatctgatttgggctgcatccctcctttcttccaagaggtccaagttttctaccatggcttttttgttggtgtcctcattgaaattcttcccacgaaatgagtcaagcttcatctcaatgggaagtacagattcgcatccgtatgcaagggagaagggagttttgcccgtggtggagctgggcgtagtcttatatgcccagagcacatttggcagttcatttacccatcttcctttaagcttttccaattttgttttgaggttcttcttaattatcttgtttgctacctcaacttttccgttagcttgtgagtgcactaccaccgagaatccccgctcaatgcctctctcaacgcagtaagagttcaacaagtctccttcaaactaggtcccattattagtgatgatctagtaaggcactccaaatctacatatcatgaatttattgatgaaggacaccacttttttaacgatgatgctaactagtgcatcagtctctactcacttggtgtaatagtttattgccaccactatgtattttgccccagccctacatgtcggtaaggccccaatcaagtcaattcctcacatggcgaaaggccacaggttggtcatgctcatgagtacgaccagggggcacctgctgtagctagcatgcctttggaatttatcacattttttttgcacatgccgtcacatctttctccaagctaggccagcaatatccttatttcaagaccttccttgacattgaatatcctcttgcatggttactgcattctccttcatgtatctcagataacactcat

SEQ ID NO: 44315 - DNA, 2262 bp, Cannabis sativa
atataaattctattttttgcatagaaaaacttaagacaccaaaaaaattactcccaaaaaagaaaagaaagaaaaaatcgaagagtctctcccagttgctcctccggccaacacacttccccgaaaactctctttttaagtctgaagagtagcaaatagcttagagagaaaaatggagcaggttctaagaatggcttccatgactaccccaagcccaaccatctcctgttacatcaaagccaaaaaggtttccaagcttcctcttattgtaaaatgtcaacaaccacttgaagagccaaacaacgtcaaacttcctgacccgattactcggaggttcttccgtttcccatttcttctgattactctaccatccataactgcattctaatccaaacttattgcttttcttttttggattttcaatcagagaaattattctgaggagcagcgaatttgccatggtcggtgccatctttaatttcaggttcttggttttcactcccgtaaaattcacttgttataattccaacaatcatgtatagttgtatgcatatcatatgcactatcagatgatttcgtttcatgttttgattacttaattgtatgaatttgatgtttttagtgggaaaaagcctgattatcttggggtacagaaaaaccaaccggctttggctctttgtccggctactaaaaattgcgtttcaacctcagaaagcgttgctgatctaactcattacgctccaccatggttagtttcttcttgaactctatttatttgactttattgttctttgtcccatacttcctatagaatcggattcaaattttgatcatgaaaaaatttaatttaggttgaaatgttgaggaaattttggattttacaagtaagaacaataggcttttggcaaactcgctttaccaaaagataataatattataattgaaatcaaaggtcaagaaggaccaacaatgtggggaccctgtaatcattttttaatcatgatctgttgctaacttaaaagcacatgaaacatgaaattggtcaattgtttaaacaaagtaaaaaaaaaataaacacgaaacatgtgcatcaattctcaccgtccattgacaatgaacaaatactgtgccgattgcttttcttactttatttattttatattgttgtttttcaaggaactacaacggtggtaggaaaatgcctgtaagcagagatgtggcaatgaaggaacttcttgaagtggtaaaaaatctttggctcattctctatttgtaatgattatatgaaagttttaaactggagtaatgccagtactcaattcagaaaccacttgttgcagatcaattcgacaaaaccagataaattcacaccgatggtattggaaaagaaggatgattatgtgagagtggaataccaaagccccattcttggtgtaggtggatttattagtaaaaaaaattatgtttttaaattgaaaagtttcttaggcatgtgttgaatggtattacataaagctactgatgtttgttgcaaccattaaccatgcagtttgtggatgacgttgagttctggttcccacctgtgaaggattccattgtggagtaccgatcagcttcgcggattggcagctttgattttgattacaacagagaaagagaatcaaggttatctctttatttatttttattttttgtaaggttattttttacttcttaaaaatatttatctttacagttttgctgaaaatgatccctcattcatttctctaatattttactcctaattaggcattgcggcaagagttagaaaagaaaggatggacttctcaagatagtttctgaaagactgacatctgccattcaaaagcgatttcatagctctaatgacatttctgaaaattcaatgaaaaattatatctagcttttgtgcatggcaaaaaaaaaaaaacaatgaaattttcatgccaagctaatggttaaatttacttcttgtatgataaatgtttgaagtttttaaacccatccagaccactattgtaatctaataattacttttccttgtctccatctactgcaagtgtgacagcaattttcatgccgatgatatcatttctgaaaaccaaacaaaaaaagttgcatctccagtcaatttaatagcttttgtatagcaacaaaagaaattttcattctaagttatggttaaatttacttcttgtattataattgcttcaagtttttgaagggtaatcagaatttgaaata

SEQ ID NO: 44316 - DNA, 2351 bp, Cannabis sativa
attcagaaaatttacagcagcaacaaccagagcagtagaatgtcagttataaagttttgtaagacttcacacatctgtcttctctcaatccaagattatcaatacaacttcatttgattagattacgtaataagcaactatgcaatcactattgttcagaacggatgttaagttaaagaaatcattaatctttaataacagataagaacttaagataaattaataactaaacaagcacatccccaacaaaatcaatgattaattgcttctgtacacatagcatagagcatgtcaattctcaaggcccttccttataaacacatcaagaattaaccaaatttaaaaccaagtcgaggaaataaatagaagaatgaaaaagtgaattaacaaaaacgtagcccctgagctgtacggccaagtatacaaaccattaaagtttcagattcttttttctttctaacaagagaaaacagaaacttcaaattatgagggataaaatgaagtacctttcggaattgctcttctttcatcattatagtgagctaaacccgccaggcccacaaatcctaatagagcagcaggctgcagaaaatgtccaaacaaaaactatcattcttaagaattagaagcccacctttcatcacatgatgatacattcacacacaaaagctcttaagaattgtaacattcaagaataacataggattaaagaagaaggcagcatacaatgacataggtaccccaagtcctagaagcttgtgaatctacgttcattacacgatcaccaccaggcttcccattagcatgatttgatgaatttacatagttacgggactgaatcctcttacaaggaccaaacctacaaggggctcaaacagtacagtaatgtattcagatatcaaactgtgaaggaactttcttcagtatgttgctgaagatatctctttgtatcgacaatgcctaaacatataaggaaaaccataatagttgaatgtctgctgaaagtcattgttctaaagaacaagagtgttcggcatctgacccagggactcaaaatgaacaagttcagatacttgctcagagttccatattttctgttcttacttaatgtaataatactagtaagaaagaaatgagcaccaaaaaccaaccaaatttatcatcaaacataaaatgggaaacaccaaaaaaactagtactactactcttatatacagcctaggtagtatttagtgtatatatttgcactcaaatgcaaagaaactcaattccaatgggtatctgagattgagctataggagctctcagcctctcacccaccctgtataaaaatatttttattaagtaaaaacaaggtcaacagactaagaaacaagaaaacagttcaagggtattgaatagtaccttcggaataaattgagagactctcctgagtggcgtttggaagaaaggaaaagaaaacgagaaatgggcatggtactaaggaaaatgtctatgctttcatgggattgtattgggaagctttcttgagcaagaatccatggcgttaatgtatcggtgagatcagctctgtatattttccctccgatttaatcccaacaaaaacatctacttccttccagcttccaaaacattagatcacaaagcccattccaaagagagtgtaacgccccctattcactgatgggcctgtatcatttgggcattttcaaaagtggaaattacactaaatatatgagatttttttgaaaaatatacagatggcagttttttgtttcttaagttttttatgatatattgtttttgtttatatttttatgagagttttcctagagtatagttgtaatattttatttgtatactagtatagttgtgatgtttttgcaaatgtatgttcatcattgttatctgcgttttcggcagtggacacgtagaattcaggtcgatacctagagcccatcagtgggtcccccaaagaagataaagtgggccaagaccatttcaattggtccttccgagagcatactttagccccgtgaatgtataaccttccgctattgacagattgtgtctagaaacatgtccagtactgtgagtccggaagggtaagacaacgtgttcctggaagattagtccagtttccctttttattcctgcaaataaataagaaaataatcaatcatcagatcttaatagaggattgtatcaagacaaataggaaaacttcctaaaatagataccaagcaattaattcacagttgattgcccacaatcagagtacacgatgttgaccaaatccaaccaaatccgatcgacctagccagtagatcctctccgtaattggctggact

SEQ ID NO: 44317 - DNA, 2020 bp, Cannabis sativa
atgccttatccagccatcctcaatacttattacagctttgacctttaaaggaaggaagctcacaaaaagatgtgacaaatatcaattacaagatttctatctattctattctattctatgcagtatatactaaaaaaaattgtaaaattgaattaataaatatttattaatttcattaaattggtaaattacatccatacaaaaaaaaaaaaaaaagataaattgcatagaatactacctattccttactgacaatcaatcacatatatattctcaatataccttatataataattatgtgaactctaacaacacaaggaagctactatattccttgaatgataaatcagaactattcctcatctttagtgattataaatcccaaaaacctgagaaagaaattcaccatatatataaatatataccgcactattcaaaacacggccgcgtttgagttttttcattgtgttattccaactctttcttaaaataaagatatagcactatactactcttgctagtacatacatcatacatgcatatatataaagaattaaaggttcaaaaaaaggctgctaattaaagctataattataggtatatatctcatatagtcagctcttctccttgccgttggtttcaattccatgcatctattatatatcattaaaatactatcataaaatcatctcctttttctcataatcttttaattgggtcaccctctcaaccagctatagctagctagattatacgaattcactaataatacctttccctttggcatataaaaagcactcaagccatcgatatgaatatcaacaagacaacaacaacaacaacaacaacaacaaaagaacctcatagtgcgtgtgaagaaaatcgacagcaaagttttttcagagaattattgagtgaattgtgttggctgtttagaagggatcaacaggaaaaaatgggttacgggtcgtcgtatgagtctctcaattatactactaagcaatattcatcatcatcatcaaattatcatgttagagggaataataataataataagagggctgttctgtgcggcgttacgtatagtcataagcgtaaattcatgctcaaaggaactgtgaatgatgtgaaggagatgagagacttgttgatcaatcagtaccaatatcttcctcaaaatattcgagtcctcacaggtaactaatcctttaatcgtaatttgcttatttatttatttaattatgtattgttttgttaaagttttattatttaactaatttaagttaaagattgacatatggagcacacaaatatttgcaaaattacaatagttttgatataattcgagtattttttttttttttttaaggggttatagttcaaagataactaatcctatttatttttgtttcaaattaataactattataaaaatttcaaatttatcatttcatcagtttaaattccatagatatctattataaatatatatatatatcatatattaagtacatatctttacatgtccatagattagttaaatttgaaaatgtcgatgtgtttaatctagcttatcccttaacatgtcattaaaggaatctaagatatttagggctagtttgatacaccgtattgtattaagttatgctagattgtattgtattagtattaagattatttaatacaatactatattttgtattaacttgtattaaaaagttgtgcaaagttattatattttcaataaactcgacctcaacgcaaatttcgagtcgggtctgggtccacaatctaggtcacggttcgggtctgggtctggggcttggggttcgggattcggttcggaattgggtccgggcacgggtcccgggtctgggtctgaatacgagtcgcgggtttggggtacggggtccgagtctgggtctcgggtacacgtctctggtccgagtcagggtccgagtccctaattgaggtcatatactgtgtaatatataccctatattataataataataataat

SEQ ID NO: 44318 - DNA, 2715 bp, Cannabis sativa
tggtctcagaaatctccgatgaataaagatgcttgtatttaactgatctcctgtgttatgagtagtaagaccgaattagataaaaaagaggtgaaaaagggagggagtacagtatgaaaaagccataatgtagtagtgattatgatacagaaatcatttctatacctgagcatccctggtcgacgtgatcgcccaatcttagatggattctcctcatctgagtctgactgagtgctccccatctgcttacgtatttcttttttggcatctacgcaagagtcaaaacacagttaaaactaacttggtaaaaccatgttagggaaaagtcaagataagataaacctgagacttactttcatgtctttcataagccatgaaaaactcttctgggtctttcaggttctttaagtccaactttggttgctcaagactcttagcaggctgactgtaaatgagtatagagcattaatcaaatggttattgaagaaagactccacgaaataatatggaatcaaaattttacctggaattgggcttcaacgaaaaccgggctcgtttacgacccaaagctggccttctttctcggggattaccctcagccatgccaggaacgatgttattactgtccatcgcaactttagagttcaaagatttggaattaccatcaacaatgacctttgcctggtctcttaacttatggggactccgtaatgcctgaataacattgtttgagatgaacaacaatcaatatcttataatcaaattgatgagctttaaaacataaattcttcgtttttactaaaatcaaacaaacccaaagtcgttttaatcacaaaactgtacacaattagtcagctacccgcacaagaaaatgaagcgcggaaagttacatcgattttctcggtcaccaaaccaaatacgcaagtaaagtaatgacattgaaaagaaccctagaaagcttaaaatctaaaaaagtgagaggagtaccgcggaattgaggttgttgtggatgacttgaagttcgcggtcgaagtcgtatggctcggaagattctggcaaaaaatcaaagttatgggagaagagagcaaaacctgagtattcctgaagcggatcaacaagatcggaggccagttcaccggtcaccattttctcattctaggtttcctgaatcgagttctgaccaaaccctagaactggtagagtagagcgaattcgaaaaagagagaacgagcgggagagcaatgtattttgattgcagatgtgcccctcaaatgttccattattacttttatcggctgtttaagtccaattatttaattattttattttttattttttgaaaagaagggtgtccaaaatttgattttgatccgttgccgtttcgactagatttcctttttgtttttttcttgaaaaacatccatgcttcttttttagaataataaatattgaccaagaaggataattttatttgcattctaaaattttataaaagcaatctattttaaattcttttttataaaaaaaatatctttaattcatactaatcttttaacttttttctttcttgttatattcttaagagatataaaactttattatatagacagcttcgtcaaaaaattgattgaaatgagagattgttgccgtgtaagagatggttgagataacttcgtcaaatgatgagtaatataagttttatgagattctaactcaaaaagaaatcttttggaagtaaaaggtgaagcagttttggttaaaagagagtgatgagaatagtcgttattttcatgcgatagtgagtgctcgtaaaaagacaaattatatttctaaactacaagatgatagtggcgcatggtttacatgggatgatgggcttcctcagttggtaaagggttatttccaagatctttttactaccttggatgtcgagtggagtaacctgcttgatgatattcactctttggtttcagcttctcaaaatgatgatttggtgcaatatgtttcgaaagagtaaggtcttgtttcaaatgcatccagagaaggcttgattccttatgtgatgagtttggggttttatcataaattttggcatattatgggggcagatgtggcgaagttagtacaacaagttctctcttcgggtgagtttccaattgatatcaacgacaccaatattgttcttattcaaaaaaaataagaaacatgtgaagattggggagttaaggttaatttctttgtgtaatgtggtctacaatattatttttaaggttatggccaacctatttaaagtggtgttgccactagtaatttctgacacacaaaatgtttttataccgagtcggttgatttcctataatatatcatggtgtcatttaaaattatacactactttaagcgtaaggtttccaaaaattaatacgagtaacgtgtataatagggtgaagtcaagtttatgtttaaaagcccaaacttaactctcatctcaaaaaaaccatcacaactatcaaaagagcatcacaactagtctcaaaatacctcagaaacaaaactccgagctcacatactccataacagccacaaaacacaaaatcatattaaaatcttaaactcttcccatggaagaaaagaactaacccataccttagctttctcttcaagtgacttactccttggcttggtttggtttgctcgagaaataagacaagggtttgt

SEQ ID NO: 44319 - DNA, 1225 bp, Cannabis sativa
ctctgggaagtataggactatctattttcaaaaacttgcacatgatagctcaaataggttgccatgtagtttgctcccgaaagtttagaggttcgaattcgattaggtggtttgcttccacaaatgtgttgggattcaactcttgggctgagcatccacatagcaatatctcgtgttgtattttaacacttgtgaagctcatttcaggattaactactatcaagaagggggtcaagtttatccacgcctagatgtttctacagcattcagaaaagctttaacaacatgggcatcatgggttgacacacacatcaacccaagaaaaacaagagttttctttcgaagctcagcaccttcccatttcaggttttcactttctttctggaaagctcacttcataaatgagagtttgaaccttttcatgttaaatgctgagtatattttattgtcaattattgagcagtggagggcagtggaattcaggtgggcactgtaataaagcaactaaaccacttactgaaatttcgagcacatttgtatctgacaaaaatgtagtagtagaagaggtgatcaaacagatgaaaactcctgttactgtgttgaacataaccggtttatcccaatataggatagatggtcatccctctgtttatggtacaagaagatcaaacagtcaagattgcagtcattggtgtcttcctggggttccggattcttggaatgagatactgtttgcttatttataccagtccaaacatgggttaacaggattttagccatgtaatccagtgatattctttctttcttttatttatttgtttgtttatatcttggtttagtttaatttggaatgaatgctgacgatttctttgtaaagagcaaaaaaatctcccatgatggtacagttaaaaatgtagacagattctgatacaaagcagttgctgcttgtggaggtggagatttaaaggggtctcaacattgtgtagcaataggtacaattactcatactaggataaattttatttaccaataaaatgtaatattatagtcataaccctacaaaaaataaaatgtttggggtgacattttatccggtcaacgaaactggctacaggggtaatattctgcttacatcaccaaatccgtaccacttttaaaaatttaaaaattttattttacaaaaccggtcccattctcataatatatataaatagattaatttgta

SEQ ID NO: 44320 - DNA, 1263 bp, Cannabis sativa
atatatatatatttcattaacatcttagtttagaagtaatatttaacatgagtaaatcaaatatactataatttggttaaccattacaaatgttacagcgtagttgattaagtagacagtaaatttgaatcttaatctaattttaatataatcaaactagaattggttttccattaattggataaaaatggtgatgaaaatataacagctaaggagctagtgtggtagaccctgttatcttttttatattggtatgaaaaagaagttagagaaagaattaattaattccaacgctggtggaataaattattggcaaattttatagtgcaccgatgatgcacttatatttgttcagcttttaagaaaaaattttagtttattttttttattatttttctatattttaattatttaagacattttacaaaattttaaaaatttaaaaaaatttaacacgctgaaaataacgttcaaatatttatttgacacgcgtataaaataaaaaattacgcatgttatagactatttgaattttattttcggtacgttaaatttttttaaatttcttaaaattttgtaattttttttaaataatttataaaaaaataaattaaaatttttttcttcaatatcaaaataaataaaaaaaaaatacattggtgaaactgttttagaggtgtattgaagaagcactttaaattataaatagtgcatatatagattcaacttgctaaacttttaaaaagtctactgctaattaaagtggtcatctcagcagtaaacacatctgtcgatttacgtacaataacccacctaggctggctattgacttttttggtgttaaaataatagaaaaccacaaagagaagacagtttctatttttacttttaatagtgactataaataataaataaaaataataataaggttaattataatattttacccgaatcttttaaatagttgaaaatttctgttgcaccttgtagattattaaatttaaagatttttttattaatttttgttcaattttattattgtagaattttgatatgtactaaattgtgtccttaaattttaattcacgtcagatttttattaataaatttgaataaaatttaataaattttttaaatttaacaatctcaataatttaaataagaaaagaaatttttaacaggcatgaaaaaattaaagaaaaagattttatactggtatgtatgtaattgaaactgctttggttggttggtatgtaatatgta

SEQ ID NO: 44321 - DNA, 1275 bp, Cannabis sativa
  modified_base (792)..(792): a, c, t, g, unknown or other
ccagaaaaagagcgaagaaccactttgggtttggggcgagacgacggcctaaacccagatggagaaaaagacgggaaagcagcagaagccaccggaaggcgaagcgaagaagacgaagaagatggagaaatggaaggcaaggatgacttcagagacgccatgctccatattccgccattactgctagtgggagcaattgcatttgcgcaaaaccccatttgagctctactagtacgattatggccgcagccgcgaaacccaatcaacaatttttttttttggagtgacggtggatgaagctctctgcttcttcttattctgtgaatatggataaaggagagagaaaagaagcttagttcacttgtatgttttggccatggttcctcgggatttaatctctgaaaatttgagaccgttcgattatcatcgacggttctgattcgattacagggaggaattgagttgagaggagaaaaggttaaaattacgtttacacccctttcttacttagtttcacgaacctcattcgtctatatgattttaatttacagttacttgtgtaggagtgtatctaattatcttttttgtatgtgtaactgtcgttttaatacattatggtcgtttttatgcattactaaaatattcttttgtatagctttccttcttacttttaactctttctcttatgatttgttcttgtttccttctctttggtgatatgttgatttgttctttttttttttttttgaaatgtaaaggggcataaaaagtttcacatattttaatttaatnaataatataaaaaatcgttaactactcacaacacgttatattgttatagtgttaaacactttaaaatatataataacaatgctctacaatttattaagcaatattattaaccatgaatagctcataaagtaacgccacatatgcaacatttaaagagagaaaaaaaatattacttcacattaacaattcaagcacttttacacgtgtgttattactttattttatatagatatgtcataaatacttaatatttgtaatagcaataaggttctcttcgagacaggacaaatcttcaaatgcaaactattgcaaattcattccacaattcaaaactaaaaaaggttcaaccactatttatatgtctctaaacaaagcaaagaaaaggaaattacatctcaaatggaaaagtaaaagtggttcatccagctagcttctaaactcctttcagccatcacaaactctcttagccatttggatctcact

SEQ ID NO: 44322 - DNA, 3356 bp, Cannabis sativa
  modified_base (2738)..(2739): a, c, t, g, unknown or other
ttttaggagtttactaataaacaaagagaagtgaataatgataaataatgataataaaaaaaaaaaaaaagagaagagtgaagtgaataataaagggttatggcattcctacacctatagcggtaggggaataacataccttttccttttactcttatttttacgtggatctacagatttctcctgtaataaaactttagtaagcatttgaatgagaatcattacctacaaatggatcccatttccatttgtaaacgtgttaaaatcagaacactgtctcttcgaagtattaggtgtcctgagctttgtagggctaatggtagggttttgtcaattcctaatgtgaaccatgttatagtaagtttgtattgtaactgcttatgtaatttcatgtgcacttttattttgtactggttttgttgttgcttagttcttattgtgctgtctgttgtttgttgtttcagcattgactccagagttgaagactacactggacaaagttgtcagttctcagaaagtgatcctttttatgaagggaacaaaagactttccacagtgtggattctccaacacagtcgttcaaatattgaggtccttaaatgtacctttcgaaacaataaatatactggagaatgaaatgctgcgtcaaggattgaaggaatactccagttggccgaccttcccacagctttacatcgaaggagagttttttggtggctgcgacatcactgttggtaagttgctatgccaatacttggtctatgaaatgatctttctactattattgttattatgcacgaacagccagaggtatatattgcgtttactaattgagaacatagttttggactctttaagtggtgaaatattagttagtatatataatttttcatatggcatgaattatcaatcaatagaactcagtgttctcttacctgatatatgaccactacacgtttatgttttatctttacaaatgaccattagttttattaaaaaaataaaaaaaagaagaccgttagttacttgttcatctggccatgatttttgggtggttgtattttatttgagtatataagctgaatttgttgttctgatacctttttaaatgaaaatattaaatttccagaggcatacaaaagcggggaattgcaagaactagtggagaaggctatgtgctgttgaggcttaaagagttcaaaggagtgtatcaagtttaattttacgtttatgttgaccaatattgtaaaatactttaatgatatataattcagtgtgcactttgccactaaataaaaaaaatgaaaacaaaaaaaaaaaaataaaaactggaaagaagctgtatagtatttaacaggatctatatttatcaacacttatgttgattataaatctataatctaacaatttaaatatggataaatctaaaacgataaataaacgtttaagaaatgttacaataatgaaagtgaaatataatttttccttccatttagtttctaacttttgattttttctgttatagagtattatcaagacttgaacttagatcttctctttttcgattgtgttcatcataggcttttacaaaagcctgaatatcaactcgaatagtgtgggtttatgctcaaactcgaaaccctaaaccttacgcacgcttgaaatactcgggcttcctcttgtcctcgtgcgtgcattcgcatgtcccctaggtatgtgcatgctggtaactagtaaccaacacaactggttaccaaatagttactagctgaaaatcataaaaattttgaaaaattgtataaaattatatttttcaattttgaatctaaatatcagttcaaaattataaagttaaatagtgtgggttgatactcaaattacttttgaataattaagagagaattttactagtgaatttcgaaatataaaaaagaagagaagagaaaaggttatgtgacaagaggttttccaattctcttctctttttttatgtaggcattcaattagagttaggtttagattagataggcttaaaataaagatttgagccgaaatctaacgcaagggatgaattaatgatagactttggagttagatttttgtcactttatttcaactaatgaaattaaagtgtcttttctaatttatagtactcttcttatctaattatttaaatagcaatattattgtaataattataaaaaaatatgatttaaatataattattaattagacccgcaaagagttttaattaacaaacaaactcttgtttctcttttcttctcaaaattacccaaacttggtgaaaattcttaaataagacagtctatttttgaattctaattgacttaataaatcaattagtcgagtctacaagatgatattgttacagaaaatgtagagaccgtgggcctatgtaaccaagtatagatacaccatgaatttattaattcctcctaactccattatagatttagaattgcactcatgattacattaaatgttctatacaccaagtatagatacaccatgaatttatctattgtttcaatcacaacaatcattgatcctccatagacagtttacattgtgttaacgcagattttcgttaactaaatttgagcctcacggtgatgatttcacacagaaaaaataaaagctatagtaaagtaatatatgaacacatgattttttacgtggttttgtagttaaaattttgcatagtccacgagtcaatnntattcagatttctgattgtgtttttttttttttggcctctctcgtctgagatttttcgtccccttttttgatcttgtatgccactatttataattacatagagggcagtaaattacaaaagttgactgtaatcgttacagcaattattccctcaaatcctgagatttgattacaaatcacgctaagtaaatgaagtttttatttataattcacacagctgtaagtatcccgcttttatggggccgagatgaacgcacatttaaggatatatggtaagccttatctcgtggggatgcctcgctaggagccgggttaactttgatggcgagcagttgcttgtcatcagactatcagagattaatattattttaactctgataactatattttctggtgtcgagataatcttgctcgcatgtatgccatcttacagcgagatagtcgcctcgctatttgtcatcttaattcaccatactgtttatacttagtttgtataccatgtaatccacgctaagtatttttatcgttatcgtttctctttcacgcagcgaggttgaagcctcgtcatgaacacttgcactcacatggtttcacgtcgatacataagttagcagttt

SEQ ID NO: 44323 - DNA, 3441 bp, Cannabis sativa
tggtaataaataaaagatttggacatccacataattaataatatttataacataaaataatttttaaaatttttcacgataaaatcttttgacaattaaagtatcgacttaaggtcggccaaattaatttcattttgttgaacttcaattttttaataaattttgtgttgtaaaaatgtgtgtgtagtttatctttgagggtgaaaattctaacctgctcatagtctcaagcgggtaacaacaaagattactattgtaagaaattgacttcatacatagagaatttatttactgtggaaacacttaaaaattaaagtacaataaaataactatttatcaatagggacataattttgttccgtgattgtactttcacggaatgtatttcgtggtgtacatcagccgttagatgggagagttattggatctagggactggggttgatctaggagtaattagagttaaaaaaatggtaacgtaccttgagacccattatatatatataccacacactttacaaaaaacacctaagtgcaataaagagaactatatatatataccccaaatatcactatactaatcatgtacttatattcatttatttaattaaggcacaaacaatatagtattaaatgattaagtggaaccttcaatattttcatatcatgtgtatcaatggagaatagatttacacaatttagtgtaaaatctaacataagattggaatattcaaacaattaatgaagaatcactattcactaacacgtaattatttaattaaaaaaaataaaatcctcattagggaaaaacatacaaggccctctaatcaaataaaatttgtgtgaatgtaaataatttttttggtctatatctttgctattaagttaaagtgaaactttaaaatgatattattactattcttttttatattaaaaaaaaggaaaaaacaggcaaagaatatcaagctagatattattttgttttttcttttaaggtaggatatccatacacaaataatattgttatatatttaataatatacaaatatttcttaaataagagtaagtatgaaatatttacaggctatacatatacaagttacaaccatctctatgagtgttttcaacgctattagttcaaaatcatggattgtaataggattagcagtgtcgacaattttcttcgccctctaacggatattcatattttagtcgtggatgatgattccacaaccctttctttaatttcagctatgctcaagacattgagatacaaaggtatttaatatattatttttaattatataatacatataattatagattgatgatggaaaatgctatgagtttttctaaagctaaagtattgtccatccatctatcattttgttaatcaatttttattaagctctaatattttgatttatttaatcaatgatatagacataatttttaatttaattatttttatttttattatatacatgtggtttatatcaaactaagtgtagcatattagttgctctttcaattatataattactcttctttttttaattaaaaaattgttggtaaaaattaatacgcaagtatacgtaattgtaccaagtaacaaagtaaaaataaagatcgtttctacagaatttatattactgtttactaacaaatcagtttacgaattctatttggctaacaataaattgctttcaaaattatagaaatgacaaatcaataaacataaaatagcaatatgaaagaaattaatagcggatttacaagaatgtttcttactctttttcaaaaaattgcaactcaatttacatatgaattttctatatttctgtgataaattttaacacacaaaagacattgatcaatagagtaatcctaaaactacataatttatataagtagtttcatctaatatgtaaattgtgattagtcaatatcatagcataattaattttcactttccaacttttgaatcaaaatcataaattatgtaaatgatgatcaaacatttacaagcattcagaacagatcaaataatttgaaataaaagggaagagagaatcatgaaatcctcataaaaaataataaaattcctagtacattaaaaatcttagaaaaatgtttagttcaacattgtaattcttaacaaaaatcaaaacgaattccctaaatttaatattttctcttccttgagcaaagatctaaacaaactaaataaagaaaacagaagcaaactagataaatcattattattctctaaacttctttgccatattacttaaaaaatctcaaggcactttgtaaacacaatttcaacttattaactgcttcacaatttaactttaatgctcaaataggaaaaataaaaacatagcttacaaatgactacaattaatggattctattataagtgctcaactcaagccatcattatacaatcaaaataatcaataggcttgcatttatacctttctctactaatgtcagcaacacaagtttagaatcaaaaggactttaaatgttataactttagacttaggtagtaagtagataaaaaatcattcaggctcaattacactatacgaaaattagaacaaaaatcaaacttcccacttacaaaatagtcccatctccaatttacaaaattataattgaaagaactcacaattagcacaaaaacatcacattattgactttttttattatttattttgaaaaacatgaataatttaaataccttcaaccaacaaatgcaactttgtacattattctctcaaccactgatacattatttatctagataaatgtaagttctatcatattccaacaaatacaaggtaaatgcttagtgatgctgtaattttgtacattattctcttagtcatcaatacattatttattcgtatatacaaaaataatcacccaacaaaacttttcccccaaacttttttcttaacatatgacatattttaagggtcaaggaaaaataatagtaggtacacttttggctaaaaaatattgttaaacaacaaataacatgttacagcacaaatgagtaaactagagataaaataaaattggtaagcttgaaaggcctaattgttctaacaaaattcatttcaaatcatttcctaaaacttgtgtcatcaaagatttcgactcaaaaggtaaacaaaatgcaaattctagcatattctaacaattttaccacaattgctagtcaaaaaattataacaaattctaaataattgcatttgttgcctcctaaaaacgcttactttagtatctctagttggacactgactcattttcacaactcaactatggtcaagtctaccacttttgtctttcaaagtcaaagtatcatctataaaaactcttcttttactattgagaatattaaagtatctccaaagtcatcaaactcctc

SEQ ID NO: 44324 - DNA, 4899 bp, Cannabis sativa
  modified_base (1892)..(1902): a, c, t, g, unknown or other
ggcacaagcctttcagggggcacagaacactctagcagcgacagtagttgtagcccccaatcatagaaatctgtaccctttaagagtcgtattaccagccttagatgttcatgtagcatttattttaggtggacctcatatttccagaagcactcaaaatgcacaagagcggtatttgaatgagttgaatcaaggcgaaagtttccacttggtgaaatcacctgcctagcatccaaggatgatgaatttgcccatgacttttatagaagatgacgccaggcttgtgcactttcctcataaagactcttcggtaatagaagctcaaatagcaaataaaagaggttctagaatcttcatagataatggaagctctgtgaacatcattttcaaaggagcctttcatgccattggtctaatagaagccaaccttctaccatgtttgattcaactgcaaggcttcaatggatatacgttgatccccatgggaaaaatacaatttctaatgactattaatggggaagttcctaggagtaacgcagtatcatccttcaagtacaacacgtttgtgatagttgattgccctactacttataatgttatcctgggtagaccatttttaatggatattggactggtgacatccatctgacatttgttcttaaaattccccatcagtaccgaatgaataggaattatcagaggagatcaaaaaagtccacaaagttgctatagcatttcaacaagactgtactcattgtttgggaaggaaataactctaaagccagaatatcctttcaaccagcacaaggagtgatcctgaaagatgagcttgatccacgagttactatagaacgtgtaagctactgtgcctcctcctccttgccgtcgacttccaacagatacataggaggattggtcgaccaccccgcacaagccacgggaccgtgtggtcccatcagtggtcttcaaaaaaatggacctaaaagggtcgggttcccattttttcatcatgttcattgtgcatggcattgcatgcaacatatgcatatgtgaaaaatcacatggctcaccttcttgagcctcacggctcgaagtcgcagtcctttggggtttgtggcttgtggttcgagcttcaaataacgtcatctatatgaggtcagggtttacaccttaaacgcaagctcactcatcaatggaggaattttggattttgaatttatattatttaacaaaaatttgcaaataaattacatcaaaaaatttataccacaaactatggtgcacaagttttctagtaaaacagtaaaatttctaaccaaatttttatcatataattatcaattcacattcatgcataaaataatactttcatccattcataatatatcgacatatatataaattcataaattcccaacacagtatttaatgtatgtaattatgaaaaagactctagtactagttgttgattattatggtccatatctaagttagaaaagttgaagcgaatttgataaaaatagtttttatccaatatgaactataagcccaaggatctcaacataatatatatagaataaatctagactattgaaacaagacaataccccttgtagcctatcaggggattcttgttatattttagtataattacgatcatccaatctaagaactattgttgaagaattcacaccgcaatcatctaagccagcctcaatatactctagaatagagtggcctattagattttataggattaataaatttatctatcacaatgtattctcaactaatgagatactgtaattgagatagagttgatcacaatctcacaccaccttagatggtgtgttgggcgtgtgagatgagaagagagagagagagagagacannnnnnnnnnnagagagagagagagagatagacagagagcgagtggcatgcaagagagacacaggagtggaaaaatctatttttattttctctcttgttaccgtattatttctcttatatctagttgttgtgtattttttaaatatgatactatatgtcatatatatagcgttctaagtaaagcattttaacgcgttattaaaataaaaagaaaatatctaatttgatttgaattcacaatttaaattcaaatataaatatctaatttgatttgaattcacaatttaaattcaaatataaatatctaataactgattaataaaaatcgattgaatccttttattttaatattatcctttttaattaaaaaaattattcaataatatatttaatttaataattaaaagataattaattaattcaatcaaatgaaatacacaactttggaccaatccttcttgactgaaatccctgctgttggtgatgaatttacatgggctaggaatcgaaaaagtgcatctagcttaaaggagagattggattggtgcttcattaatcatgtatggagagataattttgtttggccaaaattgtcacatttagattattatggatctgatcacagagttttattggctgaaatagacttcaatttgacaccacctgctcaagctccaaggaaaacacgctttcgttttgaacagttttggttgaaggataaagagtgttctgaaatcatctctaactcgtggctgcattcatcagaaacagacccagcttctcgtttagtgtcctctttacgtgcttgtgctaataacctccatgattggcattataggaagtttggaaagatgaaacaagacatcaaacttgctcaaaaaactgtccacgggttgaatacatctgcaagttcagacccagatttctctgcaaaagtgcattcggctgaatctatattggatgaattgttggctaatgaagagcaatattggcaacaacgttcacgggttgattggcttcaatcaggagatcgtaataccaagttttttcattccaaagccacagctagacattcaaacaatagaattaaagcacttacggatgacaatggaaacacagttacaacaaaagaaggcatttcaagagtggtggctgattattttcaagaactttttactgcttccaatgaagatcactgggctttatctcatgttctatcaaccataccaacaaccatttcggatgaacagaatgatttcttgtctcaagattttacagcctcggaagttcttacagcattgaagactatcggttcagataaaagtccaggtctagatgggatgtcagctatgttttatcatcacaattggaatattgttggggaattagtgactcaagtggctcttgatgtcttgaataatggaaccaatcctgaatctttcaacaagactcttatcactttgattcctaagatcaaaaagcctaagaccatgaaggatttccgtccaattagtctctgcaatgttacatacaaaataatctctaagatgctagccttgcgatttaaagaagttttacattctgttatttctgaaacacagagtgccttcctttcaaatcgcttgattacggataatattcttgtggcttttgagatggtacatagcttgaagcacagaactcgtggctctaaggggtttgcctcaaacttgacatgagtaaggcgttcgatagggtggaatggtcttttcttgctgcagttatggggaagatgggttttggtattaaatggatttctctcatcatgacatgcttacatacaaactctttttctttcctaatcaatggagaagtctcgggttcagtaatacctcagcgtgggttgcgtcagggtgatccactctccccatatctatttctcatttgttctgaagggctttcgcgattgttgcaacatgaggaacagattggtagacttcaaggcctggctgtttctcgacattcaccatccattacacatcttttgttcgctgatgatagcctcttattctgtcaagccaatgatagatcttgtggttccattaagcgtgctttggatgtatatcaccgtgcatctggacaacttttaaacactgacaagtcggttatgtccttctcgcctaacactcctgaagctgttaagctttcctttcaacaaattttagggatgccgatctgtgcttgtcatgaatcttacttggaactcccagcttacagtgaacgagataaatcccaactcttcaataacataaaggaaagaatttggaaattaatgcatgcttggagtgataaaattttctccattggtggaaaagaagtgcttttaaaagctgtggtgcaagcgattcctatgctatgagttgttttcgcttgtccgctaagttttgtaagcaaatcgaaactatgatggcaagattttggtggggatcttcaacggataataaaaagatacattggaagaattggaagtctctttgtacttctaaacgagatggtggcttaggatttcgatcatttgtacattttaaccaagcttttctagctaaacaagcctggcggatttttcaaactccaaattctttgctaagtcgtgtcctaaagggtcgatattatcatcaaaatgattttatgacagcaaaagtttctggtttatcatccttgacatggcagggaatcgtttggggcagggagctgttaagcaaaggtttaatcattaaaattggagatggtattggtgtgaactgtgctcaagattcatggattccaggcaatgaatattttaagcctctgcgtttcacaggcagctgcagtaatttggtagcagactacattactgacactagggaatgggatttggagttgcttcacaatgatttctctccagcggatattgatagaattttaaccattcctttgtcttataattccacacgtgatcgatggagatggcactatgattcctctgggga

SEQ ID NO: 44325 - DNA, 1441 bp, Cannabis sativa
gtttgaggatatccctcaacctatttactctgttattgtagatgaactctttgtttaatttataataacaagtattttcactcaaaaaaaaaactatgcttgttattttcaatgaatttattcatttctttcaaaaaaaaaaaaaattaccgtatgtgataaattagaataggttgacacttttcaacataaaataccaaaaacaaaacagttaaaaataaaataaaactgcaagtcgtatttccattggcctatgctattcatttcacaacctcatcaatcatctctgccatcttcactcttcgttttcccctaagtgtactcgatcagcagctctgctccctagttggttacttcccacagtgcttggtccgctcctcactctaggtaccatcattccttcgatttcctttttctttttgttttgtttttctcctccgcggagaattgtcgttcgtattttagctttttcttttttcactgtaattagggatttatgtacacgaaatttgatccttgatggttgaaaattcgagtataataacaacttgtttaaatgctctcattacaatattactcggttgcttgtagttaaggatttatgggggcagggtttatgggaaacgttagatttagggtttatgaatttcgccattttgattcatcgcaattatgatagtttggtactaataccagtagtctagtttctttatgacgtcacaaatcaactttttttttagatataaaacaactgtgctctgttattgaattttttttcttgtattttggcatgcatgtgtatatatatatatatgtatacataaaaagtgactatttaacgttatttgttggtttaacgatttttttttaacgatttcttttttttttcttttaattaaatgaaagacgttagcctcccgttaaccttccgtgaacctgtaaacctaatttcagcgaagcccattttacttcatagaccacacgataaagagccaatgttctaaaaaatcataaaccaacaatttcgagtgtaagactttaattagattggagctgtgtttcttgttaaaacaatcagcgtggaagacttggcaagcagtttcaatggcgtcgaggtgttgggaatcgaattcccttaattgtctataaacgtgattgtagagagagcgagccatggattgggtccgccatcggcgatcttaagcttccacattggttctttgtcttctcctaaatcaaaggaagacccaagtattcctttgctctcatctgtcttcttgttaatttaggtctttttcatttaaaaaaaataataatttaatcacaggccagtgaccatcatgaaccaaattaattagtttactgaaacagatttcatatttctttctcatcgattgcagttctgttattttacaagagtgtccaagctaaaggtcagaat

SEQ ID NO: 44326 - DNA, 1711 bp, Cannabis sativa
tgtaaaaattaaattatatttagctaaaaagtagttttgaaatatttttacatcattttttatcatggtgctctattgtgtatgcaagttattaattcaaaaaaaatatgttcattaaaatttaataataaaatattaaaaatagtataataataaatataaaagggtgatatatttatatgataatttagtatactataataaattaacttttaataagatgaacttatataatttatttacttttttattagagatttggagatgctctaaatagagaagaaacagtattaattatgaatgcctttgactttgaacctaattaattaatggcataataaagtttagtggttggtaaagtatatcactgggaacccaacaaaaaacgttaatgcaaatgggaaaataggatatcgtggccagaatagattggttcataaagatgtataaatatattataataaataatagcgtgaacgttcgtactgaaaaagagaagtaataagatggtcttgatatcgtgatgtgtagccatcaggagtatcagagatgatgatgagatggctagcattatttaatcaataagaccgtgtatttagtcaacttgatcaaaaagtaacggaaagtgactgatacttattaatttccttggagtaaatggcactcttcttcttgcatggttaagttatattacgtgtattataaattcagaagtcaaagaaactcaaactagcctatttatatatataatatatggggcagttttttggtataggcattttaaatttcactgaagtaaattagtataaaagaagcagtaagttggattagaaatcaattatgacagattgtttgaggttattataaaagattattgtaattttttaatctttaaataatattttcttattttttattaaacaatctataatataattgcttataatctttcttttctcgatcaaatatacaacaccaatgatgttcttattaagataaaattttatttttctgaactgatttaataaattaataaaaattctttatttacttttaaatatatatatatatatagcatatttaacgtatatctataaataatagtgtcacgtacgttaacattttgttacatatataatgtatatgacatatactcaattttttaaaatgagaaatatcattcattaaattggtagcagcttgttaggccgtggacagaagtttgtcgtattgtctactcaaataaaaattaacatcctttaatcctactcctcttaataaaattataattctaaaggctacagctagcccatttcaaaaagaataataaataataaaaaaaaaaaaagtaaaggctaaagcaagctttattaaccgagccaaagtccatatacttttctttggaacttttgaaatcaaactcttattagtatgtgttaatattggctaattagcaatttttcccatcgaatcttgacatttactaaattatgttctctgaactttttttgccattaaaaattcctcctgaactattaaaattattaaatttaaagacttttatctaattttagtaaaaaatatttaacatggatgaaagtttagggggcatgatctagtacatataaaagtttaaggggtatgatttgatagatatcaaatcctggggaagcatgttttagtacataaactgaaacagtaaaattgaatg

SEQ ID NO: 44327 - DNA, 3203 bp, Cannabis sativa
tggagttgataagaggtgaatcaatggagccagcgtcattaacatgagcagcacgaacaggagtggaagtgaaaatcttccgacgaccaccagcgcgaaaatccaaacccgattgaactcgaccatggaattctctactcgacaaagtaatgaaggttcttctggtagtggtaatgctccccaaccattgattcgtctgtgtaaccctagccaatataggaaccgattcacgcattctcgtcaacaatggattagttgctcctgtaaaaacgtatgaacgcgccattaacgtcttcgccgacattttcagagcttcttcttcttcttcttcggtatcttcacaacctgaaaagaagaatcagacaagagtggaaaatctcttcggtagaggtggaggagaactgggccaactactataggcccaatatataatgggctgaaactgagcttgaataaggttgatgggcctacaacaaagcttacaacggcccaaataagaaactgtatgggaatttaggataatttctaaaattacacaaaaaataaataaaaaattacaaaaatacacttgtatggaatttttacgtttttatgattttatttatagaaaatatggtttttattttttaatgtatttttaagttgtattcttattaatgtgttaattttttgttgttgttttgatgttgtttgtataatattttataaaacacaataaaaatgtaaaaaaatcatttaacataaaaatgaaaaaatttacaaaaaataacatttaatattttttatggctttttaaggtataagtttacaaaaagatcatttttttaaaaaaataatgttattatacaggaaaattttagaaaaaaagttagaaaatatttaatatggagaaagctaactggttactcctatagttaagagtacctggttacccttatctaatttttttcatattttttaacattttcttcaatttttctcataaattaacttttttgaaaaaaaaaactatatttttacacaaaaattataaaataattgaattacttatatttgaaataagtaatctagcaaattataggggcaaaacaattttttccctaactatttcttattttacagctcttaacaaaaactacacatttttcacatccattgtttttacattagaagaactttttaattttctcaaaattacattaaccatttttataaaacaaaacatagataacaacacaactacaaattatatgcaaaaaatatgttataaaagtgttacattgttacattgttacaaattattttaggctcagattcgtaaaagtgttacattgttacaaatataatttaatatcagaccttatatattttaattaataactacaattattcacattttataattacacctataatagttttacatctttaaatatgttaaacaccattactatcctttaagtaattctcaatagcaatactcataaattaaccttaaagttatcccctatttgatatctcaatctcattgttacttttacattattgcaataggctattagtgagaagagcaagctagttttccacttttttttttccctctattatatataaagccttaattataagtataacaaaccaaaaaaaaccattcaacattcaagaaacttccaaatatttctacatatataggtatacactcaaacttaaaaataaggagtccaaattatataccaaagttagacattttttttcccattaaaatatcaaatggccaaaggtaccaaagaaagaaaggattttctagataattaacaaacacaagaataatgaattacaaaaacaaaagtcttaaattgttggcaaaggggtctacacaactacataacataataacatacttttttgccaagcttcaaaacctcaaacaaaatctctattcttggttaaatccacttttgtgtttcaaatatttgaaggtcattttcaactcatgtatccaacttgtgtacatgaaagtgggtaatatcccaccaagtagtggatattcaactaattaaactaacatgtgtaataagtagtatgagacaagtcatattgtaagaaagaaaagtaaaagagtatccaagatggagatcattgaaaatgagtagctatacatataaatatatattagagcaaatcatttttggtgggcaattgttaggtaaaattaagtaagaaaacataaacaagaaggggacacaagaaagaaagtttgaaaaagttttatttaagggaccccttgttattgaaattactactaaaacaattaatatataattagttttgtttttttatattgtttttaatgattatttagaatttttacttctcaaactattaccattattaaattgtcatgaatcttttggttagttaaaatttttttacaaagtactatttacaatattgaattataagacattcaataaattttatcacatgtggcatctaatgtgttattaccatatcacatatgaaatttaaaataaaaatgaatgtacaattttaaaaaatatatttccatctcaataattaataaaaaaaattaaaatcaatttttgctattatttatatttaatatttcaggcaaaatcaaattaaactattatgatgattatggttgtgaaaactcacatcaacatcaaaaatgagaagttaataaatcactaagcaaaccattatgagaattgaaattaaaaattctaagctattgaatgaataaatagtaaaataagatgaaatattatgtggttcggtcaaggataacaaagtattatattgtctactctacgactagaaacttgtgaacttaatttcttgcttgatccaaaaagagaattacaccaaaatcgttaatatagttgcttgaacacactttgaaactttttaatacataagaatctaattgagaaaactagatcaaaagcacaagttaccctttacaatcctctaaaattctctttttttatctcactaaacttaactatgtttctatctttagtttctaaagatcatgaacctatttatagaatttgattggtaagtgatatcttgttgaatatgcattgttcgagcttagagtaggattagttcattataagtgtatcgcaagtgtttaaccaaacacgacaatatggatctaagaacaggttgtgttc

SEQ ID NO: 44328 - DNA, 1944 bp, Cannabis sativa
ataagaactgctcgcatttgtattcactcaccacaaccgtgcgtgattcgtcaaacttttatcaccccaaaaaccctttcacttatttttctgataaataattaatttttatgtacttttttttttagaaatttttatgtacttaccctaaccataaaaggctgctaacttgaaagataatgtcggagaatctcaaagtatgttggattttgttattacccatttttttaggaaaaaaaaaattatataatgtttttgttaccttttttttttcccaattttatagttatttgaatcttttatataatgtttttagaattatgaaaaaaaaaacacataaaaatgagtaaatttaaaataaatccattttgtttggtaaacttttacgggtagggtcatatcaacctctttataaacgagttgggttgggtcgggtttggattttagtttttaacacgattcatttttaataaatgagtcaattttgagtgtgacattgcttgttatacttaagtctccacgacacaaacacaacccatgaataatgctataaatttgagcatgtcgtgctagtccgacccatatttgtccatactttttaaaatacgggttatgtcattttaggctaatatttttaaagggtaaacccaacacgcctcgtaaatccaatatttttgtgttgttctcaaattcgtaccgtattttgctcatatcaccctatttacatatcaagactcgaattcgtactttactttcttatatttttgtttttcttacaatcactaaactaaatgcatattgtataacttcagtaatattatattcttttaacaatatttaatagataatagcatacaaaaaatattagcattatcatagtttgaatattcatttatatatactcaaattttatcactctataaataaatttgttgacaaagaaatctgactaatactcgttcattagattggcaagaagagaaataaatttaagcaaataagtagaaagacataagagatttataatagttcactccccatgtcacaacaataatagagttacgtctacttcgagattttattactcacgagaattacaagaaatttataaaagcaatagctctaactactagaaagagaaagtagacaaagatgccctaaccttatgtggacttagaagattgtgaaaaatatgaagaaaaaaaataaactagtggagctctcctattacagggaaggatgtctattaaaatattaataaaataatgaaaaaattactttaggatgatcctagtcattgatgatgatctaatggtataaactgactcttgatgaaaattgtcaattttcaaagcttgaatcacgttcgttggattatttttgagtaattagcaaaaaaagttacacttatcttggacacaaattttggacttaaaatcgttataattgtgatatgagtgtgtaacatgacttgaaagagatttaaaatgcacgttgaatcgtgtcaatcgtctcaatattgagtgagttatgattatgactgtattactgaaggttgttcagaatccatcgtccaagttgacattatgacgtcaacctggatgctgggtaagtgaaaaaacatccctgacttgtattttttgattcctaagagatatgttgacatcacttagctaattttttagttctattaaagttgttcacctgttattggagatgtcgctttttggtggaataaagttgactcgaaacttttcgattttgccaatactcagccttattgactgggtgaaatatcaaagtgtgaattcaaattttacaatgaaaaaatagtcacatgcttgagacataatcaaaatatgataagcaaaactcagcgtacaaggccatacatcaacttgggcgttgagtgcttctcgggggacttcttttggctcgttttaa

SEQ ID NO: 44329 - DNA, 2179 bp, Cannabis sativa
ttagtaattatatagtgtaattatatagtgtaatatggtaaatttttagtaattatatagtgtaattacactcaattctcatggggtcatgagaattagagagtgtaattagaaccccttaattacttctaattatatggtcagacaaatatgtaaaattgtgttattaccttcaagtacacacaaattcaattacatcgtgacttttcaaatgcacactaagaattcacgacttgtatctaaaatatagtgtaattatatagtgacttccaagcatgctttaagagaattagtgaagacaggaaactagatcattcgagagtgttctttgttaccaattcaaaaatggtctttaatttcttgtccgtatgagtaaaacggaagctaaatattttccgtaaatctgttgggtttcaagtttaaatattttccgtaatttcttgcagaagttagcaatcaaatgttggaactgtacgaacaaaatcgcgtggcaccttcaagtgatgttgaaggaagtgctgcgagtggtgttactcacgcgacccctgtcaaagcgacaacgagcaatgaagagtgtttaactaacaacaatcattctcaggctggaagtactcgaccgggagcctctaagcctgtggtgttatctaagccaccatccaagttttctaacgctgaaaatcacggcggacaccttagaacagctgagagtcgaagtaatgaccacagaaacgccgaaatgaataatgggtcggatcacaaggtggatgatggtgaatttagagagaatcattattccgaacctaggcaattgccacaccccgaaactggtgaagaaagtgaaactagagatgctagagaattgaagagcaaaaaccaagttcgaaatccagaaaataaacaaagcacacttataagccggcaatcaccacaagaggtaatgaaaaagttcgacaaggacaaattaaaggcagcactggagaaaagaaggaattcggttggcaatacaactcggaaaacagatgttatggacgacgatgatctcatcgagagggaactggaagatggcattgaattagctgttggaaatgagaaaagtaagcaagaccgtagtagacgaagttggtctaagccatcgcacagacaagaactcgaggactcggaatatcatcagaaaaatggattgacatcagctgcagcagatttgaacaatgtggaagaaggtgagctatgatcatcatcatcatcaccatcatattactagacaagatttgcctaatcacagcagcctcaagagaaaagcagggaaagtccaccaccccaaatgtaatgcaagggttaattttcatgggttttgcttaaatgggtaattattataatacttttccttcctttgtccaaacatgaattttgagcagacagtaattcaatgttgaatttcaactgttgtacaattccaatcacttctttttctcaaaatccacactacatggtgtggttatggttatggttaatattgtcattattatcataatgaggtgtgattaaatgaaatatatttaaagaataactgcaatattttaaccacaatatttatatataaaattattcttatgtattattattattttttttatatatagttttagtgcattttttaatgtattatttatgttttgtattttctttttatttatttgagacttgaaaattatattttggtttatttgctatagtcctaccaatttatttggactttgttatttgaaaaattattcttttttaatatatcaatcaatgttctaccattgtttcacgtgtgatgtgataaaaatcatgtaattaagatttttacttaattacatttgtgggttagttaaaaaatgagaaatattaaaagataatattcgcgtttagctttctctttgatattatattattatttatataattaagtattaagtttcaaataattttaaaaaataaaatattattaatcaattagttaacataaccgcgcctcgcgcggttattataataattaattgaaacataacaaaatttaatttatgagtgtttaaaaaataatattagtgtttaactttctctttgttattatattattatttatataattaagtattgaattttatataatttaaaaaaataaaaatattattaa

SEQ ID NO: 44330 - DNA, 2392 bp, Cannabis sativa
actatagaaataactgtggacctaattgcaaaacttaaagttgcaaggactaaatagatattcctccaacaccaagggtttatgttttggtgcgtgtctgcagagagaaagagaaagaaggagagttagggttttagagcttcagagatgcctcgcacgacgacgttggaatgccccggttgccctccgcttagagctctcaccttcgacgcacttggtctcatcaaaggtcagttttactcttaatttttgctattggactctagatgagcaagatgatggattccgtccatggcttctaccacgactttactcaatgatgtttttggcagaagaaggctgagaaaacgaatatgaatattacatcagcaatttatatctgtaatcttcaaagaaatttcttgtttgatttatagttatcgaagctcggagtaagcaaggagggcatccaaagatcgtagagagatggggcgagccggacgcctcgaaatccgtgattaccgcttcaatggtggacgccaaacacgaccctgtatgtgtgttcattacttttattgtattatgaattttattattttcttattttggataatgctgcatttttggctccataaagcccaagtattgacaagtattttgttttcgtttaattgtggcagttattagctgttgcaagaaaaaatggcactgtgagttgcttcattgtactttgaatatcccaggaacagcatattggtttctgtttgttgcttgccactgggtttcgaagcttttatttattttaaatctgcctaatggtcttacagattgagattctcaatcctcttaatgggaatcttcgctttgcaatttctgatgttggtgatactgatggtggacctgtagttgatcctattgctggattgcatttgtttgcaaaaaatagattggaatccgagtctaggtaatgttcattgatttttcagaatctttctataatataagttgggaatacaacttgtctcgttaattcattgagttcatagtattatatatggacctatatttttgtactatagttagatcatcgtataaatttcctttcccaagcttccaattgttcaatcccattggtggctttgtttgggaatatagaactttgatctcagttaaatttcttttatgctattaggtcttgcacttttcttacttgtacggcaaatgggaaagcaataatgaggtcctttgaagatatcacatctgcagattctgccacgatgggatcttcaagattgtgggatgtctgctcatctggtaatattcaatgtttcaaagtggatggaagtgaaaattatgcattattcggagggtgagcgcttttgtatctaatttgtgaaaaaactacttggaatcttctcatcattcactaagaaaaatacctgatacattggctttcaaagactgattagatttttttcaatctcaaccacaggaagggagtggagatgaatgtatgggatttaaacgagtgctcaaagttttggacagcaaaatctgtgagatctttatctcatcaatcactttcaaattatagtgtcacctgctctggttttctagtgtatggcctcacattgatttaatcattttcatttatgtagcctcgtaaggacagtcttggcattttcaccccaacttggttcacatctgctactttccttagtaaagatgatcatcgtaaatttgtggctggtaccaacggtcatcaggtatcctctatcagaagttttgtttcgagaatactacattcatgatactgtggaaatgaacacattttcatctcattatgcactctatttctcttactttcttcctcactgttaaaggaatgagattgtggtttaaatatttatatgtagaagtcataaaaggttcttgattttcattcttttttttttttaatttattttaacttcattttttctggtaattttattcactgtgcgtttgtgcaatcaggttcgcctctatgatatttctgctcagagaaggcctgttatatcctttgatttccgggagacccctataaaatctgttgctgaagatttagatggtcacactatatatatagggaatggatctggtgaccttgcctctgttgacatgcggactggtaaatggagtttcatcatatatgtaaactgtttatcttatgttctgaaagtcatggagtttatttattctgaatgcatgattgctttcatgtctggaatgtatattttggtcgtttgtttctgaaataatttttagtgtttgaatttcttttttaaattgtgacctcttacatcttactccagggtttgagtaatttttcagtaactcttaccttacagtagatattgaataatccaatttt

SEQ ID NO: 44331 - DNA, 5276 bp, Cannabis sativa
tgggttgaaccaagatgagataaaaaattttaagtgtattaccttttaatataataaaaaatacttagcataaaatttagtatacgtgcctcgcacgtaagtttttactagtatattgaaagactcctattaaacaatataatcacataattaatttattatttatatattaacagcaatgacgaaaaaaaattacgtaacaatattttttattataattaaatctaaactagaaatatatattgtaagataaaaataataaaataatgtgtttttttttacaaataaagctctgctaattaacattaacattaacatattaatgtatatcatgattaaataatagtttatattataaatatacatattttcccttaaaaagtataaagtattttctttttctactttgataaattttaattacagactatatcataggattatatagtttggtaattaagtgtaatttaaatttataacaaatcacttatgaataatgtgagataatttttttaaatatatatagtatataggatctaaaaaagaaaatatatatacatagtcagttgcggagtcagccatgcatatttttttagtgggagtagaaaaagattagagtactaataatgaaaaaaaatataattttaattgacaagaatataaattttagtgggataaaaataaaaatatgtaagaataaaattgagaaatataaattttataagaataaaaatagaaaatataaattttatgaaagtaaatataaaaatatataagaatataaataaaagatgtgaattttttaaggacaaaatgtgaaatattcaaaaatatatttataaaaatataattaatagctttttaattttatttgtttaattttatcgactgattaatgacatattttttaaagtcaaattccaaataccgtgcagattaaaaaaatgtctttttttttttggtgaatactatatgatcaaaattttagtttacaaatataccaaatcaactcaagtttaagattcctttcttgtaaaatatataatatattcgataaagttagtttaagaataggataaactttaattagtcacctttttataattctttaattattgaaaaaaacttccacagtgtgaaactgttttcagtcgcacttcattttcactttgctacatatatataattatacaactcaataatttatcaaatatcaaccttattaatagtgcataattaatttcttaattatataattttccatgcatgtttgctaattacggccatgagcttttatgtgttgaacgtgcaattatttatttgtatatatatggtgcacatattttatatgtataatttttataaattaacttatatatcctcttagttaaataatattgtatagactaaaattagagcgtcttaagcttttatgattcatggggtaataaaattttaaaaataatttttttatttataaaataaaattcttataatataagtttttaaacaacttttttagaaagtatgaattagttgatttttttttttaaaaaaataataatttattatgctatcaaaataattacgatttttttttccaaacaataatcaatatcattgaaaattaaataatgttgtattaatgttttaagggaaaaaaatgagttaagagacctcttgctaaagggctttggcaacgaccccgactccgacccgaccctctacgagatatatatagcccttcattgaaacattattataggttatttagtgtctcttttttttatttagtaaaaattgtacattagaaagtttagtttgaatttacattttttttttaaatgtggacaatagactatttcaaatcatatatttaaataaaaattccttaaaaaacataaattattagaaatatggttcaattcatgcatgaaaaaaacttgaaaatctcataattagatatatgcttgccatgtgcatatataacaagtaataataaaactaaaattaaccaaactcaacaccagatttaacttgttaatcataataatttaattaaataataattaaaataaagacttaggtgagcaaactgtaatgggggatatggttgtctgggtattaggtattttgtatcactcttacctggacaacactacgtgggaaaatgggattgtgccacgtggcattaatagtcaacacttctgtacggtccaaagtactcttattttgatcatcaactattttttgcatagaaagagatcagatctgaaatgacagttggaagtgacagtgtgttctctcatttattttatttaaaataaagcaatttttttaaaaaaatttaaaaattaaaataaaggggaaatcatgtattgattaattaaaataaaataaaaagtaattaatatctttttgacttgagaggttcaaacaaaacgactgcactgtggacgaggtttttatttatttatttatttatttgtactacttttttttttaattattagaataataattaggcaaaaaaaaaaaaaaaaagaagagagaagtgaatggtgtgttgtactttaatttacaggtcatgcatgtttgaataatttatggcattggagttatcaactttgattattttgataaaaataggaataaaatccataattcatatttgtcggttggggacatttttagctaatataaatctcattattatgtatttattatgagagtgagatttacaataataattacattctcttattatttttcaagtactgttttaagtactgagaatactaattaatgcatgggatattcacacgttattatattttattaaaattttaaaaaatacgtacatatatataagataaaatattaaaagattgagactatatttcttattgaaaaggaaaaaccctagatagatctctctatgcttttcttttgcacatttgtggtgaagaggatataggcttggtttggttctctcttgttgtagattatgtccacatattgtggcttctgatcatttgtgttgtttttttagttgattgtcgtcttttttcgcgatttgatgccttttgctcgttgatgttaggctcgacagctttcttatatagtagaatttaaatgtttgagatggtggtcctctctttgattgttggtgttacagaaaaatcgtaattctagtcatgtgtaaaatttagagatgaatttaaaaaagagacgaagaaagaaacaatgaaagcaaagctcaaagctcagtacaataacagaacaatacagagtatttatagagtaacaaatatgcttctcaagaagattaaaaattaagaaaaggaaattaacttattgaattattttatgcaacattaacaaaaaataacagaattctaatttggttttacattaacaccctccgcaaacgaaatggtgtggacaccattttttagtttgaacttcaagtaaagaaaacgttttgctgtaagagctttagtgaggacatcagcagccttatcatgagcaggaacataatggacagacaattgcttgttaatgatttgatccctgacaaaatagaggtcaatttcgatatgtttggaccgagcatggaagacggggttatctgccaaagctgttacactttgatcattaacccaaatgataggactatgaagaataggtacttgtaattcttgcagcagtgattgaatccacattaactcatcagctgcattggccaatgctcaaaattcactttctgtgcttgatcgagccacaacatgttgtttctttactgaccagcttataggattatcccctaaaaataccaagtaacctccagtagaccttttctcatccacacagcttgcccagtcagcatcagagtaagctgtgagagtcatttcaaatgtaggagtgagatggataccatctctgaatgcctttaaggtatcgaagtaacttcttacaatgtaagtgtgtagaagccttcaaaaattggctgagtttgttaacaatgtaagccacatcaagccgtgtgagagagaggtattgaagtgcccctaatgtacttcgatacaaagtaatgtctacaaatggttccctttcatttagtgagagtttcacattaacattggttagattcagactaggtttggttccttttacttttaactttaccaataatatactttggtttgagataaatacataccaattttatttcgatagatctccactctaagaaaataataaacttgtcccaagtctttcagatagaaagtcttattgaggtttgtaatcaatttagaaatgaaggaagagttgggtccagttaccaatatatcgtcaacatataccagcaagatgataagagtaggaccaactccatacacaaacagagagacatcagctttagaaccttgaaatccccatgacaataaggtgttttaagtttttttattctaggcccgtggggcctgttttaggccatagatgaccttatttaatttgtagacatgtgtgggattcgtagcatcctcaaatccaggtagttgatacataaaaattgtctcagacagagttccatgaaggaatgcattattgacatcgagctgaacaacactccaattgttggaaacagccaatgaaagcataagtcgaactgttgtgggtttgacaacgggactaatatttcatcaaaatctattccaattgtttgtagatagcctttggccactagtcttaattttagtctgttgagagagccatccgagttaaatttaactctatgaacccacttgcactcaataacaatcatggatgaatcataaggaactaatacccaagtattgttcttgaccagagctcttacttcctggtgcatagttgcatttcattgaggattgttcaagactgcttcgagtgattttggcttagttggcagtgttgattcatatagaggatgtttagtagtaaaataggattttggtttgtagatgccactttgtgatctggtggtcattcaatgagatttggcacctgttggtaatgacgtttcatgagcaggtgtggggtcaatgtgtgtaggggagcttttagaataattggtggtagggttgaggaggattcaggttgaggagcttgtggcagatttgtagaatttgtggtttcaacatgtaagacatttaatttgtaactgaagaaagttgtagagttgtgtttgagtgaataggtgattgagcaattggggacatatctggtgaagg

SEQ ID NO: 44332 - DNA, 2876 bp, Cannabis sativa
tcaaatttttatttcaccctaactgagattattaagtattaattagaacataaaatcagaattgtaaattgacacagtaaaaaaaaaataataatacaatgtcttcacatttattaaaatcaaaattgtaaattgacacaaaaaacaatgccttacacatttattaaaatcaaaatttacattaagaaacaaatgaagatagttattgaattgactatctgttacattgagcagcagtagcacgcttcatcttcttcttcctcagcttatcgcatatgtaagctctctccaattgttcaactctgtgagacagagaactaagcaatctcgtctgaacttcatttctctcgtacagatcagccatcaaacccatcatcttctcattctcctccatcatcttctccaaaagctccttactgctcttattcttcttctccttattctcattctcttccttcttatttcctgtatcttcttcttcttctattggacttttttcatcgattgacgaaccagactcactcatcgtatcattgctctctttgttctcttccgcctttactttagctgcctccatattatcagctatgtcctcagacttcagagtttcaccacttgcttcctcggctgtcctctgattaatccccggttcagcgagattattcttcagctccgatttgcaatcttcttcttcaatttcagattcttcaccttccttttcaagcgatcgatctagttcgacttcggaagaattcgtattatcggcagacgattcttgactcggatcaacctcagcagattcacgttccaagtctggtgtatgatcgacggccttatcatcatcaccaagagattcacattcagcagcagtttctttgtcctcaagaaattgttcgtcaccaccggtgacgattgcgtctagcctctcctgcaaccgaattgcttttctaatcacagtctttcggcaatccctaacccctgaatccacccctttgacagagtccaacctgaacagcaagctcatcagagtctcattcatcctcaaccgctcctttccgtctttccgaatcaataccatcgtctctttctgagacattctcttctcgatctcatcaacttcggctttgattgcagcaattctcttcaagctctttcttaccaagaatccacggaacaccttctggaccttcaatgcagaatcggatcttttcttttccgaaccgacaaaatggacagggatcgaaactaccttcggtgatggcttggctgaggccgaaatctcactggcggaaggtgagtagcggggacgtggcttgaagttgctccaatggcctctaaagaagggactttccatgatcaaacgtagatattttctttgtgtgtggatgagagtgttttggtgaagaataagtgggttcggtgagtaatttataagaaacgaaaatcgagattgatcgagaagtggaagaggagaagattccagaagtttcaactgagatagtttcatgctatataatcgcaacttctagaatatcgtcgatactttcgcgcgccatgaatatatatttcacacgtggacattttattttttttattattattttataaaaatatttttttgaaagcatttttttataaaaatattaaatatatggagtttattattttttttttatcaggaaaagtgttctttattaaacatatgttgtttaattattttattattacaaaattgataccgatatatttgtttttagagaaaaagaaactaatgaatataaactttgtttttcaaaaaaaaaaaaatatataaactttgtttttttgaaccattaacagaagaagaatttataaaagaattttgttttcttctataataagaattttaggttatcattttatattggggaatttttaattatatacaagtaaattaattatattataaaaatatgtaagaaaatataattacacaattctatatcattttataaatatttacaaataatcattatattcacattatataatataaataaacataaacttattttaacatgttgattattttcaattaattttctgaagaaaaaaaatgcataaagttcaatataaaaatacataagtcaatatttatattttgatatattactaaaatttatacaaaattatatatatacaaatatatttacaaattttatttatgttttataaaaaatgtatatacaggtttattaaatagtttattattattaatgtttataatgatattattaatctaatatatttattatgataatgtttcaataaaatcaatataatttgtttattaaaagttcataaataagttcaaaaataaaacatttatgtttattttgttttaataaacaaaactataaccaaatgtaaaattatatataaacattatgttcatattttatattgataatgtttataaattattaatctaatatatttaatgggatatgactttgtcccgtgatgtactttcacggaatacgtttctactttttaaccttaattacccctaaatcaatcttagccgttagatcaaataactccctcatctaacggctgtcgtacatcacggattacaatccgtgaaagtacaataacgggacaaaattatatccctatatttaatatatagttttataaacaaaatatgtatgtttacttttttgttgtaagaaaaaatatgtgtgtttattgtttatttatataagatttaggaaaaattaattcctttatataaattgtatagaaaattaaaattatgtttatttatctaatatagaatgtataattaaatataaataaattattttgtattatatagtataataaaattatat

SEQ ID NO: 44333 - DNA, 1102 bp, Cannabis sativa
catgaaaatggcttcttcattttttattaataaactcattttgtatacatacagaatgtgagagcagtctttgatgtggccataaatgtagtccttcaaccctctaaacagaagaaaaagaaaagcaaagcacattgctccataatgtgatttgaagaagaataggtaaagagacaataacaacaattaatcttcattttgaagaagaataagtaagagtttatgaatagtattgtccatttgtacaatctttttatgaaactcttttaaagaataagaagaaacatatgggtatgtttataaacagtgtttgttttttcttgcaatttttgtattaatccaaattttattattatattatttttttataaattattttcaatatatcaaccaaaattaagtggattaatgaggagaaacttatatcactcatagcattgttatcaaacttatactcacttttcttagtttttgtagctgagccaaaaccatagtatatatctcctcaacttcatgatcattgttagattgtatatacagggagagaacgagagagatgaaaacagagaaattgagaatttagtctattgatcaattgaagaagagtacaaggtatataaaggcaaagctgtcattagacacacatgacagcaaggatacaaacataacagtaaaaataacagacttaactaacagttgtaactgcctaactaactttgtccttaacagcccccttcaaactcaaggtgtgttgagaaacaacattgagtttggctcttagatcagggaacttggaactagaaataggtttggtcaagctatctgcaatttgtgcaacagcaggtacatggcagacttgaagttgatattgctcactttgtcacggacaaagtacaagtcaatttctatatgtttggtgcgggcatgtagaacaggatttgcagcgagaaggacagtgctttgattgtcacaccacacagtaggcacactggtttgggtgatgtgaagttcagtaagaagactttgaagccagcttatttcactgacagtgttggcaagactccgaaattcagcctcagatgaagatcgagagatggttact

SEQ ID NO: 44334 - DNA, 3530 bp, Cannabis sativa
tacacaaatagggaaaccatatcaatatatgccagccgaaatatacaaagaataataaaatatttttatcaattaaatatgccaaaaatggaattaacaaatatccattcaagtatttgcactagacaagtaaatgttgaacgaaaaactttcatgatcaacacgctagctataggcaaacaacatgtaggaattcttaaattccaagcatgccctacacccaactcaatattatgttcaacatgatagggtgacaaatgactaaaaacaatcaaatatgattaagtaaaaaattgataaaattgaagtcgtttagcccctacaacaaattatttagatcaaaacaatttgtcatttaccaggacaaacaaatggtttcaattgagctaaccctagctcagattcaacatcaaaccttcaagattaataaacaaatctctttctctctttctttctctcgaaacaaccctaggaaccaaacccctttctcgatcaaatcatatcaatcttaccagaacgcaaccccaaaaaattagatcaaagctatacaaacacaagaacatgcatcaaaagagaaaaaaaaaatacagagaaaatacacatggattatagaggttcgccctaaatccaggggtacgtcctctttgagctcgccttgaaaaacaatctcagatctgaactatactttcaagaatgttacaatcaggtaagaaatccaagccacaaacttgactggtatttcaagtttctttcttcttctttttctgataatctctctcactaattttcttttatttttctttgcatgaactcaccgagctcaacacaggagctcctctctccactctctaaatttgggtctcatacttctggttttctgctctattggtcatttggtgaggactcatccttttatagttgttactactgttgtaattagagtatggggaatttctgttgcataacagaaattctgttaggatgtagttgatgtttgttatttctggtgagtaagaatcatgagccttttatttatattttcttttctgttatgttgttgtaagaaacaagtgagatagggatctaattttaacaatttccaccttagattcctcctatatatgtcacttgtttcatagtgcatcattcttcaagggtcttaactcattctggtgatggtcatccatcatcaccaactcctaacaagtttatacaatgcttgaactttgtatggggtagtaccttagtactaatatcaaatgggttctcttttgttgggaccttctctatttgtacaattccttgtctcactttatctcgtataaagtgatacttaattttgttttgttctgttatgaaagactggtttttacataagtcaatgcagctttgactatcagagtagactgtaggtttttcattaagtagcttaagttcttctagcaatctttttaaccatatagcctctttaatagcttctgtcacaactatatactcagattctgtggtagacaatgctaccacaggttgcaattaaactttctaattgatacaatttcctcatataggctgatgtagattttttattgtctctgtcacctgcatagtcagtaacactatatccagtgatcattctgtagttgttccttcttttgaagtttaaacctacctcagtagatcctaccaaatatatctaaacaaccatttcattgctttccagtgttgcttgcctagatttgccatatatttactgagaacactaatgacgcagaggctagatctagtctagtgctaaccattaagtacattattgatcatagtgcactagaataaggcacttcactcataacttccctttctattgaagttttagggcactgatctttgcttagatagtactgattggtcataggttgcttagtttgtttggcacctgtcatagaaaattttttatgactttctttatgtagttcttctaatgtagcctcaaggttccattttctctatcccttatgatatttatgcctagaattttagctgccttccttaagtccttcatttcaaattgttctcttaaccagcccttcataaggtcaattttggaccattctttgctcacaatgagcatgttatctacatacagaagtagatagatgacctcttcaattttagtgcctttgataaacactatagcaagaagttagggttcttgagcttataataactccattgtaatacattaattactattcaatcaaatacgattgactcatggactaggattcattaatacccgaaccacgtaaaaatttccatctctactctctattaatttatttagtctctcaactcttggtgaacaattagcatatttaattataaaattaaatgatagactatttatattattttttttattcccttacataataaaattaatgataaagttacttttttatataattttattaaaaatattaatgcaacattaaaatttgcatcaagttttgtaattgtgcatttaaaaattgatgtaaatatatcataatgttattttttgtaccaaatataacacaatttttacatctcgtattggaaatggtctaagacccatctaatggatgctataaattttgtgctaaatttagctaagaaaatgagttaatgtaatatttagcccaaattttataattgtactccaatattaaagataaaaataaattttattttaatagaaaagtttaaaaaattcaataaaaacattaaatttttattagaaaaatataaaaattatattaaatatataaataaaaatataaaaaattattaattatattaatgagtagcaagaaaatatgacatttattatagtgtaaattttaacacatattatattttatgtcaaatttcatataacttttattatgtgttaaatttagaacatagttaaaattatatatatacaaccacatttataacatcttcaatgtgggcgcttttactttcagccaaatttaaactaaaattgagagagcctcttagatatcatctcatgactccaatctatattggttaggatttattagtattttttttaagagaagtgcaacaccgtcaatcttataacctcttagtcaacctctacgtctaagaatatatgtcttttttttcaattttttttttctacagcgatatttattatgcttactacattatccttgtaaattttaagaaaaaatcgaatagtttatagtgtcgaaaatacgtttgaagttttttaaacacgcgtggtaaactggaatatcagaaactctattttcggtactgtaaactattcaaaaatttacaggaatgatactataagtataacgaatatcgctatgaaaaagatatttcaacatataatttcaaacgtagaaattgactaaaaaattataatagtaaattgtaattaacactcttctttttttagttaaaatatattactataataatataaaaaaaattattttctatttttttcttgatat

SEQ ID NO: 44335 - DNA, 1507 bp, Cannabis sativa
ctttgcatccacccatctcgacctgcaacaagaaaacggaacaagcaattaaaaaaattaggcagctgaatggatccaaaactttgtagtacaaaggaagcttatctaccagtgaagcgaaatagaagaaaaatatttacctctttgccaagtctctccttgacaaaagtagcaacttgagcataatcgagattcaaagcaaccaaaccacttttcccacgctttccaaataacatgtcaggctttacaaccagtttggaagatgaaagccaagtctccttgtttgctaactcattgaagtcagttgattcattaatctgtaccattacacaaaacaaactaaccttttattgacctggaaatatatcttgcctaaccaagagcagcctatatcctaatcacagaagctagctagctatgcatgaaagatcaatccgaaatattctcattttcacaatttaaaacaactaaatcgtaaatttacactctaacattgtcatgccagagcaagttaatctcaaatcacaacaaaggatcacatgataatgataagctcaaattctactatcaaaacatagatcagaaaccatctaaattgcactaaaaagaaaaggtgcgtttagcagtgtcttaatgttgaagatctggaggaaaattgtggaacaattcataagaaaacgagagataaaatacaaacctgagctgatttgatcggcaaatcacggccagagatcctcttgaaatgttctttcaacaatctcttggaatcgtactctctgatcttcttgcgagccatttataaacctgaaaacaatcacaccaaaccgaaaatataaatctcatttcagatccaaaccattactaatatcaacaataagaaactcaaaccagccgaaatctaatccagaaaaatacgtaaacgaaaacaaaacaaaattacagattgaaaatgtaatttaccagatggagagagagagagaaattctccgaagatttggtttagttttcttgagaggaggtagatagacaaaaacaccacaactgaatctctgaaaccgttgtttgttcactctgtatttataggaaaaaatatatatattttttttaaataactactaatttgaatttttgcacctaattttaacgtgtattaaattatatttttaaatttttaagaaattactttatatattaatttttaattttttttttaaatttacggtttaagttattctggtaatttttatgtgagttggctatacaaattttagttgcgatttagattgctctattagttgctatagaaatttctgtgtaaaattccgtaaaaatacaaaaataaaactgctttgaagtataaaaaatgaaaaaaatctctaaatttaaaaaaaaatttaaaaattaatatatgaagtaattcccttaaatgtttttcgtcatcaaaatttttcccaaaccattttggaccctgtgttttgcaaaagttacagattggaccctgtgtttt

SEQ ID NO: 44336 - DNA, 4028 bp, Cannabis sativa
  modified_base (30)..(46): a, c, t, g, unknown or other
  modified_base (3615)..(3617): a, c, t, g, unknown or other
aaaagaggtatgtttcaaataaatataaannnnnnnnnnnnnnnnnttaattgattaataaaagaggcatttttcaacttggcccaataattatatagaaaattgagggataagttgaaaactaccactttttattatattaactaaatataattccaaaataattttaattaataaataccatttttcataatcaaagtactaaatataacatcacataacttattgaaattagaattcctaatacacataatgggaatataacatataaaactttgtataaattaaagaatagtaaaataaataaaaaataaaaaataagtataaagtgtaatttcttcgaaaattgagttaccaaagcatactagaaattttaatattaaactaataaattggtatttgcataatgtattagaaagtgtggcattttcaacttgaaactcaacaaagtggtataattctatctaataccaaaaacccaacttatttgattggatgaaaactcaaattttcagtggaatatttcatttaacttttatttttgcaaattacaagcaaatttagtaacacatttttcattttttttcttttcaagggtgttaataaaaacatacattaaaccccactttgtcaaaatagaaaaattcaccacaatgagagagaatatatccaaaccaaaatatagcaaaagtatatgtatagtatatatagattatgaattaaatggtcttgagaaattccatgatatgggtattgaaagcattgcaatggactttgaagcctttaaagccagctcccttagccaatgcctcaaactctttctctgttctctctttgccaccagggttatgggccaacatgatcacatcaatgtggaccgtactctttgtggcaaggctcgagtccggtgccaccggaagaatgcactccgccacgatcacttttccgtgttcgggcagtgcagcgtggcagttcttcaagaatttcaagcagtgttcatcgctccaatcatggcaaatccactgtttttcgcgaaaacggcattattagaggcccaaaatgaaatatggtatttttgtaattattgtttagaaagtgatatttttctaaagtttgagatattgtacataaactatttgaaatttggaaaaaatttgcactcaatataattttcttttacttttcataagaaataaaaaatacattttatggtaaaattgtaattttgaaataaagaaaatgtcatttttgaaaaccctctaattatgtaccttcatgaaaattgcatctccttttggtacacttacaaacatgtctcctccaacatgctctacacctattataataaccataaacaatatttattagttttaaaattcatattttctaactcaaattattacccaaaaaattaataaaatattttttttttttttgatattcgagactcttgtagtagttcttaccggtcaatggaggtgcatcttcgatgacatgaggcaaatcgaagttaatacccttaatagtagggtacttagagacgatcatgttaacaacagctccagtaccaccaccaacatcaacaatcgagttaagaccctcgaaacccttgtaagtttcgaggatttttttcatggtaatagtcgagtggtcggacattcctctattaaagattttattgaacctttgatcggttccatgatattcaaatgctgtcattccatatgccttgttgaaaggtattcctccatcaagtactgcatcttttaagtgatacctaatacatattaccaaacataactaacacttattattattgtctttttttttttgaaaaaaaaaataaaattaataatgagtcttaagtctaaataagaaaattagtcaattttatggttgagtttgtgcatatagattctactagcaaatacaatgtcattatcaagtcaagttgtatttgttgactttggttgatgattttatctttccttattaaaaaaaaaatacatgtagttaaaactagtgaaaatgattaatttggtaagagaaatgataaaaggtactattctttaatatatttttttaatgtcataccgctattagtgtaattaaatatcgagtctcatataacttttaaagaatatcattaattaattataaagcgtcacttataaaatatactaaacaacattgatactatccttataaagcgtcacttataaaatatactgaacaacactgatactacccaataacaatgctgatttggtaaatagtagttaatatttccctttcattaattttcacctacatcataatttgttgttcattcacactcatcatatttaaaaatatataaaataaaatatgaaattattgagacaatatttggtgtttggtagtaggtgaagtgttgtccaaacaatccctctcaagaaaaataaaagtgtggccaaacacgttttgattggaatcttttacttttattattacttttttaatttctttttatatgagttttaagaagcacttgtaccactactatagctatctctaatctctattatatcttagaccttaattactttcccaaaatagtaacttactatgtttaacactaattcctaatattaatttattttcttcatatgtgaaacgaataatatacttcaaataattgaatacataaatagactgattttgtaaagatataactctttgagtcattattatctaaacttattatttattttttcttcatgaaagtaacattatataatattatcaacacatacctagactatacttttcaagttataataaaattcaattttatattaaatttgaaagacaaaaaccaaagacaaattaatttacattatttatatttatatataaagactatttttttttctttttcaaatttttaatatatgaatatacattttgatataattgttttagtatatgaaaaataaaatggtttttgtttcccttcatgtatagctgaatacccattaaatttagttacctctaataaaaaaatagatccaagtttaaatcacctcccacatttttcatttcaataatattaattatctttttccaaaaagcaaaatgctcataaaaattcaataaattttgttttaaaaaaatgctcataatttttttttttaaaaaaaacaacagataaaaaattaaaaaaagaaataaacagaacacccctaattatgccttaaaatcaatcaaatcttattaactaaaacaacaacaaatagaaaggaatacatatatagatacttaataaaataattagttaaatttatatatataaaaaaattattattaataataataaaaacagaaaacccctaattatgcctaaaatcaatccaaactaattaactaaaacaacccttacattaaaaaagcaataataatgttaataataataagaataatttgcgacataaatacttaagtttatctcacaatttcaaataaatacataagtttaatttttggctaatacttaagttacatatctgaaattctgtaattacctaaccgttaaatattaagtcattatatccacgtgtcatttttttattggtnnntttaaactaatttttttttaaaataataaaaatttaatgacttggaccaattaggaattaccacgtgacaatttatttaaccagatacttacaaaaagttctaaaattataacttattaaacctatgtatttatttgcaactgaaagttaaaattaagtatttataccgtaaattactctaataataataataaaaaataaataaaaccctaaaacaattacaaatagaaataattaattaaggtagtgttcggtaaccattaaaaaatcaattttctgtttaattaatgagaaattaagaacaaattataaaattttgttaaggtgaataaagaaaaacaaaaaacaaaataattaccgaacaagccttaaataaatagatgattaattaattaaaagtgattaagtata

SEQ ID NO: 44337 - DNA, 3837 bp, Cannabis sativa
gaaaagaaaagaaaaatagagagagatctcacattcatgtctaaattaacacaaaatctcagtccgtaatgaaagcacgttgagtaaatataaatgtacttctcacaaaaatgttaaaatgagagaaagaattgaccacaagaccagagaataaaacctttcaatcaatatattatatatatctaataccaggaaaagaaagaaaaagagaaaaggaaacctcttcttatcaataatcaattaccattactacctactaatatggtctgctaactatctagcagcttttaaaaaattagtttattcgaagttgtattaaactggttggaaaaatttaaagcgtgaataatactctactattcttattaatgaaaaacagtacataatatgttttattggttagtcactttaattaattagtgttagtgatgacaaaacactcatgaaccccagaatctgaaagaagggttagaagcaatagagaaggataataaaaaggaatacacacttgagcaagaggacattgaagctcataatgtgattcttaaaccagagagaacaaagaaagatgcagacatattagagaaatctctgtcttgtaagtatccagatttgggttttgatcaggcacttcaacatgagagggagaagctcaatgttgagttgattcgatcaagaacactaaaccatctcgaccagtgccgagtcattgaacaccttatcgatgtcactgagaatgtggtgaatgtagttcttcctggaaaaaatgttgacaaaattgttaccactactaattatgatgttgcatcatcagggtatataacaccttcctcaattcaaattagttatataactagtgtgtagctggagaaaattgacctctttttatcttcccaggtacataaccaattcaaaaaccagctatgaagaagttagtaagtcagaatggcaggctgatcttttcggttgctgcagtgagccttgtcttagtgagttaatttcttcaagaaaattagaattaatgatttgtatacttctgttagttttataatctaatcttttggggtcttaattgacatgtatgtgtatatttatatgatgatggttgtacaggtttgaagacttttctttatccctgcggagcattttcatggatagcaaatgtagtttccaaaggaaaaatatgtgagctgtgtttttcacttatattttaatattgtggcaaggtcaaacatatagtatggctttaataaaaatggctatatgacattttttttactacttgaaaccatgtacagctcgtgaaaaagcaataaacaatctagtgagatactctatatttggcggttgttgctgttacactttctgtattagaaggaatttgaggcaacgttttaacatagaggtacctgttatgatcaaagatcacttttttacaattttattttctagtatcttgattttgttttttactcattttctgtcgtttagggtggttcttgtgatgacttcttaactcacctcatatgctgctgctgtgcaatggttcaagaaaggcgtgagctggaacttagaaactttgagggtaattataagtgcttgtttctctcttgaacagttcatatcaatataaatacacagagattctttgactagtttgagattttaatgatgatatgccactaccaatttaccaactctggttttcttagttacataattaaaagttgaacttatgagaagttggtttacattgatgtgcttcagctccttgtaaccactatcaaacaacactcttttgcaggttgccaaggaaaagagatgattcctcctccattccaatacatgaagtcataaatcaccattacacttgcttttcaacttatagaaagaaagaaaaaaaaaagcaaatgaaatctagtctagactctagttacttatgtatgtaacatattatagatatacactatatatttctcttatttctactgtagattcatagaaattgtaaaattattaatgaacattaaaagaaaaaccatcacataccttccaaaatatctgaaatttcctgcttcaagtacattagatctttctttttctttggtaatttattacactatacaagtagtaagtacaatttcttttatccacatctcctcaattatctcattctcatccttaaatcttttttcttttgctttttaaagaaaaggaaaaatgaacagaagagtctctctatttcacctactaattttggtgttgctcaatccaatctcgtcagtcccatcctcgcctgaccgtttcaccaagtctcactcgtactcgtcctctaatctcgaacgcaaatcatcacaagagtactttgagttggcccaacctctaccgtccgatgatctgaccccatcgttgaccgtaacagtcttacgccactccttcgctaataccatcaacggccctccattctccaccccttactctccgccgtccgattgccctccaccatggtccttcgtcgttctcgagtttcgtgccaaatgcaaaggagaacagtacgaccgcatcgccgcactttggctcggcggcgtcgagatcctcagaaccagcacagccgagccgactgagtgtggaatcttctggaaggttcggaaggatgttaccaggtactcttctcttctctctcgtcaagaactagaccttactatgatgctcgaaaacgtagtcaacaaagaatacaccggcgtttaccacgtcgaggtcgactttctctattacaatgtctcagcaatcaacgagcccaaggtcaggcttcctatttcgattgagaatctagagcttgatagtgaagactcgaaattaggcttggattcttttgaattagatgcaaactttgggatttcagatgaggagccggcggatatgattattccgatagccgattccggagaaaggggattttggttcagagttgagagcgagttggagttgaaatcgagggaaattcaattccctaaaaacactcgccgagctgtagtggaattgtatgtgtcgtttcatggaaacgacgaattttggtactcgaatcctccgaattcttatatcactatgaacaacttagatacagctcggggaaatggaggtttccgagaggtttttgtgaccatcgatggagagataatcgggtcagaaattcctttaccagtgatcttcaccggtgggatcaatccattgttctgggaaccggttgtggcgattggagcattcaatctcccttcgtatgattttgaattgacgccatttttgggaaaacttctggacaagaaagttcataaactcggaattggggtctccgatgctatctcatattggcttgttgatgccaatttacacctttggttagaccccaaatcggaatcagttgaagccaaatcaagttttgatgaaaacccagttcttgaaatcgagagaaattcggagttcaagaaacttgatggatcttccaaggtgaaagctgagaggaagacccaacacacggggtgggttaagtggagtggtggaaattacaccactacatccactcacaactacaagttcaagtccaaaatcagattccggaacaatggagcttccaaatctgttaagcaaaaaatcaagggaagcagaaaagttgtgattagagacgtgggcaatagaaaaatagtagccatggaaagcgtcaagagaagataccctttgaaactcttcactgaaacacaaccgggtaggcgtgagaacacctatttgctattgacgaatgtctctcatgccttgaaagagaagcgttttcatggcggctat

SEQ ID NO: 44338 - DNA, 1639 bp, Cannabis sativa
ttctttaattattaacttataattttaaatttatatggttttgctaggaatgatttaaatgatattttattgttaaaaataacattttatgatttttttagtatcaatatttataaacttataataaataaaaaaatatatataaaaaattaaggagaaaatatatagagttatttaaaataattttagactatcacctaactatatctcttttatacatagatagataaatatatgttaatgatattttgttgtagattaagcaaaatagccaatattgatataacaatgattttattatttagttttcaaatattaactaggatgaacatataagtcagtttcttattaaagaaattgattgtcttcaatgatcagtcaacgataacaatattaaatatctcataacataaaattaataccgatattattgaggataaaccaattgtattgctcaccaaattggtgagaatatgtgtttatgagtgatgagaatttcctttttttttttttttaaaaaaaaaaaagcatatttatacatctatttcaatctgaacttaggtggcgtacgtacgtttgactgcttgtaattacattatattgctttcttttttgaaggtaggaaggaaaaaaattacttttctaattgccaattgggtacagtttttgtctatctcattgaaaattgtatagtcttttgaaggagtgacaggaaaaaatggatttcatttcattacactaaaacataattaaatagcatattttttttttgtcaaaaaaaaatagcatattttttgcaattctaaaatcaccctatttatcctttcaaaaaaattgactttaattgtatataagtgaaattatttaaggatacgtataagattactttttcgtatctattaattaaaaacttcttcatattatattttatctaaatgtacttattttttaaatgttttgcctaatataatctcaccttctacttaaatttagcacataatttatattgatctaagagatataatatgaatattatctataaaaattgatatatcttaaagaatacaaaaataaaaataaaaattaaagtatgtaaaataaaataagtatacaatataattttctcaattttatttatataatttataacatgtagttaagaggactgcagagtatatatataaataaaagattgtaaaaatgtaaaaatataaagcacgaacttgagcttgtataaggaaatgatatgttctatataaaaaaatagactgattcaaataaaacacgacaagaatttgagtacgtagaaaacttctaggtctatactaaaaattgtaagcacaatatgacttatatttttttatagcacgacacgatataatttatatttttttatgaccgacccgattggacacttattttaaaaaagttaattagaatttttatatctcgaactttgacatgtactaattatgtcccttgaattttaaagaccgtgagaaattctccatgaactattgagattgttgaatttaaagatttttgtctagttttaataaaaaaagtctaacatggataaaaatgtaggagacataatttgtcacatatcaaagttcgaaggatatgatttggtagatat

SEQ ID NO: 44339 - DNA, 2230 bp, Cannabis sativa
atttattggtagctaaaaagaacatttgcctactaaataatttggcagtagaaatatttggtcttatttgtttggtattggctactaagaaattttgcaactaaaatttggtagcaaaaagaaaagcatggtagctaaaagatatttttcttgtaccacagctgaggtttccaaaaaacaaccctataccaaacactcccgaaaaattgaaacataaaataatacaatgtaacgtacaaaatacgcatataagatggagttttacctaaatacaagataatccaaacaaccaaatagctcgaaatagcatttttttcgatcgcattgtcacccacctaaaaccaccgcataaacattcgagttttaacgtcaaaaccctaaaataaattatttttggtactcaggatgtgattatgggtcggaaaattgaagttttgcaaaaataaagatgaaaaacagttaaaatcgtgaaatttagtcccgtcacaatggcttttttaggggtttgaggattttcagatgagagagtgaatgagagaagagagaaagtaaaagagaaaggttgcaggggacataataaaccaccaatgtctttgattattcaaataaccggagacatatgttttcgattatttgagtctattcagcttcgcgtgcaagcttacgtctttgggggtttcatcatagccgaggacataggcttttgaaaatcacactccttctaaagataaaactaaattttcattaagcgccgagcaaaaatcgatgaaacaagcttaagtagatctatgtctttgatttttattttatttttatgaaaaattccaagataaatttattaattgtagtactcaaaaacattttagtatgtgatttcaagtacgaaaattgactaataacttgaaataaaagttttttttttcagagaggtaacaagttggaggacaacaccattaagcataggcagcaacaacgaaggaattaaataattcctcatggccttcttcatgcaacctgatagcatccttggcaagagaatgggcggctgtgttgaactggcgaggtaagtacttcaaggaggctttagggaagttggagaagaacaacctaatctaagaaacaagaccagaaagagcggagtggtcctgccaatcaccatttacttttgaaactaaatttaaacagtcggagaagatgatgaattttggtggcttcaacaactctgagagtcaatacaccaagatataccctgcaacaaagcctgaccctctgcaaaaataggagtggaagccctaggcaagagatgattttccgaagcaataatctggtgttgaccaatctttaaagtgaaaccaatccccgttaagccatggttatggtctaaagctgcgtccacataaagagccgcggagtcctcatgaaagtcatctactggaaataattgggaatagtgcatgcgctgattagaggctgggaccgaatgaccagcgagattgtttgttgtgcctcattgtaatcctgtaaataattaaaaacatactcttccacattgttaggagcattagatttattgaataatattgagtttcgagtattccaaatgtgccaaatgagagcaacaaaaagagggaaatcctgctttgagatgagttgcattacttggagataaaattcctagatgtctgttcttcgatgatcacggtaaaaaaatttgaatcttgaaagcttccaaatgtttcttgctctggggcaatccacaagggcatgtgtgacaaattccatattattaccacaaactgaacaagagggctgcgagttaatttttttgtaaaacaaatttaaggcacaaggtaaaatatggttgaaagctttccaagtgaaatgcttgattttagagggacggaagagtccagagagctttccaccactgctgaaaagggttgggattagaggaggaaggtaagtcaacggaggcagaagaagaggctagatgataagaagatttcacagtaataagaccaaaaggatgaaaaccccatatcagtgagtaaaccatagtagggtccaaagagatttgaagaatatgatcaacccgatatgaaggaaaataatgtttgagtttagggatatcccaagtaatatccgagttgataaagaaagaaacaaaagcatgaaggggatcaatgggttgcataagggtaggacgagagtgttgggttttatgctctaa

SEQ ID NO: 44340 - DNA, 2704 bp, Cannabis sativa
gcctccggagtctccttccagtccactcgggcattgacaatagccgagttttcttcagatagttttggaaaagatgagttaggtaaggggaaatccttgaatggatcccaaacgtccagagaaaaagggtcgaaaacgttgcttcgtcggccaccaaagaagctaggaatgagggacatgttttccttaaagtacaaagaagaattaaagattagatgaaagttgagagtgatttgaggatgcaattaataagtagcagtaaagtagtgaattgttttttcttgtgtatgaattggggtgagtgggtttatttattagtagcggttgaagattctggtgagttctcgtcttaagtagcaacggaaaggagagagcgagacaatcattccagtcttccagacgcttctcagaccttctattgggtttactcaaaatattttattctctttctcagcattctcttatttatttatttatttatttatttttttttttgagaactaacaagattctcttattagaaaagtaaaattaaaataaagacaaagatatcattaccttctcccattcatccaaaaccctttctttttcttttctcaacaatttcttacaaaaaacattttaaatttcaataataggtaggttacacatatttagttatccctgctctggaacgttctagggttctccttctctggtttctcatccagtttgctactcgtccctatgctcttctccaccctcttctctttccttaattaatgcagttaatctgttttcttcctataatcatggttagtgtttaatgcagcctcccttttctccctctctctggttgttttcttctatgctaaccgtcactttgctcttctactttcacttctctttcttcaattaatgatgttaattatgtcttttgcctataatcattgttagtatctatcgcagcctccttttttcccttaccgagaatgcatttaatgtttcctcagacaccccttggctatccctcttcctcccctcttttcatgcattcaatgaaagtcgttttcttcaggtggaggcgcatcattgccctatatatgatggcgttagcatcccctcctcttccagttcactccaggtactatctctttttccttctctatttaaagttatgctttttgcttcgtacctaccctattccaacacccttttcctctttcgatcatctttctgttctttcattgcaaccaaaaatggcctctttccctgtttcccactccactcaattaactcctgaagaagctcttgtacatgactttgaccatgtttccatccatcctgaacctcaatcccagtcccactgcctagttgttaaaattttgtcccctaaaaccctgaaagtcgattggattcagaaagccatgactgaagcttgggcgctcgttgcccattttctttctctgaatatcacttgggactttttcgggttcagttcggttgtgagggtgaccgtcgaagagtcatggagggtcagccatggcatttcgaccgatcccttatgatctttgccattcctgatggttttgacaccatcctcccttcccaacttcgctatattcctctctgggtctaggttcaccatatcccctttgggtcccgttccaatggtttggcttagtttgttgctgatacgataggtgacctcattgaggttcatttgatctctctgtatgactctgtcacccctttcatgcgtgtccgtgttcttctcgacaccaccaaaccgctgcatcgtggcatgaatgtccacttcaagaaattgtcccttaccaagtggctcaagtttctctatgaaggcattcaaaattattgctactattgtggtaagcttgaccacactttcaacaagtgtggtaaatttctccttcattgtgataatcacccttatccccctagcctaagctacaaggatgtcttgcgtgcccctgccaaatccatctacaagaaaagtatttttgaactgtccacttctattccctttgaagaacaaccctctcttgccaacactggccatcccactatcgaagaccacaatgatcacttcactgtccccaccgtggttgaacccactcccccctttgccacttcccctccaccacctgccttcactcatacgacctccaattggctccaacttcatccattcctatttccaccccctctccaatcactcaatccacggttcactaccctctcccagtccatacctttatcacttctaccactaacccctccaccaccaaaggtaaggccccgatgtatcctgagacttccctgcctactctcagccaccctcctttatccagtctttgcatcaatgacactccttctgcacctcctcccaccaaaaaagtaataatatttataaataaaacaatactcatatcatcatcatcatcattgtatttaagacaatatataaactaattaaaaaatgaaatcatgtatatatataaatatatatatacattacgattttattattcatagtataataacgatataaccaaattggaaaatgaatttgaaagaagaaggtttagccagcgaaagtaaaatcaatgaaaggaagaattagataatcacacaaggtattcatgagagaaagatatagagaaacctaaataggagttcgtaggatttcattaaagaacccaaa

SEQ ID NO: 44341 - DNA, 1176 bp, Cannabis sativa
gaagtataaagcctcattgatcgaatagccaccctgagcacttttgtgtcaaaatctactgacaagtgttttctttttttaatatcctccgaagaaataagaaatttgaatggatcgaggaaagtgaggtagcctttcaggaactaaagaagcaatttgcacaacctcctatcgtattaaaacatctagacagtgaataattaagaatatacctagtagtgaccgaatctacaataagtgttgtactgatcagggaggagagtagcgcacaacacccaatctattatgtcagtaagaaattaatcgacgctaaaagccggtatactccaattgaaaagctgacatatttcttgctcctcacttcacgctgtttgatttcccatagattacaactccccaggtttaaatagccatatatatatatacaatcttcacccgagctttcgactcagcgctattcaactttagtcttttctttacctacatatagtaaagtaactgtgcgtctacagacttgacaacgaaaacacgcataacagaacataattatttgatttgtaaatgagcacccatacactcagttaacataaataaactaatttagatttaaacgttcatacctatagtatgattaaccataatgcaaatttaatttcagtaccctcgttgtattgaaattggtagctatataaaaatataatacatatatactaaacatgtgcatatgtgtaacttggaattcaattcaagtgtgtccgccaatctaagtggaattccgttcagtcatcagagaccttaagtcacattagcagtaaattgataagtgtctatctaaaacactttctattacttggatacaaaatttagagtttccctatcgactatacggtggaaatacctaaatactcctgacaaacaaaaattaagtcactcccaaaaaagtccaacctaacaaactagaattacaaatcgtatatcaaaattacgaaactagcagaccgaattcatagagctggtagaccaatttacgactgaaactaaactcgactttttctcaaattttcataccctaaacctgttcaatactatccatgttagacatttatatgtataaactgaaatatatgtatgcgtatataaagtgcggaattaagtcaacatatatacactatgaat

SEQ ID NO: 44342 - DNA, 1124 bp, Cannabis sativa
aattttaattacatgaatgaatgtatataattaattttgttgtattaatgtgtatgaattgtgactaaattttaattaccattcttgatatgttactaataaataattaaaactataataatgttgtaatatgtcagatcattacagaagacgtttctaatatggcaacaccacaacttgcgttagcacccgaattggcacgtgcaaccgcgcccgcgcctgcacccgaatcacctgaattggcatctggaggcgcactcacacgcgcacgcgcaagtgcgcgagcaccaaacagagcatctgcattagagcaagcaactgaattggcattagcaactgcacgcacacgagcgcgagcaaatgcacgtgcacgcgcacgcgcacgcacacgcgcacaagcaccccgatcagcgctagcgccaaacagagcacacgcattagaacaagcaactcaattgacatctgcagctgtgcgcgcacttgcaagagcgcgagcacgagaacgaacacgaacacgagagcaagcacgagaactactgctatattctcgtcaaagattagcagcagcacgagttcacttacttcaacaacaccaatttcatcatctaagagcagaagcattaggattagtagtagtacctcaacagcaccaacatcattatcaaagaacagaacagttactacaacaactattactacaacaacaacaacgactacaattacaacaacaacaacaacaacaacaacaacaacagcagcaacaatatcagctaccatatgatcatcaaagaccagctccaatacaagaccgaattgtacatcaacaattacctcaacatcaaaacccaccggcaccagcaccattaccaccagatgatgatgaaatcacagattgggatctttacttttcgtaatcttgagctgcaacacatacatatactaacatttttacaattgcaaattatagaatcaaagcaaagttttgttcatggtgacattttaaattgttctgttttcatttttccaaatgggatgactgttgtttatgtgacatgtttaaatcttggaacaactgaccaatgatgttaattttcatgcagtcatattattattgttaatttgta

SEQ ID NO: 44343 - DNA, 1393 bp, Cannabis sativa
tacacgcgtataaaataatatagttacgcgtgcaacacattatttgaacgcagttttcaacgtattaaactttttcgaatttcttaaaattttacagaatattttaataaacaattataatttacataaccatgagaaacaaatttgaataaaaatttatttatgatactaaaacatataaaaatgtatcaatgcatcccttaaggtacattgtagaattttcttatatttatatctacgagaattaataacaataatagaaaacgcggaagttatatccacacgcatattgacctacaaacgattagaccaacaaacgattagagctatatatatgactacttattactccggaacctagtttgctataattcaaaagcttcataagtatatatacataaattaagagggttctcatgattatcaatagatgaagatataatggtgtttgatcatattcagtactggggccctcctatctataacaacggtccgtggcatcacgtttatagtattttcagcttgagacacataatgatggtataatctcacccacgataaagggtaaaaaggaaaagagaaattatggcagaccattagtaatggaacccaccaaacaaattaactgtagtagtaatagctaggtgatgaagcgaagagagagtagtgttgtatatttgggttgttattattagttgcatgtaccaacttattatatctagagagatataatagagaattattttggccgaaaagcttgacttttgctggcaaaagcatgttcgatcactacatttctttgagtgcagtgcactctgtcctactctccagttcatctcatgtgttggtggacaacaacattttcacgcccaccacgctacacaattatatatatatatatatatatacaaatattatgtttttttttattatttttaattattttttaaacggaaaataataagggatttataattaatgttattatagatagtcatattttaattatccgagaaattatattgaagacagaagtcagacatgaaaacacatgatgaatttcatacacatacatacacacggctaggtgtgctctattatttgcttatatatataactgtgtcaaaacaaacatgcatttggaagattaatattactggatatatataaccgaaatggggaaaattttaaagaatcttagaaaaacatcttcaagattcaatttttcaaaatgaaaattatttcggaacaagcaagccttattgatcgaacatacttacaagaattcaggcttcagatccaatgatgatcagcttctcgaagtaattactgaccaaacgatctcgatagagatatagagctagttaggttattataagtcagagagagagag

SEQ ID NO: 44344 - DNA, 2799 bp, Cannabis sativa
ttatgaacttgccaaacttattgctacgagtttgggagatttaatccagatagatgaggatactattaaggagggtattgggccatatctaagagggcattttctattggatgttaataaacttattaggaggggtattaacatttgatttctaaaaatgaatagggaatttattaagtggcttgattttaagtatgagagacttcctaatttctgcttatactatggtaaactagatcatacttgaaaatattgtcaagcctatctccaaaagtgcgatgagtgtcttgttccaccgcatagttcttatactagtctacttaggggaaaagagaagtctattgataaaccagggtcttttgattatcctcatccacctgttgtttccatttcagagctacatactcatccacccccaaatgatcaaagaatgataaaccctttcttagtcaagccctttaactttactactcctctgaacacaacaatgcgactagggccttatctgggggctccccgtaactctagtgttgtcatggtacctacccatgtcaatcccaacttcactgaggtagaatcctctcattttaatgtcaataatactaatccacaccccggtactagttctactcatctggtgtccgtcccaactgattctgttattgtttctaatactcctgagtttaataaccctgaactgatgctttctgcccgttcccttgctgatcacataccttcccttgacttaggtaggtccactactgagatggctacccctcaacctgacccttcagttaaaggtaagggcttagcctatgcgtctggtgttaaaaggcatacgtttcattctcatcaagcaaatgttggaagttccctctgtttgatgctgaagcatgctaggtctggtgatagggattatgattcatcctttacaactgctagtcttgaataggcgggtgttgcggagaatattggcccaaaaaaatgaatcttttaagtaggaatgctcgaggattggggaatcctcaagcattcaaccatctttccttttttgttaaaatgcatagatctgttgtgctctttttgatagaaactagactcaaactacactgtatttatttttttaagacttcttcaggttttgattttggtattgaagtccccagattgcatttttgtggggatcttatgttgctttggaaagctaatgttattgtacatattttaaactacccactcaatcgtatcgactgtaatatttcttttaatagtaatgaaatgtggcattttacttgtttttatggttctcctgttcataataataagcgttttacttgggatttgcttcataaattattttataatgcccctaatctttcctcggccattatatgggattttaatagttatcttttcagtagtgataagagtggtggtagaattcctaataactcaaatatgctatcttttgttgagtttttaaataaatttgctttaatccctttaccttatgttggcaataaatacacttggtctaataataataatattagtgagaggttagattgggctattgtgtctaaagccttgtgtgatctttttcctaataataccattcatcatttgggtttctatggctctgatcatcaatctcttaatcttgtacttgataataatactattagacctataaattttgttaataagagctttaggtttgagaataattggttagaggaacctaatttttataagactgttgaagatgcttggcttaattctgttaatgatagtcatagcaatagttttttagcattaccttcataagcagagacactgtatcaatcatcttaagtcctggagtaaaaagcatagctttctgtttaagtctaggatttcccaacttagtattgaagtagatagcattcagaataagcttcctctaagtcgtgagaattctgttaggcttatccatcttcagtcggccttacaagctatgcttttcaaagaggaagtctattgggggcaaagagctagggtgaaatggttaaatgctggtgataacaatacaaaattttttcataagcatgcctctttttgagagaagtctaatgctataaagtatcttaaggatgatgaaggtgctatagttaatactcaggatggtataattagccttatcactacttacttccaaaatctattttcctcccaaggcagtgaagttgaggctgttgccactacattttcttccttgagttatgggcttaaggattctgacatcagtttcctagaaaaagattttattgctgatgaagttagaaaggttgtgtttcaaatctctagggataaagttgtgggtcttggtcgtctgaatgcccatttctatcaaaagaattggtctgtcttagggactgaatttactaatgcagtgttagattatcccaataatggggttgattttgttgacattaataccaccataattgttcctattcctaaaaagcagcgtgctaattcccttaaggatttcatgcctattagtctctgtactactttctacaaagtcatttctaaagttcttgctaacatgcttaaacttgttctgcataaaattatctcccctcaacaaagtgctttcatctctggtcgtatcatttttgataatatccttttagcaaatgagcttattcatgctattaacaatagcgtcatggaaaaattgggtgggctgctattaagctagagatgtccaaagcttttgacttgaatggaattttcttagaaatatcatgtatc

SEQ ID NO: 44345 - DNA, 6411 bp, Cannabis sativa
  modified_base (35)..(40): a, c, t, g, unknown or other
atgcaacataaaatgtgatttctgatctttattannnnnnaaatctgattatattgaaatgaaaaacccaacaacaatacccttgtcaatgttcctgtccaatacacttctattttatccaatcctacaattaaccacaatgctagttcaagcaccatgcctatcaccacaaacacaaaccctactgcacccaatatatccacacatcctatgcaaaccagacttaaatgtggtatcagaaaacccaaagcactgtcagctgtgtgtgaaccaaaaatagtaagagcatcccttcttgaaccccattggaataataccatgaatatagaatatgttgctctcaagaagaacaaaacatgggttgttgttcccagacctgctaatagggttcccattgggtgcaaatggatattcagggttaaattaaacgaagatggatcagtaaacaggtataaagctaggcttttggccaaaggctttcaccaacaagctggttttgatttctcagaatcatttattcctgtggtcaaggttgtcactattcaggtggttctaactgtggcaataacaaatgagtggacaatacgaaagttagatatcaacaatgattttctcaatggagatttgcatgaaaaaatatatatggaacaaccacctggctttgtggatccaaaatatccaaactatgtttacaaactcaacaaggcactgtatggtctcaaacaagcacctcgtgcttggtttgaaaagctttccaatgtgttggttcaacatggttttcagttctcaaaggctaatcagtccctatttttgaagtattcaaaaacaagctgcatttacattctagcatatgtggatgacatcttagttaagggaagtgatgacacacttgtcaatcagctcattgaagaacttagcaacaccttttctctcaaggatcttagtttggtggattacttctcgggcatacaagtgactcgaacttctgatggaattcttttgcctcaaaccaagtatcttcaagagctcctttgcaaagctgatatgcaaaatgtaaacaaacagaacacaccaatgaatagtggccttaaactgtcaaattatgggagtgaacttgtcaaaatgtaaacaaacagaacacaccaatgaatagtggccattgttggagcattatagtatgccactgtcacacgacctgacctagtattttgtgtaaacaaagtgtgtcaatacttgcatcaacctttaatttctcactggacagcagtgaaaaggatactaagatatgttgctggtacattggactatggtctcatgctcaaaccagttaaggatttctcccttgaagtgttatgtgatgtggattgggcatccgatccttatgacaggaggtccgcgacaggttattgcatctatttaggggaaatttggtcacttggaaatcacaaaaacaagccacaatcagcaagtcttccactgaagtagaatttagaagccttgcaagtgcagtttcagaggtaacatggctgcagtctcttcttcatgaactgcatattacttgtcctacagctccttttgtctggtgtgacaatcaaagcaccgtgcttttagctgccaatcctgtcttacacgccaggacaaagcctattgaaatcgacttgtattttgttcgagacaaggtgctacaaaatccacactcagtttgaggggggctatcaaggacactgttacataggatagttgttgctaactgtcctaactatttttcagttagtctgttgtattctttctgttaagagttattggttctgttgcttttggttggttaaggatcttgtatataaactctgtttttccatactcttgaataataataatacaactctgttcttcttcactttctctctcaagattaaacactgacatgtttcaacaaaatattcattcttttgttaaaaaaaaaaattaatcaatcaaactttcagtgtaaagaatcaccattacattaattctacattttatactcaatgatcttcattaaataataattataaaaaacaataaatctaataagaatacggacaagtggaatctataccttaataggccaaaacccttatggggcctaaacttgtattatatgttgtatatacataaaataatataactacagagaagaagtagcttcagttaacttagaaattttccttgtgaaaatcaaatttggtgcttgttttccgagagaagtctagagataggctctttagctcatcaactaatccatgtgctccacaataaaacactcctacaaaaatgaaaataccaaaattaacgaccttcagttcagaacaactaaacaaaattaaaattgacaaacaacaagaggagtataatttaagaaaatatatttattagttgttgaaaacgaaagcaaaatacttaccaactcgttgatcgacgtgcttaacagctacgtgcttgaaaacattacgccaatttggccttgcaaaatgggtcttgacacttgtgcctgatacaatatcaactccatttttagcatgattgagagactgaagcatagtgatcaaagcagatcgagcatctccttcttcataaacactagtcaagtagttgtggagctcaataacaccatcgtggtcgttctcagccacctcattcatcacacccttgaaccactcaaatgagccctgttctcgagtgacccagtagaaataggcacgtttcgtggcaaaagggtttctcttgttattgcttttaaatccactatctattccatcttcgatctctttgtattggttcatgttgttaagcacatcttttagaatgctgatcaaaggagtggctccaattccaagccctacgagaaggataacttcgtactgcttgtaatcttgtgctggtgcaccatatggcccatcgattagaagcctcggcatcctaatattttggaaacagaacatcaatcagtatagaccataaataaaagttgaaaatgttcaaaaatagccaagtaatagtaacctatctcaaaattaatcgggacatatactaagcgatgactaatgatgtaatgggaataagtataccttggtatgttattggtttgaccaatgtcagctcttagaaggccactttgattaatagatggaggttggcatacctataataatcacatgccaagattagcaagattacctacgatatatataaatattatatgaggtggaaaatgactgaattagatcagtcacatattggagaaagattggtacctttgagaaaatagttttgagttgtgatgtccagtcacctgctgtgcgaatatggacactcaagtaatcgtctccaggagccgaagtaattgaaaaaggatgcctgggaacattaatatatatatatatatgcattcatataatttacacaaatatcataatcacataacaagaacattaagaatattgtagtttccaagttaaagcttaccactgaaatggggatatagccgaacaattcaagtatatgtattgcccactagtgtatttaaatccctgtggtctagacatatgcagtgctagaacatttccaggatacactgcaacctgaaaatttgaagaaagtattattttattatttttactcattgagaaagtaaaaaacaaaaaatcattaaataaggaaaagttacctttaaaattttcactgatttgttaccagatctaaatgcacgaatcaagcgttcacaggcatataaaaggattggaacagctagatacatccatgtctacaacaatgttagaaaattgaaatcagaatttagatgatataattaaagtaaagaaataatagattaaataaatcgaaattaattgtttgagtaacttactgtctttttgtaccactccttggagaggtagaggtagtaaccatgaacgacaaagaggacgtaaacaatgacaaacaagtggtgagagtaccaaaaggcgttgaacccagtaagcctcttgagagcagtagggaggtttaacctgtttcgtcggaaccaaggttgtgctaagatgaaagcaatagccattaggatcaccatgaccacacctgtccacccctctgtacccttcacaaaccaccaatagttttcgggttgttcttccccaaagaatttctccattggctcgtattgatcttcagttgcatgcaatagcctagggaaatcacacgttaaatgtgcccctgcatgtagaccaactccaattgcaatcccagcagcgatcacctattaaaagaaacaaaaaggcaacaaccatggagattaatatcaatcacaacatccaagaaactataacgaaattaatttagctcggtcattttaccttatgaaaattaatattgtcatcaaagggtatcacaactcccaactttgtcctgctccttagcagagtaatggtatttctacaaacaggtaagagaattagagccatgttgaacttgagagtctcggcagcacctttagcagtggtaacacaatagcccatcacttcaaacacagctcgattcttgtactgaatgaacttccaagtgaaaaggcccgcacagatggccagccataggcacatgacccaaatacgcttccagttgtcttctataaaatatttgaaccgtctgtattcccgctttattgggttggagtccttagtagggaccaacttctggctcagcatctggctaagaacccgactctcagtgcctggtttaaggttactggattgaattgggccttgtagaagtagcatttccaagttgtatatctacagttagcaaaagaaaaataaaaacgattgcgcaacttctttcatagggcaattccaatggaacactacaatgctaaatttgttaaaattttacaccaaatttattccaaccacactctaaaacctatcctatatatagcattgtctatactcacacactaatatatatataaactacactaaatatatttttattaatttttaatatttaaataatatatttataagtaaactttttgtatttatattatttgtgtttatttataatattacaaaataatataataatcaaaaatataatttttagtattataattgaaagaaaaaaaaattgtgttaaaattttattctttttgtgttaatttaacacaaaatttgatatttaccattggagatgctacttaaaacttcagcccatttcagtctaaaccatttgttccaattatctacataattgaattatttgtacatttaaaaacttaaattgaattatttgtactacagttaattaaaaattaattttaatcaaaaccataaagttttagatctacactacactgcacataaataaaacataatgattaacaataaactttcaaagatagtgatagactgatagtgatgaacactcgatataaatattttatattatattaaataaatacagttttttttttttttttttaaaaaaaaaggaagaagattcagacctcaatatagccaaggttgtctgggtccagctcttccataataagtgcagcatattcttcagcacgttcttgaatcttagacaacttgtttgcaccagcacttaacgtaataatctgtatgtttaggtccataacatgttttaaaaaaatttagtatcttttattttttccaattatgtatttttttttttttgttatattacaacaatttttttttttaaagttccactattaaagaaaaacattagtaaaaagactaacctcctttacttcctctccattgattcggccatcagcgtttttgtccaccctgcattcattgcactcttagttgattaatgtaggtgactaaaaaaaattaaactttaattatgctagtgcttacaagcccaaaccaacttatattttagagcattgctattaagaaccagtaacgcttagcacattttcgacatgtcgcgttgcgattggttagcgatactctctaaaagttattacattaaattatataggacttgatacttaattggactaatagcgatattgacacgtactagggtgctagacaccactagtagcctttagcatttctctacattttatagttccattaataaaaaaaaaaaacttatattttgtaaatttattttattcaacttattatatttctcaaaagaaaaactcgtttttgaatatacattattataatgttacatgtcgtatatattatcccactataaaaagttagacattattatatatatatatatatttcccatcaccaatgaccaatattttttttttttttttttttttgaaaattttcaaataatcactgtatcgaaattggagttcaaatgatcatcattacaaat

SEQ ID NO: 44346 - DNA, 5641 bp, Cannabis sativa
ttttttttttttttttgtattgatgaatgttaaatcttatatgtgaaaaaattgttacctttttctacaagcttaataagtctcctggatttttttttagtgtctagaaggaaataaaaaaaagtgaatgagaatacaatacaaccaacgcaccaaccatctttccaatttagaaattaataatttttgtataaacgaaagagaaagagaaagagttggagtatatctctctcagtgtttagaagagggagggtgtgtatgaatgggtctttaaactattcatagtgataaatactgatttccctttgtatgcagaaaatgatttcactttgaaatttttgttttatatgattagattttgttgcttctgtgtggatgaagatatattaagcttgtaataagtcttttgacttaatgaagcaaatttagttttaacaacatacacaattattcttatactttatgcataagaaaacgctccactgtatattctaaactaatacatattgttttgaaaagttgaaacaatttttttcgctacaactgttctgattgtattcttttagtgattaacagtttctgtttaagttaccacttttttgaaaagaaaaaaatatgttaaaagcacaacaaattctgttacataggcacttatttaataggaaagagatatatacatattatatagatagatttatattcatgtagataaccacttctgagctgttcttttcttttttcaatttccgttgcttatgctacattccgattttaggttttagtgatgagacaaacaaaaacattgaggaaaaggaaaattctctgtaaaaatctaaatctgaacacaagaaattttgtccattattaatttcaaacatggcctatgtcacagagtgattgctagctatggtgatctaaacagttggtgaatttggccctgtatttcagaatttcatgtgatgatattagaaacttggccatacaaaggaaaagaaaagagatgaaaaaataggtcctttaagcttctaaatagtgttggtaattcattctcagtccaaattgtgtatacatttctaatttcaatactgaataatattctatagtacattcttattgcattttgtttggtcacccgttcgagttagtgttgtactaaatttgtgagaaattaaatggtttttgtttggatcatctgttttttgttttcacttgtgttttttttgtgtgtgtgtggttattataactttgactgatgctcaatcagatggaacaatcgctatcttctatcacttacaaaggctccatagttgctgcaattgctgaagccaagaagcagaggaaactatttgttgttttcatttcaggtattcaattttctgtaatgattatgttttttcttctggagtcatataaaatttaacatccaattccatttggttggtgctgctcgtatattataattcattcttataaatggagaaatgatgtggtaaattactgaataattatacatgtatcgacatagttatttgtttatacatgtatagggtgcttcttagtttggggcattacttttgctcctactgtagggacgttttttatttttcctactttaagaagttatatctcaatttttttatatgatgttgtagattgtagttgtaaatgcgtcttgtttgttttcgaaaaattttgaatgttttacagtgtcgaaaataaagttcaaaatagtctgttgcgcctgcgtaaaataaaatagtttgaatcttattttcggcactctaaatttttcagaatttttcgaaaacaagcaggatgcctagtataattataatgtaaatcatcatataaattcttttagtttataatttctttatatatcaaaaataagaaatgtctttacactaaaagcaaaactaatgctccaccaaagattttcctatatatatgtatatatatttttagagggattcttagtacaactaaatgctaattaatgtgcatttggacgatttgttaattccatgttcagtttgctcaatacagaaacaaatggacattatttttatatgtatacatacatataaattataatcaagtcgatgtatttatatctattttgcttctttttatgagaaagttttggcttctgctgttgtatgttaacgatatgcatcattagcatctagcttatagttatagtcttgtattaatgacatgcatataacataaaaagctgttaaaaacactttcatgatgttttaatctgtaaggatgttatattctttgcagaaaagaggtaatattaaactaagtaattctattaaatggttgaataaatacttggagaattgtggatataattaccattaattgtttgggtaaataacaccattgggtgatgtttttcattgtcatgcatatgcataaataaatgcacttgatttgtattctacttctttagcgagtgctttgatttatataaaggatgctcgaatcatttctttcatgagtgcttatgatttatataaagatgctcgaattaattgatctcttttagtctgattcttagttgtaccttgtatgctttatttttacttttttaattattttctaactcattattaggtgaagatgctgagtcaaacagtttggaaaaaactacatggaatgatttaaaggtacacgtgttcttcctggtctgcgtgggtgtatatttacatgtaaaattgctcagttattcttacacttcattaatgttgtgtacaggtggtagagtcggtacagaagtattgcattctattacatttctctgaaggaagtaatgatgctgcacagttttctgcaatatgtatccttctatacaaagattgattaataagcaaaattccttttatcttttatgctactgattctggtgaacaatctttctctctatttgtggttctcagtaatattgtttagtggagaaccttaaaattaatatttatcgtaggaagttgtagacgctttttcttagttatcttagtctattcattttctgatcatggatgatgataaataatataattgactttattgtctatatttcaaaaatcacattctttcagccaaacaaaagagaagaaggcttcaaaatggttaaaacgtttgttcttttgtgttgatgtgtgctttctcctattttccttatatttatctgtgtctaacaaaagcttttgctattaagggctagttggcatcagatgcattgttcgattttacttgtttcttatttatcttttcccatttatggaacaaaaaagtatccttccatcaatttaattcagacccatataaatctattccttgtgtaatagcggttggatacaatggcatacaagtttggcaaaatggtatatttctcttaagagtaatgatatgtgcacacataaatcacacccacacacttatgtgacaagtaatttcaaccgatcatctttatttaaggtgtttcccacttgttaaaatttacttgccacacataagcgtgtatcaagtttgtgtgtgatttatgtgtgcacattattattcttttcttaaaccttcattccaggattattgatttatacgtggcagtatctaatacattctaagacattattattcttttattattttggtagagggctttgtgagtgctggagtgctagcatccagtttagagaaagcttggctgagccttcacatacaggtatgtgttcgttcgttgttttctttcattctctagagacacttttccaatttgtgtagagccggatgctagattaactgatctttattctggcttattctgaccaagatgtgtgttatgagtattatttaagttctggtcatctggtgtcaattgtcaagtgtacatcaggtatatatattatgccaatgaatggaatgtgctcactttaattattcagtcttcattttggacatgacaccttaaaaagaaaagtctctttcttgcatatttattaaaataatgtaatttatctaaactacaaaagattttttaggggaataaaacgaggataaataagtaatttaatatgtaaaagtccaaaagttattgccacttttatatagttatagattatagataaaaggtattggcatttgatttcattcttcttcaggcatgagaagttcttttttaactgagagtgagttctttcccttgcttcattggttggtttttggataattttatctcatgcagttagttctgccactcatatgcttatgtgtgtgtagcattttcataacaagggagtaaaatattttatcaaatgtataaatgtttattagatgttttaataaattacaggatacaactgctgctgtccttagtgcagctctttcttccaaggcatcagaaccatcaacttcaagagtttctggctctgcatcttctgatcaaggaagttcaaatttagatgctcaatcaccttcaacagacaaaagtaaatcaccagattctataaccgaggttaactctgacaataaaaaggaggatcaaattcgtcaacacactgttgaggtagatataagattctagcaattgtgtggttatgtgagtaataataagcaatatgcatgatttggttactctgttatttttttattctacaggatgccacaacttcagacttacaagaagttaataaaacagcatgtgctggtaagaagcccatctcatccactaaagttgatgacaaagaattacagtgtcctactgtagttaacctggataaaactggagccgatcattcttctacgagagttaaagctaaatctcttgctatgaaaaaagctactggtaatgatttagatgtttcagatggcgggtcaaaatcacttaaagttagtgaagttaagcaagatgatcaggtgaaagctgtagatagtaagaagcctacccaggttgatagctgtgctaaagtcaacagaacgaatgatgtatacttaaacattcgcatgcccaatggtggaaacttgcaaggcaaattctctgtatcgagcactttgagaatggtaaaagaatatgttgttgaacatcaagatagtatcattggccctttcgatcttgccattccttatccacgcaaggtatacaatggccaaggtaggtatgggatagattcccttgtgtttttcatttgcactgttcattgtgttggtcatggccatgtctttgataatcacgtgtgatgtgccaattgtgcttgtcattattttaatggagaaaaaaagaggtaaggaaattatagagaaaacaataagcgtggaaaactaaaataaaaaataaagataaaaaagaatcaatttttcatgtttggtatggatagaattgtatggtaaaaagttcattcaaatttgtttcctacattttccttatttttcaaactaaaataaaaactccattctgagtaataacaagtttgaggaaaataaactacacgtcatagctattctttttatcggctttgaacttacatacataaatatgcttttgctttggcttggtagggcctaggaatgcattttagtattttttaagcattagaagatcacagataactcacaggttgttaaagctcagggtaaa

SEQ ID NO: 44347 - DNA, 2647 bp, Cannabis sativa
  modified_base (928)..(931): a, c, t, g, unknown or other
aatccaaaaattaattatatcatcattattactttgattatttctattttaatacaaaaaatgtgaaaaattaaagtttggaactgaaaaaattaagtacaaaagaatgtatataagagatatttgcgaaaattgaatgagaaaaatgaaaagcactaatatgatgctaacctttgtaaaagagatttcaatttataataataataataataataataataatagtatcgcagagcttgtcgtcatcttacacaagaattaatgttctttctggggtgtccacgagcagccataaccccaattctcagattggagtcgtgcgaaccctagcatagcaaaaagaatattaggtctatttaattatattttcaaatttttaatattaaaaactaattatttcttaaatttatttatttataaaaaattcaatggggacaaaacttcttccattaaagataaataaaagtaaatcatttaattatttgaatgttaatattggaggtttttcaaaaatgtgtaacaacatatttgaaattattgcccccaaaataacaatccaaaaagtacgtacgaagcaaaccacccttgcatgtgtcatgcatcgcaccatgcacctaggtacgtaagaatattaatatttaacaaatacataaacctttgtatacatacaaaacacataataatatacaaattttacttattaatgataattattaccttttctcaaaaaaataaaaatattattaccaactctattatttttatatctatccccaaaaattaaattctacaagtataacacatacaaaaaagcataaatcctaatgtatataatcggacacaagtatatatatatatatatatttatatatatttatatgaaatacctggatattactcggtaataaacaaatttaactataaatannnnttttaaaaatattaaaccattagattttagttcgatagcgaataataaaagaaacatttgaatttttatgcttaatttatctacttaaataaaaaaaaaatacttctttttatactatatcaaaaatatgtttatagaaaaaaaatatctaagtcaaatttaacttttttttatcacttttttgtcgaaattttttttttattttttttttttcagctaatgaaccaatctcagcctatataatgtaaaaatgagaaatttttctaattaaatagaataaataatcataaaactcaaaatttttgaatattagctattcattggataatacccattaaaagtgtatccatatatatataatttaacttttttttttctttcaatcaaactaattaatttttattccaaaaaatgatactaaaattagtttaatataaaatttatgaaatttaaaaaatcaacaacaggcataattaacgttatatattaaaaaggccaaaatggttaattaatccgacgaatatataatactcacaaaaaattaattaaaaaacacaacgactcataatattaaattattattacaatatcaattttatcattaaaagattaaaaaaattaataacaagtactccaagtataaatctgattttgttttgttttttgtttttttataatattatttttgtaggttattctcattattaaactagctagtaatctatttttattttttttaataaactaatatatctaaatacaaacaacaaattatatatatatacaaaaatactgattgtccagcaaaacttaattatattacacgatctctatgagttcaatgatcgtgcttgtcctcatgacttgtatgcatataattaattaattaattaattaattaaaataaacattgaaaaggtatttttgtatgcatgcatatatatatgccatatgaaattatcattacaaaaggaaaaacaaatactacttttaaaaattatatacacacatgttaccttaaagaaaataaacaacaaaatattaattcaaattttgttactagctaattaattataattaaatctgaattttattattattttttttcatgaggttatataaattgtagttatatatcttatttattttttaaaaaaattctaaataatttaaacttttaaaaattctaaataatattgattcaaaaggtgtatatattatatagatgtttcttttttaggtctctttaaaaggaggcgcccagtagaattgtaaaatttcattggatatggaatacagtttttttttatttccctaaaaaaaaaaccaagttcataatattagtcatttgtatgcaaataaaaatataaattacctgcaactgatttttcgaattctaattttggcaatataaattatgctaatacatccaaaaaacagaaagatgcttactacaactgatgtaaattatcatattaaattaattgagttatataatttttccatgtatactgaaaatagaaaacgcgtccatacttacggtagaagcaaaaatgatgctgatttttgttatatatatttttatataattttgttggttattgattgtttttagtatacatgcaatacactttcacaaatattcttacttatgtttataaatagataaagatataaatatgtgctttcacatttccatttgtattatcaatccta

SEQ ID NO: 44348 - DNA, 2384 bp, Cannabis sativa
ttcaatcggatcaacataagataatagtgaaacaagaagtgattactatcacaatatagacatgtcacaagaattcttggttaaatttcatttctctggtagcccataaaccattttaagcaaaagacagagccaatcttgctgtatcccttcaaaatatcaaatttcttagtaatcaacaaaacccacaaatgaaaaagaagaatagcacataaatctgcctaaattactcatttatagcctaagccaaatcattgtcatcagagcataataaaactttcagacctaatcatcaattataattttaatgtatgaatagcaaatctgcctaaaatacccagaactaaatcatacccatgaaagcacagctttcagattccaataccataatttcaaacataacaacaaatctgcccaaaatactcatatgtatagtatagatactataaaccaaatcatatacacttcaatttcaaagcataaatctttcaaattctaattacgccataactcaacataacaactattctgcccaacaacaacaacaacaatcaatcaatcaataaaaagatggaatgagttagtacaagagtggcaataaaaggagacagttctttgagaaggcgccctggttcggaagaaaaagctattggggagagtgaaagagagcgaggaacgaagaggagtggtggagtagcggaggtgaagcccagtggctaaagtaacctctttgccggtgcctccattaacagataaggaagataacggggaaactctcaccgattccaacgccccaagacaccgcatcttctccttcttcctcaaaccaaacaagtcaaagaataaacaaactcgcttggttacagatttttcctctttttttatttatattaatttctggttttcttgttcccagtttttattgggatttttatttgtttagctgaatgagaaaagtgtttgggagaaattaaaataaacgacatcgttggtcgtctctacgtaaaaagtccaatttctgtcgtgtatatattataacgacatgtcgtttgtaagatcaatttccaatgttctctcaactcaagtatgtgagttagcatatgtcaaaaaaaaaaatatgtgagttagcaaatattaaattatataaagtagtttgcagtataaatatttaagtttaattcttaattattcttcgcggatgacaacctcattctctgcaaagctaagaatttctctgatatttcacttaaacgttcccctgatctctattgcaaagcttttggacagctaatcaatcaagcaaaatcaagtctatctttctctccaaacattaatagagatgacaaagcaagattccgtcagatattccaaatgctaattcaacctctccatgaaaaatacttgggtttaccatcgtattctggaacagataagaagatatcgtcccaaaacatcactgacagaatttggaagctacttaaatcttggcaagaaaagctattctcggctggtgggaaggaaattcttctgaaagcagttgtgcaatctattcctacctatgttatgagttgtttccaactaccaaaaaaactgattgatcaaattgaaaaaataatgaatagattttggtggggatcgaatgctacaggaacagatattcgttggaaaaattagaaatctttatgtcgtgcaaaatgtgaaggaggtttggattttcttgactttgttcatttcaatcaatcgttattggcaaaacaagcatggaggattttttttccaatccaaactcattacttagtactctgcttatgcatcgatattcctcgaattcgggtttcttggaatctgaggttggaactcatccttctatgacatggagtggtatagtttgggggaaagaattgctaaaaaatggtctaagatgaaaggttggaactggggaaaacatctttgctgcaacagatggctggcttcctggcacgctactttcataccacttcaatttctagattcagaccattcgatgtgtgtctccagcttaatttctctagatcgaacctggaacacttctctactgccgaggtttttcctcccttttgatatccaatgaatcagggacactcctctaagttatattcctcatcttgaccaacaaatctggcattacacttcggatggaatatacattgtcaaatttggctaccaattagcacttcagcttaacaaaaatgaagaagaatctacctcaaactcagaatcaagatggtggaagaaatttttgttgggctttgtgccctaaataaaattctattttaatgtaatcttttctattcaattatcaataaaaaaacagatttaaattcattacttatttaatgtgttat

SEQ ID NO: 44349 - DNA, 2069 bp, Cannabis sativa
agaattgttgtggtatattcataccactctaaggtatagtatttgtatgttatattatatatcatgaaggaaagaaataaaaataaaattaaaagaattgaatagtagtttactattcggtatagttattttgcactatgatatattgtttttatggtaataatatactaagaaaaaaaattgaaagaaattatattaatttaatattgtggtatattcttttaatgtgctatggtatataatgaacgaaagaggaaaaaaacatgaaatattagtttaagtatgagttatagttatatttgattgatgtatattgattttatgttcattggtattttataaaggaaagaataagaaaaaaacttgtggaatattaaattaagttttttgtataatttttttttcactatgctggtggtatattaattttttttcagtgcgcagacagtagaacaaataaaaaaaatggagttgagcttcatctatataactaagagcattttaggtattaacatttataaaaggccatttactttatttttttaaaaactggacattaactttcattagtgtgtgatttaaggccatttattacaatttctcatattttactgagagcaaatttgttgtgacatggtattttaaatgaattctttagtttcattcgatgttctatgagttgaaatttttatttgttttttcaggtttatggaagaagtatattacaatttcatgaagaaatttgctaagagaggcgtgaaaaaaatttgataagaatagaaaatttgtatatacataatacatctttgtattttttttttttttttatatatatttggagaattaagagagaacattttaacttgtaattttagtattgcagtatatttaaatttgatcaatttttaatttaatgtaaagacaattctatattttaatataaattaattactttatatttatttaaatgtttaaatcatttttaaatttgtttctaattttcaattaaataaatatttatattttaaataaaaataaattttagtatttttaattaaaataaatattagtagtataagttgaaaataagcacgacacttaaacgataggtatgttatgtgtgtcgttagttgtcgtgccaaagtacacttttttggcaccaactcataggcatgtcatatcgtgccaatatgacgacgagcacaaatcgcgctagtagaatctttttcttgtaatgatttttctaatttattttacacaggtaaatatttttcaagattcttctatttcacttgattaattactcaggttctaactagaattaatttttcttctacctacaatgtttagtattttaaccactaattgtgctgttagttacagacataagctaataattaatgttcacgtgatcatgaatatcttttggatcaaaacattatatatgtaacctttatctagtttctgacaatgcttaagaattattaataaataatcataatttagcatgaatcacaaatccaaacatataagagaggataaaacaaagcaagaaaaatccagacttgtgagcctaatgcttacttatttaatgatgttaattaatataaataccatatataatcacttttccttttcattgcttagacgcatctcaacaacttggctcatagtgggtctcacatctttatcttcctcaacacatctaagagccccttcgatcaaaatttccacttctcttaagttataattgccttccatcaaggggtctacaatttcatcaatacactctacttagctgaccacttgcataattaatcttatctcttaccacgtaacaagcattttgggtctagcctcaccaacatcttctccatcagaacctcttgttgggccattgccaatcaccatttcaagcaaaacaattccatagctataaacatctactttggatgtgatcggaagattataaacccattcaggagccatattgacacgctccaaacgatccgtcgaaggagtatgcggtgccccacaggtccgcgtgcgaggttcagccaaccaaccga

SEQ ID NO: 44350 - DNA, 4039 bp, Cannabis sativa
  modified_base (98)..(99): a, c, t, g, unknown or other
attaattattttaaaagtaaaaaaataaaaaatttctttttctttaaaaattaaaaattaaaaaaacaattttaaaaaaataaaaattttaaaaaaannaaaaaaaaaaaaaaatttattattccttgaaaaattgtgttcacaaaacctcagtccactccaatacaaagcctcctaaacccttcactcttcacactcgttccgcctcactccggtggtcaatctctcctccggtgcccttcaaaaccagagcttcagccatggatttgggaacctcttctctttctctcaatactatcccaactaaatttctcagacccattcactcttcaacttcatcttcaaccctctttcttcttcctcaacctcggaacaacccatttcctttgaaagcaactcttaaagaattcaacatcaccgcaacacaaaaggtttgtttttgcatttgttctaattgttttgtttactatttgattttgtgtttaatatattgttttgatgatgatgcagaagatgtccagagaactggagtattcgaatttgacagctttatcgcctttggatggtcggtattggggaaaagtcaaggacttggctccttatatgagtgaatttgcccttatttattatagggttttagttgaggtttgaaaatttctcaactttgttctctctctttttatgttccatggaatttcattcaagaaaagaattagggttaggggttgttcgcagattgctttggtccagattttcatttttttggaaccaaccaaaccaatcaacttaagaacaaattagtttatagtttgtattttgtaattgttctaatgttttcttttatgtaattgttctttttctactgttcaaaatttaacaacagaaaaaaaaaacattgtcaaaacaatattaagtcaatctcaataggtggtttggtttggtttgaatcgctagtgagaattttaaaatggtgaccaaactagagaattataaacgaacggaattaagcaaactgttgacaccagattcatttggttcggtctcaaatggtttggttcggattggttgaggtttggaattacggatagcggattgttgttaggctatataagtaatttattgataagcattatggtttcactgattagttcagctagcttttattgaattttagcttagttttattctttatgatgcttatagtgtagaaatgtatttatttcgggtttattgttctgttgattagtgaattttcatatttatttcaggtccaatggttgataaaactttcacaaattccaggagtagaagaagtgcctagctttagtgatgatgctaaatcttttttgcaaggtgttattgatgaattcacagtagatgatgctttggagataaaaaaaattgagagagttacaaatcacgatgtcaaggcagtggaatattttttgaaacagaaatgcgagtctcatgccgagattgcaaaggtttggaattttctttagtagattgaaaaaaagagtattttgaatgttctgagaattatctaattcttgattttgtcttgaaggtgcttgaattttttcatttttcatgcacatctgaagatatcaacaatcttgctcatgcattgatgttgaaagaagctttggacaatactatattacctgtcgtcgatgatttgattggggcaatcggtaaaatggctgaggacaatgctcgtatttcgatgctttctcgcacccatggacaggtaaaagctctttctttgaaaaatcatcattgttagattcgatccgattaacaaaaacaacaggcaagaagcaacaaaacacatcattctatgagtttaaagaagtcatttttattgaattaggagagaaaaagtataaaagaaagcaacttcataatttccaaaataatttaataaagaaatctccaccatatcacctaatcaatctagtgtcttaaaaaaatgaaattggggtttcaaagaaaaagaaaaagaaaaagaaaaaaacaagatcatattatcttaaaataattctactatcacatagttttaaaggctatttctgtgaatgtgaagaattaggcagattgtttaatgactactgtgataaaactgtgtccatgagtttttcttacttatgtaattatatcttattgtatggttaatatcagcaccttttattttcgaaactgtagccagcttcaccgacaactttggggaaggaaatggcgatatttgctgttaggttaagtagagaaagaagggatatttctcaggttgagataatggggaaatttgctggtgctgttggtaattacaatgcccatcttgttgcatatccttcgatcgattggccccagattgctgaagagtttgtcacatctcttggattgagtttcaacgcgtatgttagtcaggttagtttcttttcattttttcgagcccatttttaagcattaaaggcggtgttggtgttatcatgcatgttttgaatgctctgatgttatatttgtttaatcttttgcttttgcagattgagacacatgactatatggcgaaattgtttcatgcaatttatcgacttaacaatatattgattgatttcgatcgagatatatggggctatatctcatggggttactttaaacaagtgagtgttttgaggtacaatgtatcaacttgcaagtagtttttattctctttcaagaaattttactttttatgttcaaatcttgagcagataactaaggctggagagattggatcttcaactatgcctcacaaagtgaacccaattgattttgaaaatagtgaaggcaatctcggtgtggctaatggaactctttctcacttgagtacaaagttgcccatctctcgatttcaggtaaagttgctccgattcctgtttgaactcgattctttcttccattttcgtgttcatgaaacacggttttgcttcttgcccttttgatagttttagtactaatattgcggtactttgcagcgtgacttaaccgattcaacggtcttgagaaatatgggtgttggattgggacactctcttctcgcatataaaagtacactccaaggaattacaaaacttcaggtatgtatgatatgaactttgacaatgttagtcttctttatcgttaatctttatgttagtgttgatttaatcattcatcaatatgatttagaaatttctgtttaacaagaaactgcaaaggctccatctttaagcttttacaacagaagaaaaaccgacaaaagtgcatccacacggggaatatttttctgattatttgtcttgcgatttaggtgaatgttgctcgcttgagtgaggacttggacaattgttgggaggtgcttgccgaacccatccaaactgtacgtaacatctttctttcgtttgcaataactttgtttcttcgtctccaacctatatttactgtaggagccatactagttttgtccataggtggcttttcacaaatggagtaattagtgaaaattgactattttataatgttactttgtaaaaagactttcttttgatagtgtttttgcaaaatgatctctttttggtatctagacgagggtgttgagaatttccgatagtagagaataatttcgatacattatccaaagaagtgttgatggatgcattttctcttacggggtttggattgcgaaatttgatttttaggtaatgcgaagatacggtgttcctgaaccatacgagaagctcaaggaacttacacgaggacgagcggttaacagggaaagtataagagagttcattgaaggtttggagttacctaatgaagcaaagacagagctattgaagctaaccccacatagctatgttggaacagctgttgatttggctctaaccactgagaaagctgtgaaattggtcaatggaaagtgttaggaattttcattttgttgtttatttataatattttttataacattgaaaaccaatatagaagcaaaatgttgtaccaaggttcaaacaaggctcca

SEQ ID NO: 44351 - DNA, 2198 bp, Cannabis sativa
ataaatatatatatatatattaaaaccacaatttcattattatttttttttttttataagatatgttcttaaatttttataaatgttttatttatgtatgtataatagaaaaaaaaaataggtatttcttttaaaaaaaaaataaaaaaaattaagccttagaaagtgagaattttgttcaataatctaagctgcctaatgtttgggtgggctcccatttatactcttactcaaacattctatatagaaatagaacaattcatcttcgaatgtacataataaaagaagacaatataaacaagatatagagtgtaatttcctctatcatcttattggagtttaggcgtctctcccagtatgtactgcctctctctatgaaaaacgcctaaaatacattaaaaacaaaagaaaaaaaaatgtagaaattgagcgtctttcgtaaggagatgcagaacattttgaagtttttgtgattgtagtgattttgtgtgatgcattaacacatttttggattttgcttaatgtttgagttttggaattgaaatattagttgtgttttgaacacagtttaatgggtatttgtatgttcgataatttgagatgagcaaaagtattcgagtgaggtttataaccgataagggttcgaataagttataatgtctcctatattaagtggtgaaaactcttttttaccaaacgaataggtcaaatctatgtttaaaatttaaaatatggtaacaaatattttgtactaaatttacaccatcattagggggaaaatgcattgtttacctagaagatattttaacagtagtattcgaccaattgtgattttcaatcaaattggtaactttttgaaatataattaaagtcaagccgagttttatggattaaggaaagtaggaatgtgttaacaatatacaaacaaatatgagaaagaaaaaaaaaacaaaaagagaatagggtaaaaattggttaaaagaaaaaagaatgaaaaaaaagacagggtaaacattgttaaaatatttccaatacattacttagtaaaattttattgaaaatttttgtagtagataaccccttaaaaggttgttttggaagattttttatctgtttcgatatttaaaaaaaatattagtttaatatttttcatgatcacgtacattgtagctatttaagattacttgtaaattttcaaaaaaaattaaataatttacgatgccaaaaattagatctaacagttacttaccacacgtataagaaaaaatagttgtgtggaacaaaatatgtaaatattattttttacattatgaactaattgaaatgttttaaaaatttacaaatgatcctataactataacatacacacgatcgtaaaaaaattgactaaaaaatttttatatatgacaaaatatttaaatataggtattatttgagcatgtttattaggtatcggtattactaatacctaatatcaatattaatatgaagtgatattcacaattaattattcatttcttataaaaattaataagcaaacatattttacttaaaatattaaattataggaatgatatgtagtacgctctctaaaagggtattttttgtacacttttatttgtttcgactgatcgtgtaggttataattatataggattagttctatatttttaaaaaaatttgaataatttacagtgctaaaaatattaaaatattttattgcacacacgattattttttttatacatgtggtaagcgataattttaactttatttttggcactataaattatttagaattttataaaaaaaattatatgtaatccaaaataagtacaatctacgccattataaaaatatgggttttttttttttaccacaacagataagagatctattctaaatttctaactaattttaatttatttgaaataatttgcagcgtaaatacttaagtttaagtcttagttgtagataaatacataaatttaatttttaactataataatacttaaagttatattttcaaaatttctgtaggtaccatactgttaaatattaagtcaatggtcacttggcaatccctatatacatgatacctaaagaagttttagaaatatatcttaaatattattaccactaaaaattaaacttaagtatttatttacaattaaaaattagggcattttacaattttg

SEQ ID NO: 44352 - DNA, 1635 bp, Cannabis sativa
  modified_base (1278)..(1286): a, c, t, g, unknown or other
gtaaaataatatccaacagttgagagaaaacataggcacatagttgagagtggtttaactttgttagctcaagctagtatgccattaaaattttgggatgaggcttatcgtgctgctgtctttttgattaatagaatgccctcacccaaattgaacaatctctctcccattgagatactcttccatgtcaaaccagcctatacctccttaaaggtgtttggctgcctatgctatcctaatctaaggccttacaacaaagtcaaacttcaatttaggtctcaaccatgtacctttttaggttatagcctagctcacaaaaggtacaatgcctctcaaaagatggaagagtttacatctctcgagatgttctctttgatgaaaccatttttccttttgctcttgaagcaaataacagtcattcttccactctcactcagcagtttacttcaccatccagtctacctgttcgatttagccaactacacccccccaccaggttttaatgttcccactgctcatgtccaaaggcctcaatcctctggtgctttgaatgtttcacctcctgcaagcattacccctgctaacaattttattgcagatagttctttaccaggggacacagttgcggtctcacaatctccatctgctcttgctcccacaacaacagctactgttgcttctgctgctcccactgcagtcataccagcaactgctactggtatcacatcagcagcccttcaaaatgagcctattacagatcaggttgtgctaccaactcccacgggtttcagcaacatttcttcaccaacgggtgcttctcctaaccctgctgttaccacacttgagcctactcctgctgcaaatacacatcctatgaagacaagagctaaatcgggtattaagaaacccaaagttcttatggcttctctccttcccacaactgtcaaacaagctctaaatgatccaaaatggcatgctgctatgtctgaagagaatgtagctctcaaaaagaacaagacttattctcttgtgcctttaccaccaaatcgagagccaatcgactacaagtgggtttacagaataaaggaaatttcagatggctcagtgagtagactaaaagcgagacttatggccaagggttatctccaacaagctggttttgattttcatgaaacctttagtccggtagtcaaacatgtcactattcgtgttgtgctgaccattgccttatccaaaggctggaccattaggcaacttgatgttaataatgccttcctnnnnnnnnntcttcatgaagacatttacatggttcagccacctggttttgttgatccggatcacccaactaaagtgtgcaaattacataaggccatttatggactcaaacaagctcctcgagcttggtttgaaaagttgtctactgttttgcttcagcttggcttttcctcagcaaaaaccgatcactccttgttcactctcatcactacttctactactatctatatactcatctatgtcgatgatatattgattactggcaacaacaacagtcttgtctccaagttggtatctgatctcagctcacaatttgctttaaaagatttgggagttatggatttctttcttgggatacag

SEQ ID NO: 44353 - DNA, 2544 bp, Cannabis sativa
taatgtatttatagtcacaatatttgttatgattaaaactaaattaatgactactttatctaaatactatgttttagtcacaagtaattatttgttgtaattaaaagttacatttagtaacaaaaaattatgttataactaaaagattatcactaggagcttttttttgaagtgttaactcatttatataggtaactaattaataagatatattaacttataatagtaaataatttttatacattttaattttgaaggttggaaataaaactagttatgatgagaagagagatttgctactattgcaacattagtggttagtgaaattaatagaacatttatactagctagcttttagacagacttttaatttaaaaaaaaatacttattttgagttctaaatttttattaatgcttagactttgtaagtagtttgcatgttgtaaactttaattttgttaatataattaaattgtattttaatttcacattaaatctttatgattataattaatttataattattttaataaaaattaatatataatcactaacaaaaattaatatatagtaattaaaattaaaaataatattaagaaataattaaattaatacgaaattaaaaaaaaatcgagacagaccctatgtcttcgattattacaaaataactaaagacatgaatagccctatatttttcggtttttctataataaccaaagacataaatagccttatgtttttggttattaaaattattttgtaataatcgaagacatagggtttaacccacaagattattaaaattaactctacctatgcctttggttatttgtaatcactgacgaaataggtctgttttacgttttcagtatttttggaacctacgttttcacttcaattgtcttcgatagtgagattttatttgaccaaagataaaatgggtcaaaaattgtaaataaagtcaatttttctaatttatttttcatgtcaattgataactatatttacgagtactgtacaacaagctattatactcttatttcaaaaccctaaataatttagaatttttatagaactttgtagtcctaaatagttataagggaatactgtacttagaaaataaaattgaaattaaacttttttacttgtcaaaacaaaaagtaattcaaataagaagttttcaacactatttcatataacttcactaagtacatatacaaatattattatagcataactatgtattaaagaaaaatataatgtgctttttttttcaaagaaaaaggattgtcaacttttatatatctaaacttttatatccccatctaacacctaaaaaaaattatagttatggttttatgatgtgtattaattaggaggcttttctagattttttttagctatttaaagtatgtaattctagaaatattatttctcaatatctctagctgaagtttggtgtaattcattcattttggttatgcaacatataaacgtatgttatgttttttccttttttcttttttcatgatgatatgatatcgttaaatttatgaaatgatgttagcaaaaccattgataacttagtttttgtagtttaaaaaaaaaaaaaacttagtttttgtatgagaaaaaattatttttattgtggttatagatacaatggtttcctcaaataaaatattacaatatataaataattagtaatattgatttatatatctttttttttcttataaattagacaccattgtatatattcaatataccaacccctcttctaaccccaactatacccaccctcccccatcctccataagaaaacgtgactattgattaagtttgcctaacctagtaaatcatgtttgaatatagacttcttattatttgtgttttaaactgacatccaactttaaaaaaaaaaaaattaacatccaattatttttactataaacgctcaaataaaacatatattttatgtcaaaatactatgattattattattactacgtgtactcttattacggctgaagctttagccagccatccatgtcagaattggcctttgtgttcatcagtactctcatgtaggggcggagggagactttaaattaatggagggcaaaagaaagaaattaaaattaagaggaggctaaattataatttttgaaaaaattaaacaaaaaatacataagaaatagaatatttttttttcaattctttttggggaggggggcatggccaccctttgcataagggtggctcgatccctgctctcatgcatcaatgttgttaattcttttcaaaaaagaattatatgtcatttgtatttacggtgcattattggatatattatctctttttgtaattggtttagtgatatattattgcatctttacatgtagataaaaattcctagtatttttttccttttgagatttgtcccattgtccatggagtttactcaaaaagttttaatgaggccgttttctaaaaaaaataataatgttgttgttgttgttgttagttgttgttgttgttgct

SEQ ID NO: 44354 - DNA, 3169 bp, Cannabis sativa
tgcaagtctttctgctgaagttcatactgttcctgatgatgttgctgcctccatggatgttcctgcttttgctcttgtagcctattctagcagtgagtgattatgatcaccagggggagatattgggattattttctaagatatgtaaaacattgtcaatattttgggttaggtcatatggttatgctaactttgttaagtgtgatagtagtatatttgtctagtcttttgttgtttgaactggttatatcctttgggttgtttgttattgactttggtctttttgtctcttctctatttttttcaatatcataatttgtcaaggagagatggtaagtgtcatgttttttatggcaaattatgttggttgttgttctgtctgtctgttgtgtctttagttgcattttcctgactttaatagttgttcgtctaagtctttgttagatgcgtctgttaatctgtattcaattaacttttgttaggtcagctttttgttcgtttttgttaattggtacagctcattgccagttgtgatgagctagcttattgttggttaagttgttttaaaaaaaactgatcaatcttatttttaactaacttcttcatctttgataggattatgttgagattctttctctgctagggcaaatccatttttcggataatcttgtgtttgcagattgtcaatcattagatcttcaaggtttgaagaaggaatgttaatctgcaatacccaagggaatttaagactaatctattggagggagttcagctaatcagaagtaaggggaccttgtcttctcagatctaagggatcttagatctttgttcttaattgttgatcaagtgtattggtaatttttgtatgaaatcatttctttttactttgtttgatgtgtaatcaaaactagagaatgcatttcaaatgatttcatagtgatggttattttactcggttcaaggagacccaagcaatactcgattggaatgtgtttccaatgtcggaggtaacttctgtggtcattgatttacaattttagttttaatacattagattcaaacctaaaattgattaattagctttcggataaaatcgaattttcagagtttatacagagtatagccatatccttactcgtcagggcatgcgggatcagcatttgatattgaaccaacaactacttcaatgggcggcaaaactgcgtgtagcccacgagccataacagttttagctgtgcctcgcttcccggagatagcaatgcctccaatttcacggtctatagccccaagtaacagagcagtctttatggcatcctataaaatggatgtaatcacaaaatgcaaaatcattacaattttcaaggaagagagagagagattaatcatcaatttgaaccttctatgatgattactgattaatcatataatatgaaacgttcaatgtgaacagccaaaaataaaatcattgtttccaaaaccaagtgacacacaaattcacataattaacacacacacacacacacacacacacaatatgtcacaatccattaatcattttacttggcagtacaaaatcaaagcatttgcttttttcttttctggaaagagattgagagagagaagggaagtacctgaccaacaacagcagcaagagggaaatactgtcttccataagaagtaacattggagttgttgtcctgagtgagcatggcgccattcccagggtcagcggcgatagttgcagaagatgcacgaactcgaaggtcatgtcggtgaagacgttttgaggtcaaaaaagaagtgaaagagggggagaagaggaaagggtgtcgtaatttaagtgagggaattagtaaagagcgaagcctagaaggataagaggaacacgttggggctgaatgcaagcccgccatggaaggtacagtgagagagagaagttgaactctctttcttatctggtatcacattacataatcataatagagcggaaggacctcttgtgggtccattgaaatctggaaatcttagtagtattatggccctcgttcgtgtgtgtgaattctctctagggattatctttctttattttttatttattatttttttgataaagtgataaaaattagaagagaaaaaaaaaaacaccatccaggtagagtaacgttcgtttagccaaaaggtatacaatataaattgagattatttcataaatatacaaaaattactataaaattataaaaatatagttttatagaattttaaatatttttacggtttttttttattttatttatagaaaaatacggtctttttatgttgtactcttgttaatttgttgttgattttttattatttgtatgttattttcatgttacttttatgtaatcttcttgtaattttcgtgttatttttatgaaaaactataaaaatttaaaaaaaaaaaaaaaattctttcaacgtaaaaatataattttttttataaaaaaatagtgtcttatgtaattatttcatataaatacttacaaaataaagctatttatataagaccaagttacataaatttgggataaattgataaatacttcttttttttatccattaattaaaaatactcttatatgatattttatttaaatctaccaacttttatgagtgagttgcttaatatactcttgtcctttacttaagtgtaacacatgatttatattattataaatggtataatggggacataatttataaaattaagtatattttaaagaatatgaaaataatggtaaaaaatgaaaatagataaagtaaaatgaatttacaatacaatttacactataaatttagacaaaactattaaactatgaagaaagaccctcaatctaaatgaacaatttaagcaaacctacagaataaataaataaagtataaatttgattagcacactaaataaacaaaatggtaagatatatatataagaaagaaatgttgaactattttcttttttgataagaaataaaaattagcgaaaacttatctttgagaaattcttgaataaaatagtgtcaccctttatcaaaactaatatgagtagtctaacttttagatatatcttctaagacgaaaaaattaaacaagaaaacatctataaccacaatcatacaatgcaaagtgagaa

SEQ ID NO: 44355 - DNA, 1120 bp, Cannabis sativa
agtagtaaaacaacaacgaaaccagcccggctctatgcagtggcaagctgaaccaggagttacattgatcttagaaacattcaacagcttttcccataactcaagttcccctttctcactgtatgatggaataaacccactcatatttgcccaacagtagaaaccagcactactctttgcgcacttgatacctaattgccccaaacctgctacaaataagttatgcatattacgtatcctttctttgtttatcttcatgtaatcctcaaggaatctcgtatctaaaagcatcgatactagaagacgctgggccggagcagagattgaagaaaatcttgttaacttttttgcagcggccaaaacattctcgttgtaagaataaataacaccaactctaaagcccggaatagataggtctttcgacagtccgtatattatgtgaaccctgctcttttcaaaattctctgtctcaataatttctgccatgctcacaaactcctcatttccatacatggacccagcaaatatttcatcagatataacatggatgttcttctcctgggcaaagtctaaaataccacaaagtgtttcccgagacagtacattgccaacaggattaacaggatttgaaattagaattccacgaacttttactcctcgctttcttgcctgattaaatgcttgatcaagcacagtaatgttcaaagcaaagttatcagcgctacggcaatgaacaggaattagctccaccccagctcgccatctaacgtctctatcgaagctgcagatttgttttgtaattggacaacaaaaagattaatgcaatatataacgatctgaaattggttccgttcttgtttagaaaaataatttcaccattattacaagatggagcattataagatggcagtataatcaccattacccgggataataaggtgtgggaacaagaaatgcgtttccattgtctgctaagcaaaagcttaaaatttcagtagcaggggttgctccagcagttaacaccatttgagacgggtcaaatgtgatagttctttccacgacccgagtcatgaaatcagcaatagcctacaaagtcaattgtaaactatatcacatataa

SEQ ID NO: 44356 - DNA, 1988 bp, Cannabis sativa
ggactactgactgtcacagaatagaagtggtcccggcggaagtggtcattcttgatgagttgatcagagtttgagtggtccccatattattagtcccaaccttgatcgatcggacaaactcagacagcggttcgtcgggcccgccacctccccgacccaacccaacccaaccctctcccacgagactacgtacgtttacgttcttaaccatctctctcttcattctctatatacttacatacatgtgcaccctgacaattcgaaaaaaattacagtactaaggatttttgttttggtatatttcgttttgtatccatatctacatccacttattataaaatagattaaagtataataaaacaattatcccacccaaataaaaaacttacataataaaaactattttctactatatatttaccccttgtactgtagtatatatttggtttataaaaatatagcagtaatatgtactccaccattaaacatgttacaccatttccgtagttaccatacaagtttggttaaggtaataatataaaaagagataatttttattaatttttctttttgtttggttgcattatttagagtataatatcattctaaatgtattgatattctaggaatgattattcaattttaaaatggataaaaagatacaaaataagaaaaaaaaattaataatttttttttatcaaactttgtatgcattttaaatttaattatattcaatttcatttatattcatattcatattctcatttttttttattcctttaaatcaaacgccattttatagttagagcattgataccatttataattgctaaagttatacacatcatctcaaaatatatattgttttattttcgatctcatccacataaatttacataagatttagcactgtttcttaaaaaaaaaaaatactccaataattaacaagtcaaaaaattatcactatagtccttacataaatattaaattaattaactttaggggtaaaatgtaactttcatcttaaaataaaactaacaaacaaaaaatagagagagatggagaataccacccggccgtggtctctgttgccacacacactcaccctatatataaacatttgtattgaaatataaatcctatcgcatatgtagcaaaatagacaactttcataagagatgctcttattacaacatcacaaatatgcatagtactacaaaaaggtttatacattagtggatccaagtaagatgagatcgatggaagagagaaaaaagtaattttgtgtgtttataattggatttatatatcaaaacttggcaccattgttatttgctaaccaaataatacaatttttttaaaaagaaaaaaaattgattggttgttggtgatagtgggaccatttgatactttttatgaagtgttaccatggaagatgcgatcttattataactcaatctcacttctctctcttataaatatatctctatacttcactaaacttcttccccttctttacttcaatttctctaagcaaccaacttaaaattcatctctctctagttataatcccatggttgttaattctcatctccatcttcaattaacatgccttcctcccacttctcctccctctcaaggtacatatatatattatttatatatacatcaatatgtatatgcatggttttcaatttttatatatatataataattgtttatgataattaggttgattggaatacagcgggagagctcagggtcgacttcacacagcgacgccgatgaattcatcaacccaaactcaagcacggtggaatgctacgcttgtactcaggtgggtctaccagcgttccactccaccagctgcgaccgcgccaatcagtctcagtactgggaagcctcggctggttcatctttgatcccaattcaatcccgaaccgacctaaaaaacgacctccttttagccgcggctgccgaagccaagc

SEQ ID NO: 44357 - DNA, 2133 bp, Cannabis sativa
aaaaaaattatgattaagtatatataaatcatcatttttatgttatcgcttaaaattcagtagttagagttacataaatcacaatttatggtcaataaatatatttttaatcataagaatactacttgttgtgactagaactaaactaacgataatttgtgtctaaatattattttttagtgacaagcaatttttgttgcgactataagtaatatttagttacaaaaagtgtataatatgactaaaaaattatcactaaagattcgtaaaaatcttaatgcctcttttatttacttatttttaaaaaattattagtaatgtggaccaaacccttaagctaaaagtcatgactatatttgtaggacaacaagaagtagggcaaagtctatccaaatccattttttttatgtgattatcaattgaattgagaaatttgccacagtaactatttgtatatacttgaaaattaatttacactaaatgacaacaatatttgtttggatttgacttttttggaataaaacatcaactcctattttggataaaatcatattagatattcattggtttcatatatatctttgttaaatgaaaatttgaattctttaatgtctttttaagatgaatgagcttgattattatctaaaaatttatgaagaaaaaactttcattataggcaaaaatattggtaccctcatatttaaaaaaagaaatagtaaaaatttggtttagataattaacaaatattttttttaccaattaaaaaaataatataccaaaagcttattacttttatacatggtttaaaaaatttaaatatgttaattgtcaaaaaataaataaattgatttaaataagaaaaaaacattaattaaccatatacaatacaatctaggtttcatgataaaaagagctagattactttttcataattgactaatcacaacataatttagatttaacactaattaattttttttcttgttccataatctattggtggggtagaaattcgaaattagaggttttattgtctaatttttctgtatttttgtgtgtccttagaattgacagtgaatttttttaaataaaagaaaatcttctatttattgtgtaacataattatatttgttatttttaatctttatggattgacaaaaaaattaaaataagaatatatattttaattttttttttttttgagaaaaaaatgacattatttttttaggaaaaaaaaaaaaaagtttgcatgctcttttctcttacatggcctttttatattcacacaacacaactcacaaaatggtccaaatatttgacagaacaaacactagtctttgtctaacttaattaaaatatataaatataatattatttatggactatattggtacttgaggccaatattgtttttttccttttttttatttatttttttaagtggctaatattgtgtcttgctatattctttccatataaatttaaatgaaaattttgtttattcaccttaaaatataaaaataccaaaatatcttctttttcttaagtgatcttgcataccttgacttcattttgatatttttttcaaaatagtcctcaccttaaatttcaattaattgtccaaaatattaaaaattttattgcaaacaattattgaaagtactaaatcaaagtataagaaaaaaaaatcattatcccaataaatttaatgtaatattattggatttaatttaactagtaatctaccttaatttaatttttattagtgactttaaccaaggaaaaaaaaaggtttaattagattgtttttataaagagacacatcatttttcatatatgtttccatcatatttttttttattattatttaaaaataaaaaccttaaaaattgctaagctaccaactttattgaaaaagtttaaagtaattttaagttataattattcaaaaaaaattataattcataaaattaactaagtgacattttttttcctttattatttgaccttatatatatagatacgaaaaagacttcgcaattcacatcatggcaagcatgaaaatgatgtttaatagttcttgtggggaacaaactattctataacttcaatgctagaataattaaattatta

SEQ ID NO: 44358 - DNA, 1560 bp, Cannabis sativa
gccgttgccggggatcgaacccgggtcacccgcgtgacaggcgggaatacttaccactatactacaacgactcgttgattaactaaatcgttatattatatatattacaattaaaatctcaattcatagattttttttttttggtaaggatttcctagattaatatatgatatatataggaaatttagtatatatattacgttatagttttttttagtgacatttcaggatcaataaaaatggttcttttagtgattaaggaaatatagtacctttccgagttgagttgggagatttgatgtttttccttgccatcaaaacaatagaattttaattgattgactttggccttcttagacattttacggcgtttgtatttgggtttctgatgctgcggcttattgttcttactattgtcaagtcaacaagagaaaaccttacaatatcactcttgcagttgagttcaagagcgatatatagttgaactcatcatcatatatctaatactactactatctctgctatagggtacgtatgcatgatagtgggcaaaggtaaagcatgtttttgaataaaccaggtattgttgttcttgttgttgttgtccatgatgatgaagatgaattgatgatgatgatgatgatgtattgttcggtttctcgctaatttggctttgatgaatggtgtcttttagtcatgacatccccttttactaaaaaaaggctgttattgaagcccctatttcaaaaaataaattggtgttaaagctatatatgataattttctattacctacgacgtccacggtccacagccaccatgtgggattccaccttgttctcggcaagaagattatgcccatatgtatattctcagacaaaattatgacgcaatttgaaaatatttaattctatttttttagataaaaacatctaaattatagattagttgtctactaattactttcttcatgttgaactctacccttatattgatatatagtttggagccaccgattatatatttataatattttgttgaaaaaaaaaatatattttgttattaattaaaaacaaaaaattaaaaaaacttaactgttttgcaccctcactcacaataataaatatatatcccacttactaattattagatgacatggggtccattaaaattgaatgcctcacctataagatttttttaaaattcccaataaaaaaagagtcatgtatattaccacttttttttaatgacaatacattaaattagagtttttttttttttttttaagaaaacccatgtttaattattttcgcctggtgatggtactgaagactggaatggagtggagataacgtttattagggtgtatttttcttttaagatcctcctgaatttgaatgtaatacaaatatatttagacactttgtttttttaaatctgaattattcaatatctattttttatataaggtgtgcctatataataaaattcttggtttatgagaaattcatagatgactttttatttatattaaaaataaattggtttattattaaaaata

SEQ ID NO: 44359 - DNA, 1578 bp, Cannabis sativa
cagtccgcgaaaagcatcgagtcaagtaaataccaactataactaataatgctacaatgaaatttgaacagtctttggtacttaattccaaacataattctgtgtatgcagatataagcgatcaggaggatcaatgagaggtatagacacagcagaatacttgattgagaatagcaatttcacctgtgttgcagtgcagaagaagggccaaaatggaggatatcttctcaactccaaaactcagaagaacttctggctgttagcctaacacgccaacctaactcgggcttggtttgttctcaagcttgcaagtcttcttgagacatcagatgcaggtcaaaatcggctcaagctggttcactgaccgtatcgttatgaggttgatcaagtctaccactttctctggtcatagagtgaaccatatgatgatatttctcatttccaagtactaaacgtgtgcatgtttgaacacgattggctcttaaccactagaaaatgtcatcaaaatatatgctagcagtagaaatgagaatttcccttttcttttttctgacttttatcacttttaaatacaaatgagaacttccctaaaagaaaatggtaaacacaagaaaaatataagattgtgtgcctattgttatcacaccacatatagaacattgaaactatttaaaggaaaaagtactgattttcagagctcatcacgaataactctttctaatggatcgtccaatatattaacaacattatcatcgaccacagctcttggtccgttcgctgcttgtcgaaccataccagccttaatagcagcagtaactgtcctttgcaacttcagtaaccccatacgctttgagacaacatatagaacagcacaagagaataagaaaaatcctaaagcaattatcatcctgttcagatagaattcatcatgagtttttgacagatatagatagtagtcattaggaatttgagagttttctctttctgtacctgtccatgacatcttgcctctgcatcgtggagagtaagtttctggttctcatcaacaatgaccggtggcccttgtactcactttcagccttcaacagtactccagttgattcatctgaacaacccaccaccacattcatagttttaatttaaaggcaatgcaactaatcgaaaacatattttgtgtaaatctacgtttagtcgtgaatgaatcaaaataaaagcatggaaatccctctaactgagaaccctataacatagatgatactatgtatctggtaaaatctgtaagactggatatgaaacactactatgtccaaatgaaattgttgagcggctaattctagaccatacacgtacaagctcgttaatcatgaaagaggcggtgagatgtaaaagctaatcacacaaaacaattttcagcaatggttcttttccttcttttctctaactatgcaaacatctcaatatttgctcatatagattcttgttcccctgagtttattaaagtattgaaagccatacaaaatccaaaccgaaaatatccaaacagataggctgcaatgcatggcagagaagaaatttaca

SEQ ID NO: 44360 - DNA, 1977 bp, Cannabis sativa
tgttcaagctgtgagagaaacgccaagtttcagcaagttgacttcgcttgaaaacccagtccaacataagcattttgtgctcccgctccttgttatgcccttgaaaaatgttgtagaagatcatgcttgaggtatcatgtggctggatgtagcttccttccaaatattttgcattaatttcatatttaattttctccttaactaagagctccaacacagctgaatatctttttaattcgttttctgccttagaaaatgtctccttgcgcctttgaatataatcatcacaagccaaacaaaaatcatcccactgctgaagaagaaaattaatagccttgttgaccctccaattgagaacatcaagtcctttgaacatcaacaaagaaggaacagtacccatcacaccaatgcttgaaattaaatgctggatgaattgttccaatatttccagtaggatacaatccccattatatcatcatataaccaaagtgagaatagaaaattatcaatagttggccttatcccataaatgtgttgagtcaccatttgagaactaaagaatatgtaacagtgacaaagtacacattcatatcttgtagtaatttctttgtgccccatttgtctaacagtgcccataaataaacaaccccccttatcaccaactaatttcccaaatccattaaaaaacatgaaattagtagtaaaattggttctattccatttgaaatacctggtgacccaaaatttgttgtgcaagcttggccatggaagaaactcttgagagcaagcttttcttcctctgtcaaaaagccaacgaacagttggtgtcttttcctcttcgtcatacccaaaagctgaacgtgaaagttgtgctccaaccacccacacctcattttccgttgccggtcctaagttacagcacccaagttgcaccaccttgagataccatgagaatgaagacttaatattcccaatattcaatgcgtgacatggagaaatggttgatgaaccattattctttggatgccacatgacccaattgtgacctaaattaagatatgggctttttgtcttgcttactgggcccctattttgttttgatttgggccttaagtttagaaagaaagaagtgagccctacctccaaacagaacattatttctctacggcattgatcacccctatcaccctcgaccaaatttggcggcttccctggcattgcactcgaccgtggacgatgttgatccttcggcgcaaatcggtagcgcaatttctccaccagcgagtgtttttcaatggaggcaccatcactcatggtttttaatggtgggaaagatttattctctagcttccttagagctgattgcaacgatagatcttcaagagctacgtcgttgttcatagttgaagatgtattcgtcttcccatggagattcggcgactctttttccttcttcagcaccggttggtcgtgcagctcccatgagctagacgtcggcgatcgaaaacgctgctcctccccaatgttattatcctccagctgagtgctgatcatcttcattagatccggtgagctacggttcgacttcgacgacatgtgtagaagagccatgtcatggtgtttggctggaagtgttagcgagacacttcttagatctgaaatcttcgtagattcacccttatcagctttgtcacgtcgtttgtcctcctctatggttatcactgcctttgttacttgtggcagcaacatcctcgaacaactttgtgtaggcatcagcggctcatcctcagtcaccacttgttcgtcgttggcgtttcgtgcctctctgactttttgtatcaactgagtaagttgattcatcatcaggcctacatgtttctcgatggtcttttcaatcgtcatgtgaaatgatgatttcatcaactccaattgatttgaagcctggtgaagttccgatcgaatttccgtcttaccttg

SEQ ID NO: 44361 - DNA, 1252 bp, Cannabis sativa
caattttcttattaatttttgttttttgaaagggaattacatgaatttcttaaaatctctatatacttatgaatgagaacatttttctcttttgaatgtacttaattaggtacctagttttgggctgaaattgagtgaagactgatatagaataataattaataaagttagtaactttttgataatgttacagtttctttgtatatataatttgaataataatattaataataataataataatattagtagtaattaagaaaaagttgaactttttcccctgaaaacatgacgattctgttctatatcagacataaattgtcattttattttttttatattaataattacttttttttttatgcaaaaaatatttcacatgaaaacctaactcttcttcttggaaaagcaaagtgtattttgtcttctctttatggatcataaaccaaaaaactagtttagaatatatgattaataattaattaattaaatagaaaaattaatgatacataaaaaataaattaaaataaaaagattcaaacgactaattaatcaataatttttatagaattagttttcattgaatattcaaaatataaaaaagaatattctctatttaagattaatgatatcatgagtatatactaaattatttcttcaattgtgcttagattcaggctgctttttgcctttatttattttttattttattaatattaatcttttacatataaaatatgtatgcaaatcggctgtgtttgccgatccattgaattgaactatttataagtattaattaacaatatatatattccttgattattatttatgtaatattcatgcaattaacattaataaattaattaatataattattaatttgatgatcagatgaagatatgatgacagtgtttataaatggggtagcaacagaagtggcaaaaggtccaattgatttgaaagcaatgtttggtgatgatgcaattttggttcactcttcaggtgttgctgttccaatcaatgattttggtattttactacacagtttgcaacctcaccaaagctatttcttggtaattctttctttaattcatatctaattgaattcggtagtaactaaagatttttacacgcgttgatagttttaggatttttttagaatgtcgtattaggtcatattatattgaaatagactacatattatatttttatataatattatgttaaactttaatttatactaaaatattat

SEQ ID NO: 44362 - DNA, 1430 bp, Cannabis sativa
ttttcaaaattttagagattttgaaaattccacttgtttatgtagttttgactgagtaaacagatgtacagcagcaaaaaaaaaatctggctgtatgatgataacgcggttttctacagacttagaaaatgacattaaatggcccccacatgaatttgaatggagtttttttgttgttgaattggattgatttgatctttggttgtgaaattgagaataatgaatggaaaacgttgcatgagaaaaagaaagagaaagaaagcattatgacttgtaaacatgaaatgaggcttgtgggtcatattagaacaaacaaagatttttcatcaactagaaatggtctgatattatgaataatcaagataagcttttctttttctggtgatatttcttgtaggagtaggagacgggttaaacaaaaactaagaggattggctaatggcaattatgtcaagctaagtttatataaatgctctccaataagtcaaggattgtttccaattcaacaaaatctattatttttcaagtaatcttctatggattgtagtcaaattatgtattattaataaacaaaaaattcctagtatggaaagagaaagttggtggtggcgtttttccaatgaaaaacaaaatgaaatagtttttggagatggggttttactaataacatcacttaagagtttcaaatttattgtaggcataatctaatattactacacttgttctcaacagtcctatgttcgaataaaaaaagtttcaattttatcttaatgctctttggtttgttaggttcatgatttcctctgtttactacattggagattaaacagatgaaactagaacttaattagtgtgtttggtaggagagacaggtggaagaaaggtgattatagtcaataagtgttgaaaatcccttcccttctttcaactactccctcctgtcaagcaaacagaagactttggttttcaaatcttctctctttcctttcataacaaacgaaaaacaaattccctttcctctccttactaatacatatctcattccttcctattttatcaccttcctaccaaacatagtctaaataaggcgacaacataatcaagtaacataatcaagtaaccttgtttttgtgttgtgcaagctttacagggttcaaataatatgatatccttgtttggttacgtcgttcaagattgtaaaaaattgcttgctgaattgtgcaatgttttattactttttgttaatcggtcagctaatgtacgagctcacaattttgctcgaattactattttgtattctgatcgtcgtttcagtttagggtttctttctaattgagttgttaccatgtttggtaacggaaattaatggttgttaaagatgaatttttcattacaaaaaaaaggtgagaagataaagaagggtaattaat

SEQ ID NO: 44363 - DNA, 3315 bp, Cannabis sativa
tatatattttattattcattatttatttcattttattttaattttagattttttaagggttattaataatttttgagatatatatactagcaaaaagctacgtgcgaggcacgtatactaaattttatgctagttttttctacgttatttaaaagtgatacaaataaaaattaaaagaaaaatattgttagttattaggtgagattattattatgtgtatctaaataatataatttataattttgaccattgaaagtaaataccagatgcaatatattagtgtttaagatttttgattttttttagggttattaataatttagatatatatatatatattaattttagggtttttaaatttatttatatatgtatataatgtgtataaaggtatttttataaatatagtgttaatttatatttttcaagtaataattttttattttaaacatataataattatttaactaatctcaaccttagatacctcattgtgcgactttagaggttaaaaaagtacatttcaaaatgccataacaaaaattcacatattttcacttctacataagtgatatcgttaagtgttttacaacaaatcgtattatacaacataatcatcgtattgaatcagtctcaacataagaaacacatattatttttaatactttttaattatagcaagatcaaatcgaaaccacatgagatatgtcagtgtaggttacaatacaagatacattacttctatcatgatatatttaattgttcaatgggacaacaataggagcaggtgggatagtcttttgcaaaggtgagcagtcccatccattttccttgctataggagacactaaaatatttaggaacccatgtttcagacttggattttctttctttcataagcattctttgattttcctcaatatctttctttgcttctccagcttttgcccaattcttttccatgatacattggctcacctccctccaaaccacaccagattcactttgccacactccctaaagcaaataatacaacaaaagtcatgtacaataattaaaatcgaattaattaattaattaattatacttgtgaagcaagactgttgatgtgattgttagaaaccatgagtgagtatgtgagggtgcactctgttttctctacactctactgcagcatggcttaattccttgaagctgacaggttgttattatgcaatcattgctaagggaatattctttccttttacggttatgcattgttttctgtgtatgacacttgtcactattgtattgattcccattgtattggaaatgcctatttaatgaaaagtttgcctcaatctcaaattgagctgagaaatccattgctgcatttttctctaaaacttaacttggtatcagagccaatccggccttcgccaatgtctacaggcaactctcagactcccctccaccctaccaatcctaaccagagtaatcatggagtcgttattggaaattgtagcagctctaatacctacactcacaacttcactcaaccctttaataccctaaaccaaccattctctctcaaactcgatcgtaacaactacacactatggaaaacaatggtatcaaccatcattcgagggcacagactcaatggtttcatcaatggcagctgccccctgtccaccagagttcataccagcaccaacctcaactgaagaaaaacctgaagtttgtcttaatcccgacaatgagcactagattttcagtgaccagcagctcatgggctggatttatactcaatgactgaatctgtcgctaccgaggtcatgggatgtgcctcatctgctactttgtggagtgccctggaaaatctctttggggctcactcttgagcaaaaatggacgacaccaaaacattgatttagacaacaagaaaaggaacaactcccatggttgaatacttcagacagaagaaaatgtggtcagacagccttgctcttgctggagatccctacccaaaagcacatctcatttccaatgtgacctttggtttggattatcaatatcttgctattgttgttcaaattgaggctagatctaacatttcatggcaggaaacacaagatatgatactgagctttgatagcaaactcgagagactacatgctgtaggagggaacaacaaaggcaatggcacatctgggattggtactggaccttcagcaaatgtagcagcagccaacctacctggaaaatcaacaacaaatccgaatcgaggaagaggaaatcatgaggattactctggaaaccgtggtggttcatccaacaacaggggaggttaccaaggtcgaggaagaggaaggtccaacaactcaaaaccaacctgccaagtttgtggcaggtatggtcattcaggtgcaatctgctacaatagatatgatgaatcttacatgggacatgacccaaaaactcagcaaaatcagcaaactggaggcagtcacaatgcattcatagcctcaccagaaatcgtggacagtgatcaatggtatgctgacagtggagccagcaaccatgtcacttcctcatctaacaatgtcaataaaaaaaatggagtatggtggtaaggatcatctaattgttgaagatggtagtcaagtgactatacctcatattgacagcagtaaattaaaaaccaacactgctagtgatttggttttaaaatagctgctacttgtccctaaaattgctaaaaatttaattagtgtgtctaaactaactgctgataacaatgtgttcattgaatttcactctaattcttgttttgtgaaggacaaggcaacaaggagggtgctgcttcaagggacacttaaaaatgggttgtatcagcttcaaccaccagtttcaaagtccaaccatcatcattctgttctctctgtcaaaaacaatcaaaatcaatgtagtatggtcactggtgtttctattttgcaaaatgaaagtgtagctcaacctgttgtcaatgagcattcaatttctgttagtgatatgtgccatagaagacttggacacccgtccagtagagtgttaaaacaagtcctaaagaatttcaatgttaatgttaatccttcaatcaatgagaattttcatttctgtgatgcgtgtcaatatggggaatcccatgctcttccctttaaaaattcagcaaaccatgcctctaaagtccttaatctggtgcatacagatctttagggtccagcccccatcatgtcaaacacaaactataaattttacattcattttgttaatgattttagtagatatgtttgga

SEQ ID NO: 44364 - DNA, 2637 bp, Cannabis sativa
atttttaatttgattggttagataatgccatatttagtggcatttactttttatgccatatttattataaccttaataatttttctcatatttttaaaaatatctcttaaaaaaaatgagggtttaaaaatatttatttttctatgacccattatatttcagcccagagttcagtttactacatttggagagctacgtaggaggtaaaatatgagaatgtagattggtttcagaatacatttatgtgtaatacagagatggtgagtttaacatattggtgtaatatcgtgcttacatgttatctttaattttgtagtgaataatactctttcttacatttttttaataaatataaatgaaattttattactcacagtagactaaataataatctgcacatctctctgttagagatacgatcagaatttaaattagaaaaataaactaaataatcagttttttaattcccgaattgtttgacaaaaaaattaaactaaaatcatatgaaaaaggttgcaacatcacaattaaccttaaaaatacatgtattatattttatttaccgttcaaaagacagtagaaattattatatcatgttcatttaacctcgtatacttaactgtgtaaagtacgtaactgcactgctaacaactccttcagtcgcaaagaacttgttattcccaaccactaacaatgatttgatggtgagtcactaaagaacaaataaaaactaacaatgaaacaaaccaaaacaaaatcatgtcacatagacaagactaaaatatccaaaatcatgtcacgaaaacaaaacgaaaatattcaaaactatgctacaagacgagattaaaatactcaaccatgtcacagaaataagactaatcacattagcaaaaattgagttgtagtagctaaatataagcccaaccaaactatatctaagtccaaagaattttcagcgatagtttagatatattattacttttttttttgagtgtagcgtaatggtattttacaatcagttaatagcttaatagcttcaaggtcttaggttcgaacccatgacctctccctttttcccacccctccctcactactaagctagtcttagtggcttagatatattattacttaaacaaaatataatttggttgataaattcttctaaaaaaaatgagattattgtcgttaaataattagtaattttatctgaagccaaatttttaccaccatcaaattcgtctataagcatcatacctactacgaccaataatttgttatctagtaacatataatattgtactaatcaagaatatttttcaaaatattgaatagatgtctttttaaaatatatcttaaatagttaagctatatacaaacaatattcaattaatacaacatacatacatatatatacaatcacaaaagacaaattgaagacgtgggtttttggaatatatataggtataaaaaaaataattggaaaggcatgaatcatattagtccataatttttttcattacaaccatattagtcttcttagctatggcatgaaacttgttatgtatataaactctactaaaatatagagtagagaatatataatgttgtcacatgattaatgaaagctcccaaagtaaaggaggaagagttgaattttttatttatttatttatttatttattttaatgctattattatgagaaaattcatataaattattatttttggtaaattctttatatttttatgctcaaagattttttatatatttttactgtgtttataaaaacaacacaaaaacactcctaaaaaaatacaaaaataacatcaaacaacaatatataaaaaaaaaaataatatatacaaataataaaaagataacaacaaaataataagagtacaatataaaaatacatcaaaagacccaaggatgaccctgagatcaggtggatcttaagaaaataaaaactatttgatcctttatttaaaaattatgttcgtggtatttttaaaaatgattgaaaatatatatagttttaaaggaaaaatattatttttgaacccctaagctgaatggaccctagacacgagtttaatctgcctcagcctaagctcaattctaaaaatataatattttatgtaaagaaaattttaaaagccgtaaaaatattaaaaattgtgtgtaataatattttataatttttttttttgtgtacttttgtaattatcccattattatgtttcctaagtggtcaacctatatactactagcttgatactactatttaattctaaagaaaacaatttgacttcaatatgatttttttccttgaaaaaaaaaacatatatattgaaacatcaaaggtcccacacactttagagatatttaaaataaaataaaaaaataataataaaataaaataaggcaaatggcgcaccgttatgggaagagtaggaaagagaggccattacagggcctttcagattagagacaatagtaagatccaacatatacatatatatatatatatatgacagttacgaattcagttatataaacaaatctgtgtactaagtagtatatatagagagagagagagtgaaaaaaagaaaagaaaaaaagctagagagagagag

SEQ ID NO: 44365 - DNA, 2412 bp, Cannabis sativa
aacaaatacagaaaatgtaaacagttttgtcataaacacattaatttagatcggattattataaaattttattttgacaaaatgttagttcatggtcctacatttgtactattttgaaaaatacaaggtatattttattaacaaaataaagaattcaattaataatttttgcagaaaagaaagtctaaaaagactaaaatggtattcattttttttaagatattcgtgattatggaatcgctccttagactttagttgatatgtatttggaattaagaaagaattgtcttttagtaacacatatatgtttaaaagttgattatgaatactataaaaatatgtaaatacttacaatgttacttacctattaaagaaacctttatgtatagttaaagttatgtatggatttcttttgtttttctggtatagatgataaatcttttaaattcctttttttggtatataattagcatttcaccatatatgaaagttcaagcaatttataatttatatgattaaattttaattttttaaggttgtgtttttcataaaattttatcatcaacactttaatatcatatcttcccattaagttacaaatttggatacatacacaatttttttttttaatttttattaaaaaaaggtaagcccaatatatgattttattttgtttaaatttaacatgctaaaataataaagttctcattctaaatgggttgacttaaacatgatgttgtcaaaataacttctcatgtgtaaattgatcataaagaatgttagatatttgtgtgaatgtttcatgtaaatattgatcgcgggccaaaagaaagttatatttatttcgagcgtacacatgtctctggtgatatatgtgtaacaattataaaatttccatgtgaacaatatgtacagttcaaagattgacaaattatttaacaagatttattgtcaatgtttgacaattataaaatttctatgtgaacaataattatttttattttaaatgtaatatttatttttattaaatttccttaccatacattaaatttatgtaattcaaagttttttttggtattgactagcgagtctagttgtgtgagttaaaaggggtaagttgaaaaatacttcttttattaattaattagccaaatttatctttaatttttttttaattgaaacatatctctttttatatgtattgtactcaaaatactctgacataagggagtcacatggagagtatcttgaagtgacatgggtaaaattggtaaaatatttaaaaaaagaggtaaaaataataaactttaaaaaagaagataaaaataaaagaggacaataaaaaaatatagagtctaatttcctcgaaaatgaggtggcccactatattaaatgaatctgcccccactaaccccattaaatgaaatgggatgattatctttatcaaaatgaccaagccaaccatttatttctccaagtgaaaattacaccccatacggatttctaaacaatgttaagaaaatacgacatatttttgtttgtctattttttttattgttttttgtatagtattgattgagtttgtcatatttttttataatatttttttatatatatatattatttatttatatttatattcatatatatgaaatttaattaaaaaatttctacaaattaattttaacaaaaaaaattattatttataatttacttttttagatttatactgtttgcaaaaaatatgataaccattattaattaaattggtcaaatctctctaacaaaagttaaaaaaaaaatatttatgtctatatatttatatttatatttatgtatcatgaaataaatttataatacttatataaaaagtgattatttaacttattgtttaatttattttatgtgtaaagtaaatttatattaaaaaagatagtaacaagaataatgactcaatatataattattataaatgaagtacaacagttaaaatataaattttatttttatttttcatgtatatatatgtaatatatgtgcatattacattattttttaaaataatgatttgatgattagtgtataatttatgatgttaaaattttaattttttttagttttaataatttttttattgttaaaattttatatagattaatttttaaatttttattatacaatatttgataatgataatagtgtaaatcgctacaacactacactaattttgatgactatgcaggtggagtttgtttatggttgtcctgttgagtccgattgttagagggtggttcaagttttacagagtaaaactttaatatatttgcatttggcttaatattgcaatctttttcttttgtttctctttcagtttcttttgttaaacaatttataaattaggcgattaattaa

SEQ ID NO: 44366 - DNA, 5530 bp, Cannabis sativa
caaaagacagccgctgatcttcttcgtcttctttctttctaaatcttccacgtagataacagttcacttccacaacaaagcccacacatcctttatagcgcgtgaaacacacggtctccattgtactcatggaactaagctaattttgactaccttggcacactcgcttctttgtagcgcgtggtttaactattcttattaatttacattaaatcaaaggaaccatcttcttctccacaaaatagaataatctttattctgaaacgagtaaaaataaatagcacacggtatatattatattatattatacttatatgaagaaaaatagtagagagagttctcaatcctcatcaaagtcaccctctttgcaatacttcttgctctcttgtaagttattattataaaaatataatcactttcctttttgatcgctttgttcttggtttctgtttttcttggtgtgatttatggttgttcaagctcattatgccttctgggttttgtattttatgggtgttcacagctgttaaagccatgaaagtttcaatctttgtctaatttgtgagctgggtttttctgggttttgagtgtaattattgttttgttctgattcttgagtgtattgggtattttctttgattacacatatgaaatgattttctttgtgtgtgtgtctgtgtgtgagtttcagaatctataaagttggtatcttgatatgtgggagctttgtatggaaagagaataggagtgttaatttttgtgatttctaaatttgggattcctttattattgacatttctccttaatgcttatgattattctctgttgtgaagatattgcagtgtgaggaatttggtgctttactttggatttgggattcttttttactttcacacttaatctttgaaaacaagatcagaaatttgagaatttggaattagattcgttgctctgattggggttggtgccaatggttttattttctccatagttaataaaaccattggtaacatcacaaacttaagaactccttctttaaggcttttagatagatttgttgagaggtgatgcagcgagttcgattgtcctcagaacaagcaccagtgcacaaattaggggagtctcagatgacattgtccccaaagtttaggttagctgtgataccgccttctttcttgaacccttcgtcggagttagagttgtctttgaggggagaacctttaattccaggtcttcctgatgatgttgcactaaattgtctacttcgccttccggttcagagtcactcagcttgcaaaaccgtttgtaaaagatggcatttccttcttgggaggaaagagcgatttttcactcgaagaaaagaattaggctttaaagatccttggctctttgtttttgctttccacaagtgtactggaaagattcagtggcaagttcttgatctcacttatttctcttggcatactatcccttcaatgccttgtaaagacaaggtgtgtccacatggattcagatgcatttcgattccccgagaggggactctttttgtttgtgggggtatggtttctgatgtagattgtccccttgatttggttcttaagtacgaaatgcagaaaaatcgctggactgtaatgaatcggatgatcactgctaggtcttttttcgcgagtggggtgattaatggtaagatttatgttgctggaggaaacagtgcagatcttttcgagttgaattctgctgaggttttggatcccatgaaaggaatttggcattcggttgctaacatgggagcaaatatggcttcttatgatgctgcagttctcaacgggaagcttcttgttactgaaggctggttgtggcctttctatgtctctccccgaggtcaagtttacgatccaagaactgaccactgggaaagtatggctgttggactaagggaaggatggacaggttcaagtgtggtggtttatggacacttgtttgtggtctcagagctcgaaagaatgaaacttaaggtttatgatttagatactgattcttgggaacctattgaaggacctccattaccagaacaaatatgtaaacctttcgctgtgaacgcctgcgattgcaagatctatgttgttggtcgaaaccttcatgttgcggttggacacatctccaaacttaaccaaaagagcagctccgagaagtggaatttcggtgtagaatggaatgtggttgatgctcctgattgtttctctgacttgacaccctcaagttctcaggttctgtttgcttagtagatattttatctaaatttaccttttcatattgtgatatatatataaatataaatatacttgatcttaaataagctgtaattatacaaaatagttgatgttgtagagtgctaatgttctgtgtgaaagtccttcttgtggttatgttataatgtatttcaatctaaattacttgtgctattttctcaaattctttatacacaaaaatttatgtcagtcattagatcaacttaatctaacaaaaatagaatagaagaggatcactcccaccaatggaggtatctaacatgtatgattgtgtcttgtgccccccacattagttttctactcatgtttatgtcccaaaagtttggttgttggaattgttccttactagacatccttcaataacaatttcttgaattgctcatgtaataaattcacttgggttacttctgtactgtttattgagaacacaaaattggtagcagactgcatattttgccttggatcaaaatacttatgaccattttattcatttgaatgcatgttttagtcattattagtgttatgtggtttcggatagttattttcgcaatatagttgtacggtgcttggaggaaacccaagagggattagggtgggtagtgttcttttgtgctggtttgggatttaggtataaatagtggttttaactagatcatgtcatgtagacgcgctacaaaatgcctatacggttttttatctcctctcagctaagttcagtcttccaaccattcggataatcatagattacttgtgtgcttttgtgcgcctagcctcgtgcatccttcttaatgtagaaaatatcgagatattttacattaaacagcatgtgcggccttgatgcgcttattctgaaagcgatcacccttcaacaatggttgctagagccctataccatattttgcaagccaattcttcctacttaatcatctcattattgctttcttattgaggcaaatgaaatttatatgtcagccaatttgggcatcttccaactttgttctctttgtaatgttaccatatctttgttctcttagtagagctattcttatttcaagtaagagaaaattattaaatgtccaaataagatttccctttcctttcttaatactactccaatacacttgagattaagaaaattgtaatctaattaaaagattataactatgtagagtacactaaaaataattcaaaaaatatcaatgtaataacaataacaataaagaattcttaataatatattataataaaattatttttaaataaatataatatttatacatgtattaagtttgaataaaattattaattgtacataaataaattaataaactatatgtatatattttattaagataaaattattcttatatagagatatatttttttaatatagtacttagacaatgtataactaattagaggttatttttatttataacttgcttaaatttaaatttaatatttttattcttaaataaatgttctactatcataaatttaatataaggacttttttatttttatacttcaaaacagttttttttttttaatttttacaaaattttacatagaaattcttatagcaactaacggaataacttaaatcgtaatcaaaattcacgtaataacctatatagaaactactgagaaactaccggaacaacccaaaccgtaaatataaaaaaaaattaaaaaattgtatatgaaataatttcccttaaaaaattgtatatattaatattttttatataatttttataattcaattaacaatatcatattctttattatttttcccttaaaaaaatcttttttcaacaaaaatatctcgtgtaaataaatattcgatagtgtgggccataaaaggcccagtaaagaaagttgcagttgaaaaggggttgaggcccaataagaaagtaaggtgtgttatgtggaccaatccaatagattggggtgggtgttcgtacaagtctcctcctctcttcaacgaatttccagtgaggaagaaagaagaccagactgaactgagctccaagaagaagaagaagaagaaatgggggcaataacaacagcattgatagcaatagcaggagtggttcttggatggatcaccatagaaatggcctgcaaaccttgcctcgataaaggtcgccaagccattgatcgctctctcaatcccgattacgatcccgacgatgaagacgaaaacaacgccgaccttcgtgctcctcttaatcccaatcccaatcccgatcttgaaaatgttagtaccggagaccaaaacgctgccgtttcttcctctacttctgatgcaatcaaggccgtctgatcagatccacccaacctaaataatttattatgatatattattattacaattattggaggaatttattatttgtatttattttctttacaaaacaaatgccagctatattgtctaaaactactattttttttttttttgaaggaaaaaagtttaatatttgaagtgtagtttttctttatttgtaataaaattgtttgaatgatttgtgtatgttttgtgcaatgtgactgaaattgtataaatactatatttgtaattaaatctataaagaaaaaaaattgtttgaatgatcatataatacatttgtaaggcacaattcattgtaattaagcacatattctatttattttcaaaaataaattaaaataatttaaagaaattactttatatactatgtttttttttttttttaatttacgatttagattcctctaataatttctatataaattttaattatgatttattataaaaatgtaaaaataaaaacaaaaatctgaataatttattaaaagtagaattcgcactcaattacacaagttacggctttagtattaaaattattcaaatttttcgaaaacaaaaatacttaatttcttcaaatatcgatataaacaaaagtgacactcttagtatatatatttacagcataaatatttaaatttaactttcaattgtaaataaatagctaaatttaatttatagcggtaataataactaaattatatttctagaactagatactaaactaagtcattatccacgttttatttttttttattaatatatttaaaccaatttttttaaaacaataaaaatttaatgacttagaacaataaaaaattatcgggtgacaatttacttaatatctgtcaaaaattaaacttaagta

SEQ ID NO: 44367 - DNA, 1645 bp, Cannabis sativa
ggcggctgtggatgtgagaccggtgccgttgccggagccaaaagtaggggttgtggtgttcctgttgaggttccaaacgctactgctcggcaaacgtcgctcttcaattggtcattccactttcgccctccccggcggccatcttgagtttggtcagtatataaatatacatatatacttttttaaattcgaaatttgttatatagggatcagatatcaccatctcttgaattaaaatgaaatgttgtacttttatgtttcgaattacctttgaatgtactttttttttcctagggtcatcatcatatatgtacatagtagctttcattcgtatgagtttccttctcaatattcctctactagagaagcatgagcccactatctagtttggactgactggagtgataaagccattactttgtaggtttaaggcatcaattttaagatccacccattgttctcttacttgtagtctttgaccatgttttgttaggagagagctttgaggattgtgctgcaagagaagtgaaggaagagactggtttggacattgagaagatagagtttgtcactgtcacaaacaatgtcttcctagatgaaccaaagccctcccattatgtgaccatcttcatgcgtgcagttctgaaagaccctcaacaagttccccaaaatattgagccggacaaatgtgatggttgggattggtatgagtgggacaatcttccaacacctctcttttggcctttggaaaagatggtcctcagtggcttcaatccctttccaggtgtctagaactacttatcaataatagttattatgtttatcactctcactttctcaattcaagcgaaatgggttaattaatgttaagcttttgtagtattttgtttagggacccttgaactgctccaattgatgtttttgttttgtgcttcagagtctgcttttatcaccctgaaaattttcctactagctcctcagataaattaatatgtgatgaactttttattggtttggtgccgagttcacactcaaattgttgagatgatagaatcgtaacttgttcaatggacataactgaagctttgcttactctttagcctgagctgaatatgctgtgaagcagagtgtttgatcctgacatggaaactttcttttcaacttgggaagaagagaagtatagattagatggtaattatctttacaatgttattgctgtgcttaattaataaaacgaaatggcctattggttcaaagaaaaagaaatgatctacatcactgctcattctaattctgaaacaaacttaaaatattttaggacatattctgtttcatattgtataactagggaactaagttgcccttcgcacagttcaacttttataattttttattatataaatatcttgtacttgttgagtgatataatttaaaatatagtattttgatatataatttaaaatatataaaaacataacactttgtgataaatattaaaaatagtagaattaataaagaaattgcatgtattattataaaagaataaatgaaaaagaagattactattttttaatagaaagaaatcatttagacctatttttttctttgatagaaagaaacaatgtaactactatttataaaaaaa

SEQ ID NO: 44368 - DNA, 1857 bp, Cannabis sativa
aataactatgcatttaggggaaaaattaaatggtattttaagcatagaatttcaaatttccctttgtattttaacaaaatagttgagatcatttttgtatgaaccctccaaaaagttaatataaataaaagtttttcttaaagaaaaaaaaaactaaggccatattaacttaattttgttggaatgtcaatatagcctctctctagtctcctaatctaattattcaattaaagtgcaaataaatgtgaattttttttttttggaaaaagtaaataaatataaaacttaaagaaccagagtgtagtcctttcaataaaaaggaaaagaaaaaatagagtgtagtgtcgagagttttatcacaagcaagcacgttaaaatagcttggttggtcctctcaaactcaaaataaataaaataaaatggcttggttgggtaaacaaagctttaccacgtgtcaagaaatgaatggttgaaggtttactaggtgcatggtgccacgtggatagaaactataatgaatcacatgtggcactataattatggatgcttgagtagtagtatgacttgattttagttaataataactaataagtgtttctttaatagaagggtatcctctgtcctaagttgtctcgtttactgtctcccttgttgttttgagaccaggtcacgtctctattaacttgaaaaagctttgtttgtaaataaatctttaaaatcttacaataaataataaactaaaaaaaaaaaagaacaattatttgaaaaatatacagtatgctaaaatatgaaagtgtccacatatatttcttgtttggactaagaaataattattgcatatagtttcttgtttggacaaagaaaataactattgcatgcttatataaaattgagggagacgtggccttatataatataaaaattaaaaaatataacattcatgcctattgagagatattgttattttaccctaatgtatgtatggcaagaaaaactattatgacagtaaataaaattattgcgacttttggtgctattttgcttttattttattttagttttttttctttcggatccaatctaattaaataattaaaaaaataataatagaactatagaaaacgttacgtatttgtctaaatgtgaaaaaaaaaggtatagaccatatattcttcccttgggagaacagaaaatatatagattaatagagagaaagtccggagtcgtaaactcgaaacgcgccgttttggtaagcccgtcaccacccgccggcaacctatttctccgattaagcccttctttctttctcctcttacctctctctgattctgatcccgcgtcgtcctcttccattcagctggtctccgattgctgtaaatttttctcaggtagtattctctttctgtatctctctctaactccatttctctctcttcttctcaatattgaggttgcttgctcaggtttcgtttggtttggttaggttaggttagattaggttgtggtttactttttcttttttttttttttttcttttggttttgttttgttcttgaggttcctaattcgatttagattttgttctttgtccgtgtgaattgttgtgaagatgtgaatgtttagggcttttctaccttttctcgccattgacgacaatgttttataactctgtttgggatgtttgcatgtacgaattcaaatatgaatgtacaatcatggaggcatggattttgactgtagttttctgtaatttatgattattaattctttaaatttgcttaattgaaattcgtttgttcaaactccttgtcttcgttaacgatgatgcacttaaagcatattatttgcggaattgaa

SEQ ID NO: 44369 - DNA, 2412 bp, Cannabis sativa
atcactatctctgtttggtttctgggaaactgttggaaagtaaaatataaatattttttttttcgtaggtacaatttcaagaatgttggtctgctcaggcgggctatgacccactcgtcctattcggaagagaacaacagggcattgaacatttttggtgccagtatcattgaaacatcagcctctctgtattatttgaaaaacgacattgatatttcccctgaagagttgaacactcggatcactgatgtctccaaggttgaaacttcttgtgccaaagatgggactcgtctggggttgcataaggtggttagagtttctcacaagagcacgaccaattcttccactccttctgtcgtttgcggagctttccgggcaattttcggggcgattgctatcgatgctggaaactgtgatgatgccggaaaagtgtttttggttgttcatggtggaaaagctcttgctttttaatggtgtgaacacagttgattttagtttcttgttaagttgtttgatgtcgtttgttcttgtgaatgttgtttgtgtgaaacttgtgtacttacctttgtttagatatgatgttttgaaaaatattttataggaatgtaatgtatctttagtctttatctatgctacgcattatgcagctttgttaatactcatgatatggtttaaacttccattttttctttggcatgtttatacttgatgatgaaaagttgctacaatgtagtgttgtactggctgcattagtctgttatcttctaccatagaaattgttgttggtatgtaaatatgctcagcgcctcaatggcaatgttgttacatgaaagaacaaatgaatcccaagtcaagttaacactagtaaaccaaagtctagaatctgtagtgcctcctctatggagcaaaagtcactgtggccatccttgaagttgttgggaacttctaagtcttcaaaggaaaaagtcacatcatttgcagcgaccatactagggacagggacctgcaatcaatgtttcattcttcaacatcaaaaggggaatgagcacatcatgaacgatttctttctcaatttctttttttttttttttttgaataaaagtgtacttgttataagaaaaatatagttagacctcacggttattacataaaaggttctccgggatagaagagaccggaatatcaccaaatctcatttgagcaaacgcccacttagctacgttatgggtcgcaaaattacatgttctactaacataagaaaaattacagctgaaaaatgaaggagaagatctgatacaaaatgagtagtagttctcaagagcccaatgaggatccttcccactaagcgcattgattactacactcgagtcgttctccacaataacaaacttagcaccaatgtccagcgccactgtaatagccgagcagcaggccgccgcttctccacacaaagcatcagaaaactccaaccgattcgtatgaatctagatcactctgcccaggtgatccctagccataactgcagaacacatgctatctaaccccactctgatatcacagttcagcttaatctaatcttaaggagggggactccaagcctccatgcaggaaggggtaggaggaggaaaaagagaagcatgcaaatctgcaaaagaagtacaaatagcgttaatacacttcttcatattaaccgagcagttgttgtgtaccttatcattactggtccgccagatagtgtcaaccacgatcaaagcatagagaaagacatcctcagcattaatacccttctgtttcagattccagataaatttcacccaatcccaaagacgataccagaattgcaaacatgatagataccccaaggagaagatcgccacaagtgaaacgtcacatcacaagaaagaaacaagtgttcaaacgattcctcccccaacccacagagagggcagcaagaatcctcaataggaaaccttttacttattaccgacctaacacgaagagccctatataggatacaccaccaaaggaccttatgacgctccaagattctactattccaaagcttattccagagagaaagagcgacatcacagtgaggagacctttccacctatccttgccaaggctggagggattaccaccctttaagattgcagcaaccgtctcatgatcaaagagactgttgagcctacggatatcctaattaccattgtttatcaatcaccaaccttagtaacaccaacattagggacactaacaggcgtaagggaaaatcctttgtaatgagggatccaagggtccccccaaatgtctgtatccctatcatccccaaccaccatacaagctcctttcttcaagatagagttggctttaaccacattcttccatgaactaagaatccgaattcttata

SEQ ID NO: 44370 - DNA, 1392 bp, Cannabis sativa
tgaattaggtgattatgtattgatttggaatcctacatttgggtaaatttgaaattcaatataacagtggacataagaaataaataaagttggaatctagtctatcattttctattaattatttcaattgagtttttaaacctcaaaattacaaatgattaaaaaagatacattcttaatcttctttcattttatagttatggatctaatttaatccaatcacacccaaatctttattttgaaaaataatttgatgtgttgtaattgtatgcctatactcacatctataattttagagtgattttagaatgtcatgtcatctctttatacttctcctttatatatatagatattgatatgtatatattaagacataattaaagccaaccttataaatcagaataggaggattcaatctgaaacagaatatatatatgttcatgaaaaatacacaaaaacaatcatatatatgaaaacacacgacagggcccacacaaaacagagttaagactcaaataaatcgatcagtttgccacaacacatagggttgaagaataccaataccatatatcatatcatataccagaaagggagtagagaaggggaataaattaaataagagatgttgagggtgaagtagtagtacaggataactccatatttatcttcatccttaccttctctaaaaacaggaaggtaatgtaactccatggcagacaaaagccaataccacataaacaatcactagcaaaaggattataagagcaatcctgcaagaatgcataataaagaattcagttagtacattacactccaaactagtgaacaagaataaacattatgaaactgagctgaatttcacatctttatcaattttgaagagcttgagttgatgggcattgcattagttgtcattaaattagttacacattcaagaaatacgttccaacacaatttcttattgtacttcttattcaaataaataaagaagtaaaagtaaattagagaaagaaaaaaaaagggctttagattagaaacatacgtgagcttcacatttctccaccatactgtgcttctaaaacgacgagcttgttttctgaatctgaaggtgtttccttgcatattagcagttttatcaactagcaactctaaacgatcgcctctctctaataccttgtcaatattctctatcatgacatttcgaacctacgtttatacaaaccagaaatttaaaaacatatcaataataaaacaagtaaatttatttacccatcaacagttggtaataataaaaggtcccaaccaacgaagtttctatcaaaatctcaacatgggctgttggattcaccattaagaaaaaaaacattcaactatacctgactcatttcacct

SEQ ID NO: 44371 - DNA, 4173 bp, Cannabis sativa
tttaatttgtgtgtgccgatatcattaagatattggaatttggggggacgatgtcattgatggagatttgcgctctacttaattgagatagaaacttaagaatcgattttgctgattttccaggtttaaacaatatacattctgaaccaacgaattgttaaatctccaccaagtagggagcctataaacataaacagaaccaacctctcgagagataataataattataatagtaatattatgaataacaaacccaacgcaaatacaccaacataagaatgctacaattatgtcccttcattcttcaacttgggttccgcttggtaatggctctacaactggaggtatacaatccactttgtaacgcagcgcctattacagcgaaagaagaaaacaaagagttatgtggcattgaatcgaataaacacttcgaaaaatgggaagaaaaaaaaaatgattcattgtggatgctgcaaacattcaggataccttcttaaagaaatttgcatatgagttgtcccaaatcagtctgtagtctccagccatgcatgtgcaaaagttaccctggaaaaatgaattcccatgaaatattaatcagttatgatatcaagtgttacaacagcaaaatggccacaagggtataatactaaactcacttgatcagattcataacgtcgataaggtaaaattagctgttccacaaacaattatcagtttaattagaggacaataaaaaaaaaagtggataataaaaagagtgatattcgagggaataaagttgtaacatcataaaataatgtatgaaagaaagaataagaaaccaactcacagttttttctccagaaggatttgtatactccacactaaatccaatatcctgaaacacagcatacagctcaattgtaattattcttgaattttacaaaaagttatagtacaagtttcaaaattgcaaattttttaagacttgcaatgttctgttacaaatgttttatcgtaaaatcccacttcagttgactaaattcattatgtagttacaggcaataaaaattgcacacacaaacccaagtaaagatggaaatacaagtgaaaattaaatttaaatgaagaaagaaaagccacagcagaaaacattatcctcaactcaaatccaaaatgtaataaaccaataggacaatatatgagcattagggccgcttatcagttaccaggcaagtatacaattgaaaaagatagaaactaaggaaagttagactcatcgttttttgttaagaacaccaaactaaaactcaaaaccccaacaacataattttgagtttaataggtattacctatgagtgagtattataagaaaaatttgagtttctatgcttaattttgctatccaattaaaaaaaaacaaattatatgagttgagattgttatagcttaatctttttaaaattattatttacattattttttttaataataatttgattgaaaaataaaatataataaaataaaacagaacagtgaaaaataattcaacaatccccagtccaataaactccattccttctattataataaataaaaagaaatatcactatcaagagcaccaattagggttaaggaacaataccacagttatcttgccctgcacaacagagaaatcccaggcgatgtatgaattaattgcatctactgacagcaaaatctgaaagtgtagtaaaaagtaaagcgttaacaataaaaaagtatacgaacttttgatccagaaaaaaaaattattatatagggaaaccacaaaatacaatcagaagttcccactgttacctacgctggcctatttggaagcacatagacacgtggataagctaattacatgctttcttttctaatatagtcataaaatggtagtatcttatgtaaactttatctttcccttgtattcttttgagtgtttccactctacactctattttattatttctcaatcattgataatataagatcagtgattttttttgttcttgaaaaaaaaaaaagtaaagtaagatcccaataaatatttcagaattccttattactcggcttactaagcatattgcttctgaattggaaatttggaactagtcatattttgttgaatgaacaaactagtagtatataacaattattggaagaaataatggcatgggcaatggacaaggaaatatcaacatgcgaaatctggaaaaatcttatgttcacaattcacatgccaatttatctcaaactaacatatgaatgcatagaaataacttttgttgtgttcatgagttggtgtgctatatctccagaattgaaggatgtaaccattttttgtgtcccttgctctatcttcatactattataaggaaaagatttacctatcttattttgtacgctcaatgattatgttccgttaaaaaaaaagtaataattttgttgagaaacataaaattactaatcaatagagaaaaagtcgtagaaaaaaaaaaggaataaaaataaaaagcaaaacaccaggcactagtaattaaaacatggtggtatcgacttaagatcatgagtgcagtgttaatattacactactcacagcgcatgagcaagcattatgctgatttgataaacttaaaatgcaaagaaatcactaacgataataaaatcttaagaatatattttaaaaacaaacctcgtgacattttccagctggaacagttatttctttgtaatcatcatttttcctgttcaagaaagacgatatgagaatgcagaatgaattgaacagtcatgcataatgcatagaacatctatatttaccttccttccaatgcaccagcttcctctgctgagataaagaagggtgaatttgcgaacacctcactataggaaaagtgagaatagacattaactaaaataagaaattgatacaacacacctaacagtaagtacaaatgctatcttttttatgacaggtaacaagagcttcatcatagaacttctatctcattaatatagtagaagattcacattgtcattcaatttgggattaaacaaagcaaaacatctaaccaccagcaacaggaatagagtattatattaatgaacataactaatatgaagaaagacatcaatcaaaataagaaaatgattttatataaatataaatacatatatatactagtagtaaaggctcaaggcatgagctgcagttataataataaatattatatattaaaataaataatagatacttaaacaagcaagtcataccataaattttaaattatataaaatggaaaatttatacaaaaacatttttttcttctacgcaatggttaaagttaaatacaatacctcaaatacaaacaaatagaagactgtaagaaggttaattggacttgattatattttttccattaacaaataaattagacctactattttttttatttttgattttctttaattttaataataaataccattattttcaaataaataggattaactatatatccaattactaaaattaaatttcaaataatagtgatatgagcacacacaagttatataatgctattgaattttaaatctacaattttttctttaaaaatttaaacaattcgtttgtatttttacaattattgaacaattcgttatataataaaaagacgaattgtaaaattaggatatatattgaacaattattgggtagtgattgtttttaatcactaccatgtacttttagtatttttggtacatggataagttgcaacttcattttttttaacttaatggtgcataatgtggttacaacttacaaggaacctcccaaaaaatttcaattttttttaataatttagaatcctgttttgagcatccttaaattattccaattttttcagaaaatttaggagagatccagaacctaagtacattgcacactgacatgtaaaacaaatgaagttacaacttatacatgtaacggatatatacccaaaatactaaagatacctataggtagtaattaaaaataatcaataccggtatggtaccttgaggatcctaagtatgtatgtatgtatgtatatatatataaagaaagagagagaaagagagaaatattatgaaatgcataagccccagccccattccaggtgttct

SEQ ID NO: 44372 - DNA, 2706 bp, Cannabis sativa
gttaaactatattatatagtagttattttgtaagacatattttaaagaacaaaattttcattgaacatagatgacagaataaaggcaagggagagtcgtataataatttggacttggtaattggtattgtgtacagtttttttttttttttggcaaagaatagtattgtgtagagttgatgttgtatatatgggttggattttttgacatagcatgagtctggaagacacgagcacgacctaacacaaaaaaatatgggcttgagtaagacacaatatgctgctgtaaattagtataacatgataagaaaaaaaaaaataaacttaagtacgacacgatacgagataacatgtaagtactcataatttgatacaaatgtatttacaaataaatattcaaaatttattcattctaattaattttttatatgattatgtgtaaagtattattaaaattatataaaaataattgaaattataaaaaatacatatgatttaatgataaactcattagttgtttaaaaaatagtagaaaagtgaagagcctgtataagaaaatggattgaccccttcatgaaaaataaataggtccgagtaaaacatgacacgagcctgagtacgacacgaaaatatagacttacgaactgtgtcgggtttacctttaaaaaaattagcaagacacaacacgatccatatatctttatgaccaacacaacacaatctacattataacaggcttttcaaaatatgaaccgggtcggtccaacacacacatatttgcccctaaagagttgggtactaccactagaagacaatatgatgagtccccacaggaaccaaaagctgaggaaattaaaccccattctctagacacccaactgaaaaaaggtccctaaactcagccttacaacatgctcgacacacctctcttgtaaatcaaatgattcttcattcttgaagatcatcattagctttagctaggacccaacacatcataatcattaattttaagttctttaagttctttgaattaatggaatgaataaattctatctcagaatcaatatcagaatttatatgtatcctagagtgaaaaattttccattgaaacaattcatttatttctgtaacttctttttttttttctttttctgaatatattttctttcttcagaatgaaatttataagttcatttatgtacaaataattattccattctaatctattttatgccaaactattgtctcgataaaaaaattctcgttctctaggatatatatagaattatagattctgattttgatatcatcgtctcgtatttaatacaataaagagtaagatgacttggttatcatgccataagtatatgtttccgcaagacatttcagattagaactaaatttcattaattataaagcaaaattacaaaataaataaataatcatttctattatataaataaggtgcactttatagtttacatatgaagcccaagtttcttggtaagtaaccaaggaaagaaaaaaaatacacgttgcacagtcgtgtaaagtttagggaataaatttaacaaaagaaagcacttttgaaacacatgacggcactttcttcctatatcagcactatttattttcttttgattagtgggcttcctctatgattaattaaaccttcacttggatatttacagcagaaaattctgaagactttctcaaattatatctgtatcattgtcagcttcttcacttccttgtttcatattgttctggttcaccataaacctccagctgtcaccttcctctatttcccactgcttcttcagctcatagatagccttcgatgctgcagcagctattgtcgggttactatcctcagcaagtctctgtaaatcgaaacaaacaaatataatttgatttgggaaacataacatgagagcaagaacagatagctgttgcctactaccatcataatcacctgtaatgctcccatgcctgcattaccaagtgtccacatggatggagctacagacaatgcattagccaatgctttcctattttgccaaaaacaaagagcgatttacattataacagaagcaaatgttcaacaaaatatcaactcacacatgttagatgatctgtaatagtcacacttcacaagtacacattttcattttatatgaatatctgaactctaattttaatattgcaacaaacaaacagcatcttattagaattaatgaccatcagacatttcattctcagctatttcacaaagctctaagctgattaggagtaaaggtttttctttaactcgtaaaagatatcaatttgttctggaaatacagttatatggatggtagtacttgatagctcacctagtattaacatcaggagagcttgaacattctgccaataatgaaacactacttttcccatccattgcatccagatctatgagagttgtgatcaacaactcgagctaatccaagtacaaagaatagttaagtaaaacaaaacattaccaaattgatatttcgaggctcagtagcatgaaagtaaagttggacctcttcaggatcagtgtaatcaattccatcagcttcagagagagcagatgccatactccagtatgcttcctacacattcaccaattaaaaagaattaagtttacaaatttgtagagaaaatttagcaaataagggttagt

SEQ ID NO: 44373 - DNA, 1224 bp, Cannabis sativa
ctcgtcacggtttccagaccacaaaacctcggctaacgcggaagcacgcggccagattcgagagtcgagtaccgtctgatcagcttgctctgaccaaagcgcaacctcaccaccaagcacaagcttagactcttctttactcagcccgtaaaggatgtcataattgtatatagtttgccaagtcttgaatggattgcaccacgacccaccatcaccagttgtgccagtctgtatgttgtaaatgctgttgttccctgtaaagtctccgtggccacaatccaaataatagaactccgacgaagagacaatcgtacggtaccctgctgaaacaatttgtttagtattgttatggccgttcctccacgtctgcaaaatgatgttctctggtggaaggaattttgggtcaaccttaatggtttcgtcgagtaaaatgtcttcccaatatacaacagtacgattgagtgaggttatgtacggcaaggtggagttgacgaaaatctccaagacttgactgagagttccaccgttggataacatggattggatggttggatccaatttccaacagttagggataatctcatcagcgcccccatggtaataaggttcagggaatagtttaatgatgtcatttatgatgtttttgactactttgtaggttttggggtttaatgggtttaattgaccggttcctggttcagccgcaaggcgatcctcccattgtgccccggctggccaccagaacatgttggcacaagtcactatgtccggatatgcttgggcccaagatccagtatgagctgaaattataaaattcattcgtttttgtttaaatttaataaatcaatcaatatccataccaataccataccagtcaaactttggagtttctattttttttatttgtaagaaccaacatattaaaagtaaaagtaattttgtctgctacttctcattaattattccttgcacaccgttttaatcaaattttatttcaaatatcaccaaaatatttatttttaacaaataaagtgttaataaatttagcggttgtaattcctacttaaaattcaaccacccttaaatagaaaaatggttatgtttaattaattaattgagattattaacagtacctatttgattgcattctaatatcaagaaaaataaaaactataatttatacataacaaaaagtactagcaggtaatctgtcagaaaccttgc

SEQ ID NO: 44374 - DNA, 2745 bp, Cannabis sativa
ctccactaaaaatgagggcctagctccaaccattgaacccatcagtgctaacggatgcatactcatctgcaacagataacctatgccacatcaatcctggtatgttacaaagattggcttcagtggcatacatttctaacattcaatatgaacggaagcagttctccttccagtccatttctcaattgggacttttgaatgcttgagcgagaggcggggtcttagcctccccctttcctttggattccttagctatctcagatggagttgccttcgggatagtctccaaggtagtacttagctggagttctgggacgggaatcttggtcagaatcacaacagtggccacttcctttgtagagacaactgttggattttctttgatttccacgaccttaaggtggaattcctgatttaaattcataattggaaagacgaaaaaagagaggaaaacccaagcaattagacacccactatcctaatgacaaattgggtgtcggggaaggcttcccctaaaattgcttggagaggtccccactggacctatcactcccataaatctatttttcccaaacatctcaaagcaatagatcgagaatccaaagaaagttactagaaaaaaatctaatgtagaaatctagaaattaaggccatttggagtcctaagaactccaaatgggcatgaagaaaatacactagcctactgttcattctaaagctcgtcatgcctaagttcaaaccataattccagaatcctagtaacatgcaaatgtctacgaagtacggacaaccatgcccaaactatccacacaatgttagcaccctcatggcgcacaaaattttcacacaatccagtcttagaaatgaaattctacgggcaacattctattataaagacatgcaagatatcctaaatttagcttgaactgagcatttctatcttagatacaaaatagtagatagtcaaaaaagtattggagtacttacttactatatgagtcgagaaggaaagattatcgtggaaattttcccaagaatgttgaacatagtcaattacacgatcgtagccagcctgagcgtcaaaacttttattggtttagggatggaacggtttgaggtttaatggccctgcatctggaaaatgagttgaatggagatttagaaattattgaatcaagcaatcgagggcctcttgcattcattgttgaagatgactatgaaagggaaattttctagaaaattggaagttctagtttgaaattcaaaaatgggtgttttgagagtcagaggtgatgaaaaagaagaaatgggcttggcaaatctatttatatttcaaccaagatccctgtgatttgaattggacgaccccgatctcttcttcgaaagagttcactttgatccgatggatgggaaaagatggcatttaaaactagcccatgatgttattcattataacacacctcgagtaccgtaacataaaaagagaagtcattttgattgttctgccatcattgcaagttgcaacttcttccaaaaaatccaccctcggaatgcacgtgttgccaacaactacattaaaggtgccacatgcatgccacgcttgtggtaccttcaatttatggccctttaattaatgacagctcatgggatacatctgcaatcccagcagtcaccatgtgtcaaaaacttatctttaagaaatgggagaaaattgcaagctcccgaatctcggagagccccagaagcttgggggtaaatattatccatgtttctgagcatgtgacacgtgaaaaataaataaagggactagcctcataaccctgctaattaaaagtccccattacaatcctgccacatagaggcctcccagagccaaatatgaatcttgacgaaaagattgacttaggcctgcttggtcttgtcctagtttctcagatgtcatagacataatgtctctcacagacccggagtggtccaaacatggaagcactacccagctgataccttgatgggtactcgaagggcttattggtgatatctaccacccaagagtgtcccagacatctacccttggagtaacttgattcatctaatgacaattataattattttgacagtttttgtcctgtgcgtccaggcatggtagtgcgtgcacattatccacttttttttccagacgaaaatttcagacctctacttttaaaggtgaaacctttaggcgacacatgccctctacttttagaggttgaacctttgagtgacacgtgtctaaaacgtacaaatggtccccaattgtctaactgcagcacacacgagcacaattatttctaaggaacccaataatcagatctcatttttgtgtgtaatttaccccattagtgagcttttagcagaaatccttgacaggtcatggacatgtccatacatgactctagcatataaatacttttctattttcatacgaagggaggggtcaatctaaatagctgaagctctgccaagattactcttcgtcttcttcttctttaagaaaactaattacagaattaatgtttcatgtaaaacattaacatcaaacatgcttttagaggctaatagacggaataacatctgaaccacataaaaaactctccatcccttattttttacatttgattaattttttagttctcaaatatctagtttctgaaaatctcggtaaataatattaatttgttatgtgattgttgttaggttttatgccct

SEQ ID NO: 44375 - DNA, 1524 bp, Cannabis sativa
cagaaaaggagaaagaggtcgtggacacacaagacatgataaagtaattaaaacgtgtagggataggttattttttcatcaccttgcaaagaaatggccactcaactctatcaaaagctttagctatatcaagcttgactaccatctagccaacttatcccaaaattctgtgagccaaagaatgggtaacctcttggcaaataattatgttatcatagatcaacatgttaggcaagaaagcactatgtgcaagagatgtgactcaagaaagaataggtttaaggcaattaacaagagcccaagaaatgattttatacaaggttgaatagagactaatgggtcgatattctgggagacattgggggtgggccttcttaggaataaggataataatggtgttgttgatggagttgatactagcaataccattttggaagctaagagcgacatgaatgacatcaaccccaacaatatgccaattggccttgtaaaaagtgccattaaaaccatctatgcctagatctttgtcgctagctaattgaaaggcagcctgcttgacctcatctgaggtgtaaggggcattaaaagattgatacttatcatgtgttagggtcactatgatctcggcgatgactttgttaatgagtgaataatctaggttaaggctagtgaaaagttgggaaaataatattctacaatagccatgatggattgattatcgaaggcaacatagccatctggacgagtaagggagtgaattttattcattgagcattgagaagaagccacatgatgaaagtaacaggtgtttttatcactaagtttgagccaatcaacctgggatctttgctaccaataaagttcttccttgtaaagaaggcaattaagagtgttttgaaaattgtgacatgtgttgaagctttgatcattgggttgggagacactttgagcaagatgcaactgagcttgggcgtcttttatttactgagcaatgggggcccaacgttctcttccgattcttgagtgggaattcacactaatggaatttagaggtgatattggaaattggatcatgggttggcattgtgggaactgaagtctaagcatcacagatacaatctttaaagccatcttcaataatccaagttctatcaaagtggaattgtgggggacactagctattgtgctcagtggagccatgaagagaaagaataagggcacagggatcaaagttaaagtaatcaccatgttgaagatgcatcgaagggtataaggagtcccacgttgtaatgccctacttgcttaggactgctacattgattttctaactactatgtagcctttgctaatcaaaaccctattgcctggcagagagtcagctatctccaaaaggtgggttaagtttatgtcagtcacagtggatgataaagagttgagtgctaatcttattgagctagtcgtagcagactttgatattattttgggaatggacttcttatctaagtatgcgatcagtattgattg

SEQ ID NO: 44376 - DNA, 1844 bp, Cannabis sativa
tgttctttaccattgttctaaaatacttcaaaatatttatatatttatgaggatggtaattatttatttatttttaagtcatcttcataaatttattttatcatgacaaaatatttcacaataaactctcagttttactcctattaaacactactagtttgtagtgctagttaaaattgagcagttagttaaaggttgttgtaattttgttacaaagagtaacaaattagttactgattgcaatcagtataaataatttgtaatgttcttctttttatgaaaacatttctttcattcctatcaattttgattgttacctataaagagaaattagctaccatgaaagaaaaaacagtataaagatgtgtacaatatttcttaatttagtaagacccatcaaaaagtaatataattaattgaaaaaacagtcacgggtgtgtttatttagtgcaaaatattcatgcacatatctctattacttgtgtaatttacatgtgtccttttcttaaaaataaacacaatagtaaattgtaatcatacttttacttacatagctaatcacagtacaccatctcctcgtaaagttcaaattcttcatcccaatatcaacaaagaaatcagatcaaatatatatatatatatatatatatcataacaaaaaaataacaataaacaatattacagactgacagttatcaatgataataagttataattattgtaaattgtttgaagtaatttattattaatataagcacgtgttgtgtagtggtagaaattacttttactagcatttttcttgtttgggtcaagagttcgaaactcaccttaactccttttgtaagggattcaagttagacttggtccttgctagaggtggtgctatctatgtgatggtaattttcgaagtgactaccgatgacccaattaaattaagctgagatataagactcttataattgacacgtgatttctgagattgtctaaaatgagcaaaggagtgaagaaagatctggatccccttttatttcagccaaaaacaaatatatattattaatatagttagaaatagaatggtgatgttgattgaggaatttgaaggggcaagtggaacagttgcatgttatgttcatcaacggttagtagtcccaacaatttatgttgtttccaagtaataataataaaaagaaagaaagaattaaagttggttactttacttagttacttgtgactcaaattgaatttggattggcctatttgggcggcctcagactgagagagagtgtcccaaaaccaatcttcttctctttttcttgatttggtacgcccaacataatccacaaatcgccttcattatcaatggcactcaactcatcaaaaatatgatggccgccatttccagtacaaccttacctcccattgtttcctttctctattttttattttattttgctgaatctctattttttattattactaatttcttatcctaactttcaaatatataatcagcaaataatgcgggtattcaaataaaataagaatactcattatagtagttatgtgaatactcactcagaataacaagtagtcaaaatttaagctacaaaataaacaaaaaaactagaacagaaatataaagtagataagaattttacgttcagtcagaactcggtctgtttagtccaatttgtacaataatttcaacttagtttatttgatttgaactgttattacaagaataaattaattaagataaatgtttaaaggaataaatataagaacaattcgtctgttcttgtcttaatttagcaatgtctacgacttgcaaaattgcatattgt

SEQ ID NO: 44377 - DNA, 2838 bp, Cannabis sativa
aaatttcctttttgtagtagtgtaactactaattaactaaccaattccttaacagccccttcaaactgagtgtggtttccacagtttgtctcgaagttcagagaacctgatgctggagattgacttggtgagacaatcatgaatctgagcagtagctggaacatgtttggcattgatatgttgttgtaggactttctttcgaacaaagtagagatcaatctctatgtgtttggtacgagcatgaagtataggatttgcagcaatgagaattgtgctctggttgtcacagcacacagagggaacaataacttgaggaacttgtagttcatgaagtagaaattgaacccaagtgacttcagcaacagcattggcaaggcttcaaaattctgcttcagaggaggacctggtgtggtgacttgtttttgagattttcaagcaacaagatttctaccaaaatagatgcactagctagaagttgaacgcctgtcatctggatcagatgctcaatctgaatcacagaagacatcaagagaaaagtttgatacaggtgttaggttgtttttagtattatttttaagttaatttttagtgtgtttttaatttagttctactcttgtttggagcaattttacgctttttatattctatttttgcagatttaaaatagaagaagattagaaaatattaaaggaataagatggaaaaaaaaataaaaagatctcagaaaaaaataatcaataagatagagaaaattgtgcaaaaaaaaaataaaattgaaacttcaagcctgaattcgactatgttttgattagattttggaaaataccaaaccataaaagttctagatctctctttcctctttccggaacatctttaatcgtctaattatgagcaatatcaagagagttatgaccaaaatacgatcattcgacgtagcagaaaactcactatgtccaaataaaaaggggcacacctaggcatatggaaatcatgggccgcagcccgccccttctagtcataagaaaaataggttttttttagcattttttttatcttttttaactattttttttggctacataagaagtgcacttcaatagttttgaacaggcaatcaaggaggacaaaaattagagataaaaatcaatcgcgaaggcttttttaacggggtttggccacgtccagagtttgaatagccaccacgttgaccaaaggtaccacttttggttggattaggaccacctcgagacataggataccttgtaaaataatcagtgcgaggagaccaccacgactgaatcctggtggaacaattggagctgagtacggtggatgattaattatatggactgaaactattgaatcttgagttagaaagattggcttcaactttcgaaatatcaagattctttgtgtgtttgtcaatgcgagccaatttagccattaactaaacttcgatctctgctatagtgtagacatctttccttgtagtaacagaggtgacaaacacatcgcactcagctggtaatccattgaaggtagcttcaatacgatcttgaggcgtttgtttgtgaccaatcgtggtaagaagatcaacaatccctttgatcttgagcaaataatcattgagagaacctagcatcttgctgtttcgaagttgagtcttgtacagtactatatttgctgcattaagagttgtataatactcgttgagagcttgttagatctgagcagtggtgtcacagcttatttggagattgtcaagagatcgactaggagattgtcttgctgttcccaatatttgaatttaagattgaaaacatgagatctttcattagcaacactgaggtactttcgtggagctctatcaagatcgaagtatttctggtttgacttcctttgatcaaggctagaacttgatgttgctatggaaggtaattatgttcatcgagtttaattgagagaaaatgagtaaaagaaacagggtgtacaacttggtgattattctatgtctgagcattcttcaatcttgaagctccatcattagaggtacgagaaatctccattgatgaacgaaagagaaagctctgataccatgtaaggattgaaacaagaacagagagagattagaagaacagtgttttgtattcattatgattaagaaggttacaaatagtttatattaggcattagagaagataacaaccttctaacaatgcaaccaaagaacactcaactaacagagttagttggttaacagtaacaaccaactaactaactactaataatggaattggatgaataagcaaagcagcaacaatatctttggtgatttttccaacgtttgtataaccatctccaaatttgaaaataagatccataaccctacaaaagttaagagcacgaagtaatataggtgaagctacttcagttggcatcacaaactcttcatttatttctttccatgcattcattattagcttattcagttcatcataggcttcctcttcacaaacgccatgttcaatcatatagcattctactgctgaatgttcctcataatcatcttcctcaaactgtacatcatgtaagcaaattagatcattattaattaattaattatcgaaaacctgtcatatgattaaggttcaattaactgctaactgtaatataaattacatggatcactaatacacgagtaatacacaggcacacactttttttgataaatttaatcacctcacacacaatatttatccatttactaatcctattagggttaagtcttgatagcagctcctacaaataactcaaaccaataaacacaacatttaccca

SEQ ID NO: 44378 - DNA, 1864 bp, Cannabis sativa
agggcactcactttcagtttatgggcgaacgaaaattcttatgttcggtggtctagccaagagtgggaacctaagattgcgatctggagaggcatacaccattgatttagaagatgacgagccccggtggagattactggaatgtagtgcatttaccggtgttggcagccaaagtgctgttgttcctcctcctagacttgatcatgttgctgtgagcatgccttgtggaaggatcatcatcttcggtggatccattgccgggcttcactcaccttcgcaactcttccttttggatccttccgaggaaaaaccatcatggaggattcttaatgttccaggacaacaaccgccgaaatttgcttggggtcatagcacttgtgtggttggagggacaagggtcctagtattgggcggccacacgggtgaggagtggatactcaacgaattgcatgagctgtgcttagcaagccgacaggactaaaaactgatcccacaccaacatcattctgggacaaaaaattttgtttcatggctcatgccatttcgggttcttcgatagttcctatactgcattttgtagcatttgtaatttgcttagatcaaattctggtgaggttcttctgatgtgttgtggatttgtttattattagctctgtatcatatcatataaatatgtaaagatctttgtgcctatttcatttgacctttttgtacattttgagcataggataaaaacttatttggtatgttaatgactctgccctttggcatcttctagttagtttctttcttatttgtactgattttggttatttcatcaaagccatgaactgttaatttttaaagacggttaaaaaatgaagaaattggtaaaggatttacttgttcatatgtaaatatatgtaaatttaaacaaataataataataataataataaagaaagcttggagtgagttgtgaatgaatatattacagtgatattgaaggcataataacctaaaaagaagaaagaaatacaataaaaccactcatcttttcacaataatcgaaattctcacaaaaagaaaaaagaatcatataaattggctgaaataatggcagttcttatattgaagtctttcctcattttcaagtgtgaaaaagaatatggatactaataaaaggaaaaaaaatctattttcgtcatgtggtgcatacaaattttggcatggttgtcgatgtcgtgttaagctggcctcatcatttccatgcaactgcatcgatctcgtctctagctgacttgtaaagttcaagccgtttcgctatggttgatctcctttccatgagtgccgggtcctcgtccaacattgcaccgagcctctccttctgcataaacagagtaaagaacttactcaagaatcacagtaggaataaaatgccaaatattactcgtaagcctcgggttctcgatagcaaacaacatctttagggccaaggccaacaaaactcattaggcccttatcataaaaggcagagtacttcaaatagtttctattctatcatgaaaagtaaggtatcttttcctaattgatttgaattgtcttcttaaattatccatcttctaaactcagattacaatggtatacttggattataatacaacaactttatcaacatgataaaattaataaagtaagatatggatactctacctctctcctcccaacttgagcatagaagtgggtaagaagtgatcttttcgcttctcggacttgacagtaaaccacagcctttggaatcgaatgtttcagtgtttcacaaaccatattaatgtaagcactgacatttgatcctgatacataacaattgagtctgtctcagtga

SEQ ID NO: 44379 - DNA, 3094 bp, Cannabis sativa
taaatacattttatatattatatggcaattctacagtgcaccttttaaaatgaatatattgatggatccttatctgttttagcacccgaaataattttttagttaaattttttctcatggtgatatacgctatagttatttaaggcattctgcaaaattttaagaaattttgaaaagtttaacacgccaaaaattacgttcaaactgtgtgttgcacgcttgactatcttattttatacgcatgtaaaataaactgtttgaacattgttttctatgttgtaaattattctaaatttttaaaattttgtaagttatctgaaatagctataactacatgaatataaaaaaaaaaaaattaaactaaaaaattcttgaaaatgtcgaaacaagttaataatatatcaatacatgccttttaaacgtgtacacagtagaatcaccctatattatatattatacaagacatacagaattgatttaaaaaagttataatgtaggagaagaacagtatattgatatataaatataaggtattaattaatctagtaatattattaaatataactgtaacaaaaatataaattttgcttattatttatattgtgtaatatattgtatatataatgctgaaaatatgaaaacgtacagtaatataaagagattaattattagcagcggaggtaaagttaaagtttgagcaagtggtttgggtagcgagaagagaggaactgaaaccgagtctagaagcagccaaatcaatctgaataagattgtcctcaatctgatgccctccaatcacaatagcagttctgtaaacttaataccccaatcaacaaaccgaagaggaccaccatcaacgaatcccaggcacaccacatccttgttaacaaaaaccatggagttggcaccattaatcctccacacaactttctcactttgcaacacaaactcgatcagcggaacaccgggccccgttcgggtgctaacaaagctctttgcactaaagcatgcgctgaaaggagccactgccgcaactctagttacgttgcccacagctttaacaaatgcatcaactacggccttgtgtatggaagtttccaacgaactgtacggaaaaacggtactgatcttcgttcctccttctccttctttgttaatggacaatagggtagtgttcaccggcactgtttttccaccgatcttaatcgattttacaccgatgaagtactcggcagatggttcgctgacaccaaagaaacccccaacaaggtttataggattgcgaatcaatggagtataagtgagtaacttagagacatcaataccaggacccaacatatagggtccgtcaccgaataaaacgacgccgttagctgaggttgaagaggacaagcagagagcgaatttccttggaaaactgaaagctgctgagaactgtaaagggagcgaaagcacgttccatccaagggcggctaagcctttaacgccactggcaaggccttctaagagaagagtaggggcacaactgaagagaaatttcgggatcgaaacgagtcttcctggattggatccatcactggattgtattgaaagggtgtcttgagagaaatagtctgagcttccgaggttgattacggtgtttgtgggactctccatacagttgttagctgtatcacaagatttcaagtctcctaggttgcactgagctgaacggcaacggacaatcttgtaggttgaggacctgtttgcttgatcgcaaacagtccagaggaattcaccgcccaggtcaatgattactttgacctgaattgggggtgttccttgagtaataacggtggtgtattggagagtagaggcatctttgattactggaagtatgagagatttgggtcggaacgatgtcgtttgggctgaagaagaggatattatgatgggaaagagaagagagatgaagagcatgaaatggtacggagaagccatttattgttgattaatggttttttgtgaaagagtgagttgtagtggattcagaaaactgatcagcaaattttatataggcatatgcatgttgctaaataattgaggcaaacttcgtctgcttggggatggacatactttgactatagtgaaataaatgatattttgtttaccatttattagtgtctataatttgactttgaatttcttgtcaagttgtatatgtgttgatttgcttcttatcctttgatcgttattgaatatgtgggtcatgttgttgtccagctaccatgcacaataataagtagttttacttcaccatattaatgggcacgttcttcattttgtattagaagatctatataatgcaaaatagttacttcaaatttcgttaaattaacgacttgtatttcttcatcataatcacgacgtcgcatacgttttccgttgaaagtagaaactcgtgctcatattgtatatatatagccagtttaacatggccgattgttatttaaatggtcaaagtgttaatgtgtaatccaactttttgtataataattaagtaaaagaatagttagataaagaaaacaaaaagtagaatattttattttatttttttatggacgtatattataacatgatatatctttctgtatatgtcgtcgctatttaatgaattttttttttttgttagtttaacaaaatattttaaaaatataaaatattttgttaaatttaagctagtaagataacaaaaacaattataaacatatttccataatcctggttgatgcattaaagaagcatatgttattaaaaattatgacacatacttttcataatactttctgagacttatactaaagttcaatgacttatgcttttcataatatttataatcggttatttttataaatatatataaatattaatattatttattttagattaatttaaatatataaataataatattatttattttaggttaattgaacttatacaatttttaaattaatttaaatatatataaatattaatatattatttgcaatattattatatttttattgttatttttaatattaggagtttgttcaattttaatatttttaaa

SEQ ID NO: 44380 - DNA, 1948 bp, Cannabis sativa
aaaaaaaaaaaaaaaattatttgtcaagcctattctatttgaccaatttttcattggaatataaaaattttatttattaaatatctttttgtagaaaaaaaatatatttattaaatagtaaagagatccttttacttttattctatttagttaaaacaaaaccattcaataataataatattattattatttatttatgcaatgataattattgagttaatatttaataaaaataaacaaataaatatcaataacgtgagcaataaatagacacatccaacccttgtgatcattgacaataatatatatgtatattaggagatgtcgttttcttttatttctttttttttttaattttattttttgtttaaaggagatgtcgttttcaaatagtttgtacatttctatcccaaatacactttaatgggtaaccaatttaaatgcatttgcaatgctatgaacaagtacatagtcaaatattgtatattgttctaatcaatctatcgattatgaaatgcaccatttgctatccccaatgaaaaagaaaataaaagggaaaaaatttccatccattaggtttaagttttttctctaaattcaagttaattaatattcgccaactaagccaatttctgtctatttcctaaattaccttttctatttttcaacacactcccacctctctcttcctctgctctctttctctcgctctcttctcggaccaatggactaccactgatccaacccctaacatcaaatatcttgaactctctcaccaacccatgaccatcacgacatcttagactctctctccaacccacgaccaccgcagctagaccatcgcaatgtggaaggtaagattttacaccctctatttttcattttatttcattatatttttgaattaaaatgtaattgatttaggattaaaatgtatgatgaatctctgtgatttgtgagtttatgttagatttagggttgggtttggtcggatttgtgttttgggcagaaaaaaattggtttttacgccaggtccgatgtaagtccgattcaagcctgatgcctttctgttgtagaattgagtaaaggtcgaagacgtaggtccgatgtaggtccaatagtggcacgatgctacccttttttttttactttttaatgttatagtatgttaattctatttttggcatctttaatgtgacaaaaatattttataatttattatttaaattcgtctgaggtgtttatattggtttctacattttgtgtatctgactattatattaatttatatttggaaggaaaggtataaagggtaagtttggtgactcatcgcttctctatctatctaggtgtgttaatctgatcttgtgtgagttgtctattatgtttgatcacaaaccgaagcaaaactttcattttctatgaaagaaaagttacatttactgctcacgattctgtaggtacagaaatagaaattcctgggcaaattgaagatctatttagggaattttctagtgagttgtggtcttgttcagactgtgtgtgagctgacaataaggtgtatattgattataaatacaccttatagcagctaggtcatgtatctcttttgtacactttgaattgtgttcacatcttaagaaaatagtgtctttattttgtagagaagagagtgtttgtctcttactctgtttatatgtattttgtattatcttgagtttgtattcaagtctgtaaaagaagaagaacaacagtttttggagaaggttttataagctttcgggagattactttttaagtcttgccttaggaggaagcaaggacttcttcagattcgaaagggagtttgagcacttgaagttcagcaagattcgattaggaggtagaatacatcaagcttgtggcatacaataagagggagtctatttatgcataagtcaattacttt

SEQ ID NO: 44381 - DNA, 1534 bp, Cannabis sativa
aattttaatcatttttttcaaaaggaatattaataattattcgttatcatgattattattattattaatattattattattgagagaaagcttttacagaacccgagaaaagactaatgaatgaaagaaagtgtagaactctccttaattggtggtcataatcagttgttaggttaaacaagtttccatgcattttgcatgcataatgtacaaatttacgtatgtgaactgtgtatttataaatattacatgaagaggtaaccataatgatattgaagaaatcttgattaaaagcacttctacaaatgaaagactgctgcaacaaatgctaattgactatagtactataatagacaaaaaaagtaaagaaaaaaagattgaaatgtctctctcaatccttagtccttttactcaaagtaaattttcactgaacccatctctgctacaaaagtaagtaattaaattacatccatgtgaatgtaatgatttcaatatgttttttgtgtctgtgtacgtatgtatgcatttctcctagctaggcgatccaattttactatatagtggtcctcttccttctcttttgaacataaaaatggtaccacattctcagtccttgtctgatgatgaaacatgtccttaaatagtccagtgtttttaacaccataccttataacaagtctgtaatgagacatatatatatatatatatatatatctgtgactcactcccagcccagctagtgcagcagcaatctcagccagatattatatgtcctcaattggccctaactactaggctccactacttctgagtttccagaaatctctttgcagaaattttaatttaattttatcaaccactgttggttgataataaagaacagtcaaagataagtacaaattaataatgtaaaaagtaggagggaaaaaaaaaagaagctgggttcacaaataataataaatattcgagtaagttaattcgtgatattatcacataaaatagatcacatgagattttaaaacttaaaacaataaaaaaatgaaagtttgagttgagtagaaagaacatatacatgacttgcaagtccatcttcattgtcaccatcttagttctccaaccaaatatttcattgaagatgaggaacaaattaacaaaattgctctgggaaaactgtatttaataaagaaaaactataaaattgtggtgggactcctaaagggaatagcttaataatttttctcactgatattcttaattttcaccactttgtatgctggcagatatggattaccacatgtatggtgttattatttgcccaacaaagaaaatacacgttcctttggatgcttagccaaaacatttagtacagctaactattatagagatatgaacaatgaaagggagcaaaactttcatgtttttatgttcaatagcttcttccacttcttcaagatgtcatttcgtccctccactacccaccaagttcgtggaactaacttccttgtcctcgtggtgggaagtctccttcattctc

SEQ ID NO: 44382 - DNA, 999 bp, Cannabis sativa
agatgtatctaatatgtaaatagctttactcacgaatcatttgattgctgttttaatagataacaactctctcgaagatctaaatcttgctgccaatgctgacactgatcaacataatactccacaacacgccacaacaacaaaagagtgcaccacagagatcgtgcaaccaaagactaacataatcgaatcttctcccatgatgtgtacactgcaggaagttgtacctactcaacagggtttccccctcgagagcgttgatttagatcagctcgaagttgctgacagtgaagatgatcatactaaagttgaagctgcggcatctggaattgatgacagctgtgcaagttcatgtcaaagaaacttatctcaagagtgccaacttattcaagaactttccactgccatcagaacggccaagaagctgcaattactggatcttagcaaaaatggtttatcaacaaaggctgtagagttgtatgcggcatggtcaagttcgaggccttgtcctgcttataggcatattaaggaccgaacaatacatttgttcacggagggtaagaaatgttgcataagatcctgctgcagaaaggattgactcttttatctgctattgttggaaatggtccaacagttttgttacaactgacctggtgaataaaactagctagcattttctgagttgccattatattgttcttccatgatgcatgttgcactgacacatatgttgctattgtatagataaggcttagtccgattaaatcatagattaattttttttgaattgcagttcgtctgtgtaacagacttataacagtaactagtttgtattccttccatcatgtatattgtataggccttataattattgagattttaatgacatgtttactagcttaaattattctggagtatattttatatttccctccactttcagctagtgtaatggatatctcgctgtacgctcatggctgagcttaatttcaaaatttt

SEQ ID NO: 44383 - DNA, 1189 bp, Cannabis sativa
aaaaaaaaaagaaagaaaaaccataaaatattatttaattcataagagccatattgtgttaattaagccaaatcaatcgagctaattatttcaatcgagatgtactttgtttttttcatttattttgcaaaacatccgtaatggtgtcaaattaatgaaaatatttgctacatacagcgttggtcataatgaacaattgtcgtcgttcggcgaatgttataatagataactcattgtcgttagcttgtcatgtcatacattgaaatttatgttagtacgacgctaaagttgaacttaaacgctctttgtaatatatgaaaaaaaattgtcaccgcacttttgatcataatagatttggtttgttattttatgtagttcttcttataccttagtcattctttataatgagtttgaaatgtattttcgtgttcggctaatactcttcataaattgacatgatttatgagtcgttcttcattaaaattagttctataactaaatgttttcgttcattgtcgtttatgtaatgtaatgtcatgcttattacataatcaccctactcttcataaatcgacgataataattcttataatgcaactttgtttgttgtttttagtacttctttaatttagataattctttatcaagaataagaattgtttctcctttgcaacaaaacttcttcgctataatgtgttttttcgtgtcgtagcaacgcgagaagcaatggtggaaaaagatgcaaggactaatggaaactcaatgaagctatattactaagcaattttgtaagagtgattaggagatgaacactttcaaataattataagagtaatatgctaatcattcgcaaagctcctggtggtgggtgatatgcaccaataataacaatgcttttattttagtttatagtgactataagtttatacaagactgaaaatgatttaattatagcatagcaccacacccaaaaatagcctatccccaattttcacgtcaataaataaatactacctagtcttttcttttcctatctaactaacttgttttatatatagatttgatcacattaaaacatcatttattaaatggcaatttttactaatataccaaattaacattttaatcttacacttaccgaaaaaaacaaaaataccatatatacgtatatccctaccgaaatttagga

SEQ ID NO: 44384 - DNA, 1749 bp, Cannabis sativa
  modified_base (1688)..(1700): a, c, t, g, unknown or other
tatctactgtattttgaattgtgtttgaattgctattgtctatagttttttgggtaactattttataacagggatctctaggacacctttttactgttgttataatgtccgttttcagtcttttattatagtcaagtttttaatattctcacaatttttaataattaattaatataatagtattaatctagtttacaaaatcacacacgtggcgtccttatagaatagggcgttacaaatatattttattttcttgtaaaatattattacaataattttattttaaaattaaactttattatagttactaattaatttttgcaattagcttttttttaaaaggattttttcaattagtttactaagcaaagttattttatatatggttgaaaagaattccattcatatttttgcaattaatagttgcaccattttaatgtagcatagagctagaacttttttttgcattgtgaggttttctataccatggttttttttggctttgatgcctctaaaggctttcgtgcctgtaattatagcttgttcttattatttagggtagttttatgatatagtctatgttaatatgggatgaccattaaaagtcttagttaagagaggtgatttattttgtgctcatggcttctacctcaatgacttttagttattaatagataaatattttaagtcttttttattatattataactttgattattttactatctctctttgaaattatttatgattatcattaaattgtgtagtaatagagttttattatattattttgtatgtcgattttattgagaatctataattacatatcaagaatgttcttttatcaagtttattaatatcattattagagggagctataattcatccttcatcattttattttattttgtagatgttttatggactaatcaagatatgttattgcattgaacgtactaattgttgcccttataattgcattgtctaaatttttcaatgagagttttgtcagacgatgcttcacaaccttttgtttgtggtctttgatttgattaaacatatcttttacttaaatgattagtagttctggttggaggagatttacgtctcataaattcattagtgattttaatacaactattaaatatttcactcgttaacaaatatatgttacaaaaagtaatatgataattttaacaaataattttatcttcatccttacaattttaattataacattaaacaacaattctcaccatctatctactttctatgcattggactcttcctcattcttaccaaacacaacctaatagaatatttaaatgcccccaattttctaatgagagatcaaaggcaagccccttgttttatttttatcttctaattctatttttttattttattttattgattgtatatatatttttcattttttatgaaagccaaagaatgaatctgacaataatagtaataagaattggatgaatctgacaataatagtaataagaatgttagaatttaaggataagatgaatgagattccaatacaccctcctcacatttgggcctagaaagtgaaggtataacgaacgatctttaagaagccacaattttgaaacaggtcaaaactagtggcactttgggcttacaacagatcacaagtggctctgataccatgttaggannnnnnnnnnnnntgaatgaggttccatctcaaaacccattggcaatgggaggagtagccca

SEQ ID NO: 44385 - DNA, 1412 bp, Cannabis sativa
tgaagtacgtagaaaatgatataaactgtgtagagttggtgagtgtagaaaaacacttcaaacatctttcttcttactctactcacactggccatccacatcactaaagccactactattgcgatctctcctgctacatttgatacatgaactttgctccattctagtgcctacaacgtacatcaacatgtatatatttagtatctataatttagtatatgtagtactctataatgtggtatattattttattaccttgaacatttgattggttgtgatccaggaagttaagactcctaatgtatggccagcaaataaaaccgtggatagatgaccaagccagatgtgatacttaatactagactctgatgtaagtccaacaagaggcagaagtgaagagcttcttgttactggaaagaaaagaaatgcccagcatatatttcccatatatgcaagtctcaatgatacactcctcagttttgcatgccatctgtagtaataattaattagacaacaattagctataaagttttaataagtatagcatgcatgcatgtatttaaatatttaatataatatataaaatacatttcttctcctggacgtatgttgaggtggccattgaagctgacatataaataagtggtaaaagtccatactaggagaacaacaaacatgaatgcgaaagatagctctactgagctaacaatacccagaggtgctttaacactcactggacttctccacgaggccaaacgacgaccaatctgatccctgatcattcaaacataataacaattaagtacaaaaataatatacagaaaaattatttttattattgttctagtttaagtttagtaataatctctactgtacattggtgatttcttgtggagatggagataaacacagctcaatgctgctacgaacattattgggaatgaaaaaagcagaatatttgtccctgcaaattaattaattatgttcattaattagcattaaaaaattaatttagactaaaataatgtgtgatatatgtgtcaaatgaaatgatataaaaaaaaaaataaaaataaaattatgattctatataattaattatattaatttgacacatatttgtatatatttgatgataactatataggactcgtttggtacattatattatattgagtcgtattgtattatattaaattagattatatattgatataatactatgctaaattttaatttaaactaaaatattatagagttaggagcccgttaaattcaatactatatataattttacataaaaatattatataaaatacaatttaatataatattatataaggcgtaccaaacaaaaccacataatttatatatgtataccttgttctctgaagtatgttgttgagttaagt

SEQ ID NO: 44386 - DNA, 2004 bp, Cannabis sativa
acctctttgcatgtcatttcatttatatatattatgatacatacatatacatatacatatatatgaattatatatatatgtcattgatcatcaacttgctccaaatttaagatcaatacaaaaatatcatgtaattaaactaaactaaacagcaagataatctacattaataataattataagaagaagaagaagatgatgatgatatacaatatttaaagataatatatatgtatttatatatatatatatatttatttgaaagaagaagaaagatcagtgagttcaaaccagatttgcttgaataccttgataataacatcatgatattcatctgaattcagagacaaataacatgcaagaagatcttccaaatctttagaagctctaatattattctccacaatcatttccaccattgattctctaaaatccttttgaggatcaaacgatgacttaacaatggcaaaactctcagaaaggcttcttttcttcttcatcatcttcattctctcttcattcgacacgcttttccggccaccgccgccgccgcctgaaatccttttcccgacgattctcggggaatgaattcgaagcttaactcctggagaataagaagaattactattcctgtgttgtttcttcttggatttggttataatgggagggagttctagttcaggaaatgaatcaaacacttggtgttcatcattattattattattattatgacccaaataacaaagagaagctttatctacatctataacgacatcgttttcatcaaaagtagtgagaatccggtcacatctgaattcagggtcatctacaatctgtttgggtttggcgaaaacggattcgattttggctttacaactcaaaccagaggaagaaactgaggaattggtgaagttattaggagatggtgatggtgatgatgatgattttgttgttgtgggttttcttctcctgttaattctgtgtttggatgtttttcttggtgaggaagagtatgatgatttctcctcttcttcattgttgagatctcttgtaaaatagtaagattttcttgaagggcaatattggtattgttgttgttgttggttgggtttgttcttcttcttcttgttgttgtgtttttggttaatggaaaacgacaacttatttgttgtcgttgaagaagaagaagaagaagaaggtggtgatggtgatggtggtggtggtttcttcttttggttttggtttctgggtttgttgtttatgtctttgagtttgtaaaaccaagcattaggtatcatatctgatagcctaaacttgtaattccccattattacaaatactttcaaaacaactcaagagtgaaagagagtaatatagaatatcatatcatgtctatcactttttatgggtttaggctttagtggtgggataaatagatgagggtaaggggtgaaagaaaaagaaagagtttttggagtgtgatggtgtgtgggacccacaaaagagaaaaaaagtttaggtaataaaggaaagaaagaggttaattaagttgggtaatcatcaacttaattaatcaacctaaccacaacaattaactttttagaagaaaagggttaatattgtttagcaaaaatatgctaatgctattaggaatttaggaatgggaaacttccttcttcccctaatgtatatgaaagctttggcttttcataagcttattaattgattttggttgcttaattattgaaacattttcataggagcactaggtactactttgtatatggttgcttttatcattttgataattttttagtcgcaatatatatattttttaattaaattataattaaaatatagtatttagatataagttatcactaattttattttagtcaattaaatattttgactaaaagcacatttagtcacaataaattgtaatttttataactaatatttgtaactacatattttttacacaatataaaaataataatttat

SEQ ID NO: 44387 - DNA, 2070 bp, Cannabis sativa
acagcaatgcctaacataaacttaggtaactcttgatttaaaaatgttgccctagctgattcttcttcttcttcctcctccttctttccatttccatttgaatcttttgccattgtgtaactgtgatgattagagttctttctacctgttgtacctgaaaaaatagaacgagaagaagaagaaggagaagaagttgaagttgaaggttggctcatgatttcggagtcgaccgaaacaacacttgattcgccatcaaagctgtttaatctgttggagaaaggaaagtagggtatataatttgatgaagaccctaacagagaccttgatgatgaggatgtggtggctggctcggtctccggagacggcggaggtggcggcggcgacggcggtggtggagaagtacttgattggacagaggaggaaaaccctagctcgatggtaacctgatctggattatcatcattaacaacagcgttttgacgttgctccggcgttgactgtatggtgtggttgactttgttctgtctattgaagttgccggataaaaacaaccagattccgacaactttggcatacaaaagatttgttgtattaatatttttttcttcggccgcctgttcactgatcatctcctcttgatctttgtcgaaaccctagctagaaatgaatcaatataagatatagtcaatgtttttttcgaagagatttttttcgaagagatatatatatacatatatatatatatattaccatcagcgcgtggaatggccttctagagttttgattatttaagattatctttgtaatagggtttaattgggacttaggtatcgatctttgtaacatctaattattactgttgtatgtcttcacacttttctgtctagaatatatggtaaaaattttaattaattaatttttcatttccatttttttttaagattatataatatatatgatgtagtgttattttgtaaaaataaattaataatggtttatggatcgtagttgataattttttttttctaactaatactactttttgtttatattttctcataatctgcattattattattatttatgaatttgaaaatatttattatttttagtgtgattcgaaaaaaatctataaaagatgtatatatggtgggatactgtatatatgtgggatcgtgcagactacaattcactaatttattattattattattattattatttggttcttgattcagtatatataaatataaatatttttgttttggattgatgttttttataataatcaatatatataagtatattactatttacattaatttatatgatattattttataataattatacaaaattacaattatattaatttataattatagctaaactataattttcaatttaattagataattaaataataaaacatagggccttttatggtcttaaaaaaaacgctacataaataatgatttggaaaaggaaattaaattaaggacttaattaaacatgcatattgttttttttttatcagcaaaagtagtatacaaataaattgagtgttataagaatttatttttctttccaaatatataaacattatttacatattttctttttaaaatatgatcacatattcatctgaaaactataatataataacctacatatcattttattggtaggtttttgtgaaggaataataattaggatttttgtttattaaattttgacatgtatcaaatattaatcatgctctcagaatttttctagccgttaaaattttttcttgaaccattaaaactgttacatttgaagagatttttgtccaattgcatttaattttacgtaatttagtgattgtttatatattaaattatactctcaaattttaatatctaccaaatcatgttactcaaattttaatatgtattaaattatgtttctaaatttttatctatattacactttttttattaaaattacaccaaaattattaaatttaacaatttaaatatatagtttagcaaattttttaaccattatcattagagaaatgctaaaggg

SEQ ID NO: 44388 - DNA, 1587 bp, Cannabis sativa
cagaaaagagaataaggcaatttgtttaggcatttcgggcaagttggataagaagtaaaatggataaaacaacgagctagaactatcatttttttttttgatcgaagtgtattacatatacatttttgagttacacaagctgggatccgatcccagaaccccactacacatgcacccccaataaccttctattggcactgagctagcctcaagtggtaaatggaactatcatcagaaagccactatatggacatagtttataaaacaaaaataactcgacgactgaaaaagatcgaaattttaaagaataaataggatgtccccacgaactataaatcttttagttatagagttttgccccgaactataaaaattcgttgtaaatcttatagtcatttatttagttttaaaatgatacattggatactttttctttcagaacaaagaagtaaaagaataaggacactattttagttaggtgtgttcttgtttacctatcgaaagatgcaagaatgttagcaacgggaggtttaaatagattcgaaccgcaagaacttccattttgaaacagcattgcaacgccttgagaagaaagaactgcaccagcatctgcagacactaacttatctgcacagctcttaacaacattttcaggtgcaaacaagagaaccatagagttgccaaggtttagaagcctgaaaatatcgaaatctccaaatgaattgcagctagaatgataatgcattgcaaattactaatccaaaaacagtacatgaaagaattaccttgcagataaagggaggcctccccgagcgcttatgataggtccagacaaggcagccaatgcttctttagttccatccttatccgagaaagctttaccgcacataacaagcaacgaatgctcgatatcaccaactataaatccatcctcacttccttgagttccaagaccaatactttctgcaacacctgcactgcatgtttcgaaaagaaaacaaagaaatgattaaaaatggtatctttggagtaaaagagtgggagttaacattgagcataccctatagaagtagcaacataaactgttataggacaagagtcatgagaaactgcacgggacaaagtctgccaaagaacattagaaagtgataacgcagcagtaggactctcgcttatcacacgaacttttgcatcaaatttcggtgatgaaccaatggttccatcatgaacaaaaacatttgagatggatgatatgtgagttgtgacctagcagaaaaccagagaacagaaagtataatggtaagcaaagctctttgttgggatagattggacatgctaatattaccaaagaaaatgatgataacaacagcaacaaaagcagttcagatagcttttcagagaccaaaaaataacttaaatataagggaagagtaaaaatgtcttgctagactataatatgtgctactaatatttgaacaggcagtacatctccaaatcctatacacaagttgataggcctccattgctaggaggaacaagggaagttatggtaaggcagcagcaggggaatagaaagttagctgagta

SEQ ID NO: 44389 - DNA, 1612 bp, Cannabis sativa
tctttattttcccatatttttgtaaatagccctatattatatatccctgtaaaaaaaaattagggttgcaatttatcaaaatattaaaaagtattttttctttcccagaaatagcttaaatgtgaaaagaaaaatagtatttttttccttcactttacatttttttatatttttttttttatttttatacaagctgatctataatatttaaaataaataaaaaaagcaacaaaataaaaaaaagcattgtctaatattacaccatcatcatcatcttctattcttgtcacatttaattttttttttttcctactgttaacaaaaaaattccccaataaaaaaacaacaaaaaatatggcaaaaagcataccctaaaatttttaatattattcttaggcactataactaaaatccttgctataatatctgtcttctggataataaacagcattcacaatattacccccaaattttcttccattcaatacattcctcgcattcgcgcaacccgtggtatccgcatattccaagaacacctgcaaatgatcaaaccccattaaaacccgaagaagattttcagtttcggagaatattgtacagctgatgatgtttcaatatacctttccgacacctgaggttggctctccgctctgactactcggccgaggaatgatgacattcaccacagttcctaacaaaattcaatccgttcagagacaagtctcaagacaaaacaattcaagttgtatttgaatatatcaaagtagtaaacaagacaagacgttcataacttaaagatatttgtggcgaaacccctcaatatttgtaattgttaaatatatgaccctcataaaaaaaaatgacgatataagtatcttacgattttgtttcagtcgtaccaaaaaaggatacgtctgcaacaaaatcgtaagataaaatacttttgcgaccatttttttttattaagatcatgtgtaacagttataaatgttaagagggtttcgccgcaaatatccccataatttatagaggccacaaaagtgatgtattgatatgtacacacatattatacacaaatttgatacacaatcctaaatgaaaatataattggttgaatttattttcttttagtcatgtgtaatttgtatatacatatcgtgttactgttacaaaattatattaagatatataaacatgtgtgcatccatgaagtttcaatgttttcttctataatttgttatgagtgtcagtctataaagcataaatatatacataccaaatttgccacattcatccttcatatcctctaaaatttcttcatattcttcatcgttcgccagttgatcagcactaattgcctgaatggaatggaacaaattgtaccaagaatcagcgatcggaccattttcacttacgaaaaccaatctaataacaacccgtacaaacagagtgcataactattgaatcatcgaaactattcagctttgtaaaatacctcggtgagacataaaatcttagttggactttctccatttcctccaaagcccatcccgcctacaggaagtcttacaccaccagcttgcagtgccattttctgtatagcttaaaattt

SEQ ID NO: 44390 - DNA, 2112 bp, Cannabis sativa
ttccatatgttactcaaacagttattgtgtttctcattttcttgtttttatgagtctaaaaaataaacaaaatggaaagataaatatggaattcattacttttataaaatggtggtgaaattttaggaaagttattgtaatgaatattcgttatttaatcataggcatctctcttactgctctattcccttttgcacaattctatatttatgtgtgtgtattacaatggattgttgagtcaatttggtttgatttgttaatgttatatggctaacttgttcttccaggcaaatgagtcagatgaagtgcttgtaaaagcttctgtactagcggaattacaacgtcgtgttcttaaggctgaggctgctttgcgggaaaaggaagaggagaacgacatacttcaccagcgtctccaacagtatgagagtcggtggtcagagtatgagttgaaaatgaaatccatggaagaagtatggcagaaacaaatgagatccctacaatcaagtctctccattgctaagaagagtttagcaattgatgattcagcaagaagctcagatgcctcagtcaacgctagtgatgatcgagagtgcagctgggacactggtagtaatcataagggccaagagagcaatgggctgagaccaatgagtgcaggtttaagtgttataagtcgcttggctgaagaattcgagcaaaggagccaagtctttggagacgatgccaagttcttggtggaggttaaatctggtcaggttgatgcaagtctaaatccggataaagaactcagaaggttgaagcaaatgtttgaagcttggaagaaagattatgggtcaagactgagagaaacaaaggtcattctgcacaagcttggcaacgatgaaggtgctattgaccgggtgaaaaagaagtggtggacaaggaggaacagcactaggatgagttgaaacagaataatgtaattcgaatacagtggttgctaattatatagtagtcctttggcagtttctacatctggaaaatgaggtctctttcattaagaaaggtgagggccaaagagattaaaatgaaggtatactgcaaggatcaccagatttattatctgtaattgggttagttctcatattgtttttgctagccccttctgtttatggccacggtttgttgtgacgagttttgttattgctacaaacaaatatggtgcactacagagggtaccctattctaatatgtatatcatttttaatttatagtgcgagatctaaatcatcgatgagtaatttgttcgctgtaataatatcacagcgcagtggaagtttaatgccatcgaatgcttcaaatcatttgccatggttgatgaaaaagtctgtttttcatttctgatttgcataggggccataagggtagatcgatgctattaaggtgtgtttttattgttattaaggtgtcatactatgggattttggaattacatatatattttaattctttttgatataagcgtttatatattatacaatgcataacttgggactcgaacccacgacctctaacacacacattctcctatggccagtgataatttatttctaatgaatacttctcgctctattaagattattgacaaaaataaaatctgatgtctaggaaataggaacaggagaggaagacaatatattgagattttcatgttagttgcggaaagaaaatgaatttaagggtgtacaattaatggggtttatattttttttaggaattttttcatgtatatattaaaatggtaaaaatattacaaaaatatattgtacagaccttataaacatttatacagtctaacaataaaaatttacaaaaatatttcttgttctaatcattcagccttactaaccaccttcttcaacaacaataatttccagtaaccagaccagcatgccaatcgaaaagaaaccgagttagatggagaatcaccataaattctggcgatttcacctgagatgaagaccggaagaaatccaaacacatacaatttcagatttatgcaaaattaggcagaaaaactggtttgaaactaaaatttaaccataaatgacgattaaaatcgcagaaaactaa

SEQ ID NO: 44391 - DNA, 2368 bp, Cannabis sativa
ataacaattgccccttaaaaaaaatttttaaataaaaagaaatttttaaatattacaagggtatatttgtcttaactcaattttaaaacttgcatgcttttgaattttggcggttcatgatttcgaggcacatcattagcattaattgcccatcttttccaattctctcttgttcttagccgttggatctttacttttttaatctaacagtgatcatccttaaagtataaaacttgagagtaaatcaccatttctaccctcaaaatctttgagcttttctgcaataaacccttttttttctgatttctcaaaatcttgcatgccctctttgtcattgacttacttcatggtgaatttcttcagatttcgtcttcaatctaagaagttctcagggttcatttagtcattcctttcatcctcggttacaatgttcttccttgtgcaaacgttcatctctaacgagtaagttgttcattcttttcttccctggtatatattttttttataactaattgcatcattgttctcttcgcttggttttagtaatttcgaaatttttaaccagagagaaagaaaaactatacagtcagtgagtaatttctagggtaatgtcttaaaactatacaatcagtgagttatgaatatactctattaattctatatttgaagagtcattcctctttgcattaaaatgatataacgttattataccaagtggttcatattccgctaattgacacgtgtcaccctctaaagtgtagctaaattttaggagcaatttctccttaaaaagttctttatcaataaagagagctttttaaatcatttaaaagggtacttttgtcttaacccaatttaaaaaattgcatgctttgaattttagcgattcatgatttcgagacacatcattagcattaattgtccatcttttccaattctctcttgttcctaaccgttagatttttacttttttgatctaacggtgatcaacttaaaagtataaaacttgagagaaaatcacaatttctctatttctgccttcaaaaccttcgaacttttctgcgaaaaaccttttttctaatttctcaaaatcttgaataccctctttgtcgttgacttattttctgcaaatttcttcacatttaatctttaaccttagaagttctcaggtttcatttagtcattcatctcaaccccagttacaaagttcctccttgtgcaaacgtccatctctaaccagtaagttattcattttttttctttaccggtatatattatatttttttataactaattgcatcattgttctctttgcttggttttagtaatttcgatttaatttttggtctagggttttaattagagagaaacttaggtttatcattgttcataagtttctggttttaaaaaatttcttcgagaaattggggttcttcttttgcgaaaatgtcccaatctggttttgaaatttattctccagaattcttagaaataaaatgtcctaaggaattggccctcccattcaaacccaaaattcaaaaacctcaatccaaacttgagataaatgatgcaaagattagggaccatttaacaaaaaccaatcatgatgaagttgctagtcgctataggcattttctacaagagataactgagagaaaatatcgttacttacgagatgcagcctggcctgaacctcaattatatatatataaataaataataatatatattaatattaaagagaaaagtacgagaaaaacaataatactacctaaagatggcgggggtggtggtctggcaaagtctcaggcggtggagatcagtagtggtagtccgacattagagagggtcggacgatgaagaaggtccgacaataaattttaggtttcagttttctttggatatggaggatgaagaagatggtatggtgatatggagaggggatttgatattttttttagatgaaaaagatgaagaaagtgataaggtgatagggtgttttttttagaagaagggtttcaaaaatgagaaaatgaaaataagagtaatttgatggggttaggggctcgagcatcctttttttttcacccaatacattgccagtggcaaccactgacgacattgtcgtcaatggttcactgaccttgcagtgtgtcaatcaaccactaatgacaatgtcgtcagtggttgtcggtggcaatgtatttggtgaaaattccagcctcatttcaacggttacaattaaaaaaaaaacaattcctgttaattccatttttagtatatttaattgataaaaatattttattatttattgtatatttcggctggtatgtttaattttgtttccctattgtgtgcatccaaactt

SEQ ID NO: 44392 - DNA, 3555 bp, Cannabis sativa
ttcgagtcccaagtaaaacatgatgtaatatataaacgcttgaatcaaaaaaaaaaactggtgaaatattctctttaaattattaagattgttaaatttaaatttttttggtcaattcatttaactttactaatttagtaattgtttatgtattaaattatgctcccatatttattaaatcatacccctcgaactttgacatgtctcataattatcaaatcatacctctcgaactttaacatgtatcaaattatgttctctgaactttcatccatattagactttcttaaattagacgagaatactcaaattcaacaatatcaatagttcgagagatttttaacgattttaaaagttcaagaagtataatttagtatgtgtcaagaggcaaaaaccctaatttacttaaaataatttataataaaaaaatagaatttaaactatttattttacacacacgtataaaataaaaacaataaaaatacacatacaatataaactatttgaattatgtttttagaacgttaaaattttataaatttctcacaaatttacagaatatctaaaataactatattttacacaaaataactaccccttgcacactatagaatgtccctacaattacatatcattatttgctaacaaataatttatgaaaataaataaataagatggacgtacaactgttaatttagtctgtcattaagattaaattatctcatacaagaggtgagttcatacaaagtcagtcacatgacaatgtgacagtatattattgcttgattatttcttcaacaaattcaacatagtaaattttgaggcttagaattagaagatatcatcatcaacatagatcagaattggtgttaatatgggttgaatgcctttgaacaagaagttgaattagaggatgttcaacatcatcatcaacatccaaattcatgtctctcctaactctaatattttcagtccttgtcacaacaacaacctcttctttccgagttgacagctcgttcgctaccaccatatccatcttgtacttttcaagagctgcagctgccttcttcaacagaatctttgaatctgtctccaactgtttcaacaaaacacaatcacagacagaatcttttgtttttattcaacaacagagagaggatgttaaggttagtgttaccttgaatgaaatgagaaaagcctttggagcccagtgttgtcttaacacaggtaacatctttggcacttgagcaagttgcatgttcaatggcccagatgctgattcaatcttatgttctgcctaagaaattcaacactcaactcaactaattctctctatttataacaaggaaaatcttcaagagtaaaagaataaatccctggtgatgatgatggtgaccaaatacaattgttaggcactaggatttagtatggtgtgctagcatataataataaataaaaagggtctatgagtctttatttgggagggtagttttaagtgagaaattactataatatataggagagcaaagttagaaaagagatatgcgatgtattgagtgaaatctctatttgcatcaaagggacctaaggactcccatcagtttgtaattgggttttctcatactatttatttactggttttgtttaagtttggagtactcggatttcatcagaaattgttgttcacaaaaacaaaatatcatatgaagtggacaccaccatcaccatatggatatggttttaagagattgttgctaaccatggtttgccaaggaacatagaagtcagaaacagcagcagctagataaaacattgcatttggtccatgtttgttgaaagatattgcaatcatcctcaacatctgaccaattaattaatcacaaagtaaagtagacttataagttcttcttcttcttcagaacagactaaaaacaaagaaagaagccatcatgaatgaatctaacctgaagatactcaaatatggttgtgaaaggaagcttcaacaagaagccatttttcacagcctgcaattattatatatatatgtaatcattcataacattgagtaatattcactcttctcttttgcagaactgaaatgtaacaaccaagaaagtaagaaaatgaatgaatgaatgaattagagataaatacagaatgatggtcagcaatggccctttttactgcttcagaatatgagtcctgtactgaagaaacatgaaaccaactcattctcagtgtcagaacagaagagaagactctcctaaaactaaaattaaagagttgtttcggtaaccttttttgacatttagtagagttttcttttttttatgatcgcgtatgttatagccgtttaagattacctttcgaatagtatacataaatagctacaaattaggtgtctgccaaaagatactacacctccctaaataattgtttcggtgtattttctatctgttgcagcattccagatagattttagattaaaaaactttcttgaataccgaaacaaaaccaccactttttttttattgaaagcaatgaataaaatcattgaaaaatataataacgttatacaagctagttatgatcatgttcatgttcatggctgtgtactatagatatttccaaatctttatatacaaaaaaaaaagagtacctttgatgtgtgattcatcatcagttaactgaaaacactgtaacaaaggatcatctggaagagaacaacaaaagggttggaaggttcccctgaaatgaacaaaccaaaccaaattcaattgaaacaattgaagagaagagaatgaatttgagaatgagatgggtatttattagtattcactaccttctatagagaaagataaccgaatatccagccttaataaagtacctgaaatgaataataatgaataataataataataataatgaaaatataagagaatagagttgaatagaattactcagtggatgttgctcctctgtggcctgagctgaaattatcaatgtagcgaacacaacgttgttccaagggaacagtggttccacctgatgtaacacacacaatccttcttcttcttcttcttcctccatttatgttcatctcattgaaacactctagctttgcattgatatcattaccattgttccttaaaggaggagctgaattgaaaaatgattggatttctccatctccatcttcttcctcaattatgttgcctttgtccattgcaaattcagaaaccatgaaattcatcaaacagacagacagagaatgaatgaatgaatgaatgaatgatgagaaagcccaattccaaatctaagcccaaataatcagcctggcccaaattatacatattcaaaaataaaatattcatcattaaaaaattagtaatttgggttctgctaataatacttaatttataattctaaaatttttgtaggtatttaacagttaagtgttcagtaaattgtcatgtgtcaatccttaatcagtcaaggtcattaaatttttgttttaaaaaaatttgtttaaatatatcaataagagaatgacac

SEQ ID NO: 44393 - DNA, 2103 bp, Cannabis sativa
atagaaaaaaaaattatttttggcctttatttataaaaaaatgtaatattttttaaaattagtaaaaaaaattgtataattttaaaagagaaagtattttttttgaacccctgtactagttgggccctaagcacagacctaacccacctatgctcaggccaggaaagagctgtaatgacagagtaaatcatgtggctctaacaggcctcttaatcaaaaaaaaaatcatgtgtttggtagggaggaaatagacagaaagaaaggaaagatgaaaggatcccttctcctctcaaatgtacaaaatccaatttttccgaaaatgaaaggaaaagaaaaaataacaaaagaaagtatataaatgtcctaataccgttcttaaaaattgaataatctttttgaagaagacactgtaataattttaataaataattatttttctatcattccatatttatttttaataccaaataatatgaaaaagacattgatcataccctctatcttttcgaaattctctttttttttttattctttctcatcaaacacaatgagtaatgtgtaataataacagcaattaaggcaaagtactaacctaaaaccaaatgtaattaagcaatgaatcgaatcaattaatccatttttttgaaaaggaatttcattagaaattattaagagtgccttttatatattcctctagatgagctggagtagaataccttatatatcacgagcaatggagatggatttgacagaataattaatacccactattagaataatggtgtgtaaaataattattaattagaatggcgtacgtctcattgatttttagtctttataattatattttgttattaataaattttaaattaacataaaatattctaatttaatttatatcaaactaaactacaaatatctaacagtctacttaaaaaaatcttggaggttgatctttgaagagtctagaaggttctgtaaattttattcatatttatttgaacaacacaaacatttgatttttctataaataaataattttaaaaaaattcattcatatatattatatttatatctgtaagtacctgtctagaggattgatactcaacaagcgagaataaggtctagggcttcgggaaaattgatcaaaatattttcattcactgtgttattatgttcaatattgtattcccgagaccgagagtaagaatcgtctccaaaagaatgtctaccgttggtgataataaaaaataaaatgcacccgaaactaaacgtatttcttttgattgtttccgcatcatcatttgttttccaactaaatttattacaatctaacataatggttaattatagtttctcagttagtacaatgaatatacatatatataactttattataaagtgatttataaatattacaacaaattaattacctaatgaaaaatattcactagttttagtcatacaagtgtttttggccaattctgctctaagaataccatttacttcttttcgaaccaaaatatttgatggagtaagattcaaataaacttttcccaagtgaaaatcaataagttcctcaattatatccctataaatataaatatataaatatgttaataataaatatttttaaattcatcaaattaattatatttttttcatacacagttctagcaccaaaataaataagaagtataaaataaattataaaaatttatattttaataatattttattttcattttttatccaaacacgaagtcgaacatattgtaaagtattaagtaataacagaaatgaacaaaaattaatattaagtatattagctgctgaaaaaaataataattagtacatatataaacctaaaatattatgctctcaggcagttactttccttaacggtttttccatctttttcctggtttttcttgcagttttcatagccaacttcaccatatcaattcaattctccattcctaatcatcaatctctatctgtatcatggatccattaacacataaaatgaaaggcattatcaatttagatgaagatgaggaatctgtacttgcttttgaagatgacgagtctcccaatttggaa

SEQ ID NO: 44394 - DNA, 1380 bp, Cannabis sativa
tttagttttattgagaaaactaaaaatatcaaacagtattttttaaaagcggccttaaagaatcatttcaagagaaaaatactttgtcaaaaaaaaattactacaaaactaattaagatacattatgaaaaatatggtaatttttcattaatataattatgataattttcaaatggtagtttattcttaaattacctacttacgtaattaactacttcctagtacaaatattcattatccacaaaactaatagtaataaaattgttattttatataagttttcccaactaaaataatccaataacttagccaaatctaaaactagaaaggaaagctaaaactaaaaatatgggaatgaaaaaaagtgaagactaatatttgaatgaagagaatttgccccaaatcataattcataaaacaaaatggattttgtattataaaactcataaatcactctctcacacattaccaacgttaatatgtggtaatggttaaaattggcaattttctattttcttttttaaataaaaatattcatttaatatactatctttccaaaaaaataggtagaattaaaaatataaattataaaataatataaaggataattgtttaaatatttattattataaaatatatatatatgggaagaatcttttctacgtattttatacaaaagatcgttgtttaaatatttattgtaaaatatatattaaaagaataacagatagtgaactttaagtggaatcctaataaaactaggtgtgaaatacaaattaatattaagaacaaatattccattcattatctctgttaggctttatattttacttcttccccttaatctttacaataaacttcaccaacaaaagtaaaaatgtcttccacgagttctttgaagaaaacaaaaaggtgtacaagttcttcaaaaatagattttagatcaaaaaaatacggtacttatgataataataacgatgagagtggaatagttaggtatacttctctcaaagatttgttgccacccaaatctgctcgcaatagaagttatcttcatctcaatactttttctcctcgttcctattcacattcacattctcattctcacggtgatacagaattatcatttttggaagacgatgttaatggttgcttcaagtgtttggaaggactcggcaatctattcaatgctctaatatacaagtattttctatgatatttacatttttaatttagtttagttctgttaaattaatctttttattttatgtttctttaggagccttcttcttcattggaaaatattcaatttactaatcaagcaatagatttaggtttagttttagtgttgacttgtttgatgtatgtattttttttttt

SEQ ID NO: 44395 - DNA, 1517 bp, Cannabis sativa
tgtgtaagacagttagagatatagattataaaggtaaactaccatccaaatgtacaagagaaataagggaaggagaaggtgttaaaatgcagcaatattttattggcaagcattctaaaaacccttcctttttctatgctatgcaacctgatgctgatggtcaaataacaaatgtcttttgggctgatgcaaagatggtgatggactatggtgattttggtgatgttgtttgcttcaatacgagttacaaactacataaagactgcagaccttttgcaccttttattggaataaatcatcataaacaaatagtgatatttggtgctgcacttttgtatgatgaaacacttgaatcatacaagtggctttttagaactttcttagaggctatgtcaggtaagaaaccaaagactatcctcactgatcaagatgtggtaatggctgaggcaatcaatacagtgttggtaggagcacatcatagatcttgtctgtggcatctataccaaaatggagtcaaacaacttggttacatgtttgcagggtcaagttcttttattaatgatttaagccgttgcttttttgatcaggaagaggaagaagatttcattaatgcatggaaggctatgttggatctgtacggtctatgggaaaatgattggttacatcagatatatgaaaacagagaaaaatgggccataccatatagaaggcatattttctctgctgacatggaacgttcattacaattcgaaacttttactacaagcttgagaaagtacttgaatcccgattcggatgtcattcccttgttaaagcatctagctaaattagtgaatgattttcactacaaagaattggaagctaactatgatatgagccaacaccctccaaaattaatgggggatgtaatttttttgaagcatgcaagggatttctacactccatctgtatttgaattgttccagcatgaatatgagacatgtctaaatatggttgtgaaccgatgcacgaacagtgaggcgctattccagtacagagttagtctatatgggcaacagagggagtacacagttacttttgattcagcggatgacacgatttgctgcaattgtatgaagtttgagtgtgttggagttttgtgcagccatgcaatgaaagtgctcgactataggaacataaagcttcttccaaccaagtacatcttgaagagatggacaaaagatgcaagagtctgaaactgagttagttggctacttatagcatgagaagactatctcatacttcttggatgtaacagtaacttataattagatatagttgctggatttggagtaacagcagattttgttcaaacaatatgtgaagaaaataataggaacaagcaaacactgtacataaaatcagagcattgtataaagaatgtttcttttcttttctcaactattgtatttttatttagttatacttttggttgtgtttcaaacattatttcaacagttgatttgaggaaaaagttg

SEQ ID NO: 44396 - DNA, 2036 bp, Cannabis sativa
gagcttaagggtcataagagaagaatgcttacatcatttgagaatataaaagccaaactcatctatttgtaagaaatgttttctggcatagtattggagtaggaatctttctttaaattcctctagctgtgtagttaagctcctcttaaattgttcagaacttgaccttttttttcccttctactaatcttattcattatgtatgtgttggaggtttatcaagtatcacaagcatcaacctgcatttgcatgattctccagtatattagcctacatgtgaaaggaggattttaaatacaaatctcaaataactcaaagatttaaactttaagctggatgatcgaaccatgattatggttgattaagactaatgaggaagcaaatatggggaaaaggggatttcatgtacaactgaaaaatggcagatgcaacttagtcgagagttgagatgttttatatatgtatatataaacacaaacatataatgtatgaacacatattttcaaggcaatattgtatcgttacatgttaaacttatatgatatgtcacaaatggtggattttcagattagagggatgtcattcatatttgagatgaaccctgctcgtgtgaaaatgtatctggatagcataaagactacccaaatccaagagggccaattatagtatactggaggtgcaaggaatggaatttctcatcagaaggtgctcttttttaacttttctaactgccctttctgggtaatgtaagtatgcttttcaatatgtaactagtctactgatgttaagtgagaacttattcctttcccaccttgagtcgagggaaacaaaagaaagaaagaaaaatatatcaaggcaatatcttcacattttttttattccaatcattcatgaattaatgaatatcttcatatccagaagttattgttattgatgaaagacgtagattgaacaagaccggctgttacatggtcttatccagaatttcgagcatggatgtggttgtgcaacatccaattccaaatcaataaactcattattttcatcctgatatgtaaattaattttactttttactttttaaattgagaattaaaattttaaaaacaaaaaaaaatcactttcaaaatttatttaaacaatttttttaatcaatattttaaattccaatcccaacataaaccttggaacccagacctggacccaaatcccgacttgggctcggaccctgtacttgaaccccagacttggatcccgaccttgaacctgaacccctgactcagactcaagaccccgaacctgaaccccaaactcaaaattggaccccaactcggactcagactcggacctcgacccggacgcaggaccttagaccctaaccacagacccaaaccccaaactcggacctcgacccaaacctcaaatctggacctcgaccccaacccagaccttggaacgagaccacgaccctggacttggaccccaatcctgacctcaaacccaaactcatacctggaccccagacccaaactcgaacccgaaccccatacccgaaccccgaccttaatcttggacctgaatcttagatctggactcgaaccccagccttggtcccataccccaaaccctgaacccggaccctggacccaaaccttggacccagaccaggacccaggccccaaccctggaccccataccccagaccccgaccctggacccaaacccgaaccccaaccccaaatcctgacctcagaccttggacccaaacctgaccccaaccttggacttgaactcggacgacaaactcaaattccgacccagacccaaactcgtacctagaccacgacctagaccctagaccctaacttggccttagatccttgatttggacctggccccagaacctgggcctggaccctgttcttgttttagtgatcaaatcaaaaaatacgtagtgaaaaaatgcccaataggtaaaatctacttctactatataaatacaaattgaataagaagatagaaggaaagagattaaac

SEQ ID NO: 44397 - DNA, 2842 bp, Cannabis sativa
agggcataaaacccaacaatcccaacatatgaactgtcttcgtcttcttcaaaaaccttaacatcctaatctgagattcctttccataatcaattgaagatcaatataaactggtatttcttcatttcttgcttggaaatgattctatccactactgatcttcctctaaataatgcaaccgcctccttattcctcttctacattaccatccacttctcttgattgattacctacaaccattaatcccaataataactacaagttagtcatcattcttagtccagtcgactatcgctcagagagctaaagccaatttttatctatattgaaaaattcataaaaatatgagtttaaaatttaaatttgcacaaatattatatatgcttaattccataataaaacttacaaataataaagagaaaattacactatatacttcttttgatttgatgcctttaatttttactctctttaaaaatctattatgtttacctctttttttttatcattctaccaattttacttctatcacttcatgataataattttcattattctctaattaaaattgtccctactttcccacaaacctacaatttgagtacaatactcgtaaaaagaagtatatttaaattaaattttatttgaaggtgaatttaattaatatataaaattatctgtaatgtatgcgcaggttctgatcagccaatcatataccaatcgacaactttaagtagagattaattcaaaacatttaacagtaatgtattctcattagaaagtatcatataaacagttattaatgacaaaaggctggtcaagtacaacagtaacccgtatttaagcaaaaacctgttccccaacccaaaaaaataacaaatttactacgccacacaaaggcctcgtgcaagaggtcaaactgactgaaatcaacctagatacaactgaccccatgcatcaggtgaagatccacccctgccactttcaaaagatcaacagcagaactaaactatttcttttctaagatttctctttcatctgaaaaaagctaaggaaacagcttttggcctccatttcgccaaacaccacgaacaggcaacccaccaccagagttgtcgttcccaaccaacgcctcttctgctgggccttgatcagatttattcagatccaaaagtgccgccgctgaaccatcaccgagcctaactctgaggaatttcgaagttttcttgcgttgcttactcccacttacatcctctgattttccagtaccagttgataccagatccttcaattcctctgattttttattattatttaagaattcctcctgttggtcattgtttgtcagttttgatttgcctttggcagcacgatacccatcttttgataacacctctacatgctcctctaaaggcttgtcgttactttgaagtttcctcacagtgtttataaagtcatccgctattgtagattttgaattatcttcattgtctaaacactttcctttacctttattagaactgttactctctttcatgcgcccatttccaccagaagccatatgattcccgcccttaatattgcttcgaacactagcattgtaggcctcaataagctctttctgtttatgtgcatcgggacacaacctagctaaatcaaggacaagatccaacaggccaaattgcgctacataactaatgtataaatctgagtccattaaaccctgccgatactgtccagatatttccttaaacatagcatacttgtcttcatcatactcaagagcactccgaatcttttccactaaagacttatttgcaatgttaactttctctgatatctgtatcggctgggtacttgttggcaatttacgagtatgtgcagctgcagaaattggaggaaaatctgaaatggaactagaaggctcagtagacccattctgaaccagattaggagcagaagagtgactgatcctaccaaggttacctgcatccctcgttgaactagttgaatgcagtccatgacctgcagtggatcgagtttgggcggaatttgcataagttgatggaccaggtgcattaccagtggacatcttgttctggctaaaactaaccgagtttcccgtagtattcattataggccatgcttgagatgaattattaggcggtacttgaggtccacgattagctgctggccaagcttggcctgaattgagaacagtcactttgtggttgctttgacgccgtagatgagatgccatagtcttatttggtaaaccatctgagttgggtttagattgactggttccaggtgctgttgacagaggaggaaatgcagattcttccaatggttttattaaggagtgctgccccaatgcttgaagatatcgatatgatttttcagaatcagcagcttctaatgattcaaatggctgaatgattgagtctatatcacttgcatctccaataccagtggcagcttgcccactggacaatgttggatcatctaatgtgctgctttctgttatagatgtctccagacttgcctcaatggccaaagaaagttgttcatctgaaaaatcacgacgaaacatccttcctctgccaaatcccttcctcttcctcttcctcctcctctgcggtgatcttgttcgctattttgtcgatatctaaaactcgttggtatctgttacagtttccaaataggacataaaacccaaatttagactatgaaaactgagctgatatagaaaaaacaaatgcacaaaaacctggaagagcctcggtagtaacaagtgatttacaaacacaaaaaaaaaaataccaaatatgattgaaaacac

SEQ ID NO: 44398 - DNA, 2308 bp, Cannabis sativa
taatattttggcatttaacaagaacttaggtactttcttggtcttgagagtgcaaggtcttgtaaaggcatttttgtctctcaaagacattatgcattgccactattggaggatctagggtatttgggttgcaagtctgttaatacccctatggaaattaatttaaagcttagccaagaccgtgatgacaagcttgccgatcctaccctctatagaagaatcattgggaagttacaatacttggttataacaaggcctgacttagcttattctgtcaataaacttagtcagtttcttgcctctcctaggactactcacctcaatgctgctcaaagggtcctccaatatgtgaggggaacacctgggcaggggttgttttaccttgcaagttcggatatcaaactaaaagcctataccgatgctgactgggtatcatgcatcgacaccagaaggtctaccacaggtttttgtgtttttcttggtgattctctcatgtcttggaagagcaagaaacaaccgattgtgtctagatcttctgccgaggctgaatatagagcaatggccaacactacttgtgagttagtttggctgctatctttgctcaaggagttggggattgaacatgaatgccctgccatattgcactgtgataataaggcagcagaacaaatagcagccaatcctgttttccacaagcgtagcaaacatatagaaatcgattgccacattgttagacaaaaggtttaagaggggatgatcaagacatctcacacctccagcaaagagcagattgctgatatctgcactaaggcacttctgcctactcaatttcaagttctcaaagataaaatggggttgtatgacatctacactccaccttaagggggagttttagagtttaaggtgtggtgtacatgtgtcatagttagttaaggggtgttaattctgttggagttagttagtttgtcctaacctcctaaccgattgtactctgttagttccttagcttgagtctgtatatatatgtccattctgttgtaatttattcattgattcaatacacaattctttctcttcatcttctaattgctaaaaactgcttctaatacatgaattaaaaacaattcgaaaaatctaaaaagaacaaacatgcaatatatatatcctctaacaaagaactaaaactattaaaagatgaatgtctattatcaaaagaagatttaattgctaaataatcttattcagcgtgtacaacaaattctattaaggagagaatccaatccatagccacaacaattaccatacattctacttgtataattgaaaaacttttggtaaaaataaaaaataaacaactggtagtaaggaacgacacggtagagtactattaatttttaatcataataactcaaaaagaaaaaaaaaaattaccatggaagttaaaagaagaaagcaatacatgcataatataaaaaaaaataatagaatttttggtaaaaataattttatattgtaattttcggttccataatttaaatctaatcgaaattatgaattaatagaaccactatattctatttgaatcgatttaaaactacaaaagataaaaatagcattgacaacataaaaatagtttcactttgataatggtttcaaaactaataaattgatgtggaataaataatgtacaatgttagtgtcgttattttgtgacagattattttagtacaatgtctagtcatgtctggagtttcagtctgttatatcggcacttgtgtactgttaagtctgttatcgttaggtgttagttagtgccaggtgaactattttgttgggtataaatagtcgagtttattctgtaaacaggttatccagaaaaatcgaaatagttggttaatttagtttttatcgtgggagttagagtcgtatcttgttgtttctacaggtctgattgtatagcttgaagatggtcatctatggcagaaagatcagagcctgaagttactgagttcaaactgaagggagttcagtgtcaacttcgtcatcagatctgaagggatttcaggttgaagaagtgtcgaagtcaaactcagttgctgcacaagggattgtgcacttgcaatcaagattcttaattgttgttggtaattcattgctaaatgctgtaaagtttgtattaaatttctttagagagaactggaaattgtaatacgaaacacttgagaattagttgatgagatcaccctggttcggggaacccaagcactagtcggctgagatgtgttctcagtgcagatgaagcttgtaa

SEQ ID NO: 44399 - DNA, 2593 bp, Cannabis sativa
tcttttgttagaaatatttccaaatttgaacttattgggctatataaatatataaattctggtgtatctttgaaattttcctttttaaatcttttctttgggctaaaatattcattaatgtcatctacttttatgacttagtatttgactttggaaattttagtttccatcatcaagatttcgatattaaagaatttgttaaaattataataataaagagaagaactaattgctgcccaccttcttaaattgagtgaattaggagtgatgacttttcccactaattaatgacttgcagtggacattgcccccttttgaattttctcatttaaataacttgactctgtgaaaagcctaatcccaatcctaatttgattgaatttgatttttcattctgtccacaggtactgcctatctgtgaatgttattgcatttgcatatgccctatttcaaacctatgatctatcataccaccttgcaaccggtaaacacgtgatccgccaccaccttcgtcgtcatttcgagtttttcatggatcaggcaagtagtttacttctatggctgtatgattaacgtacgtgaatctgataggctataagagaggttaaacaatgtacttcatgtcttttttaagcatgtttccatggaccttgatccttgatttcggttcattgctgtttgatccaggctgcatattttagaccaattctaatttaggggttgaacaagggttaatgggtgcatctatttcacacctgtgtctttgtaagaactctagcttgtgagttggtgctggtttctaaaatattggcttaaattgataacaactcttacttcttgtgttgctatccaatttagtattatctgatagtgcaacatttcaagtaacatgaagtaaaataagaagaatttggttagctttctcaagtttggtatgaagttttggtgttgtactgattgctgtcttgttttttttgaacaaacaatgatagatattagcatatcttctgatgtcggcatcatcatcggcagctactcgtgtggatgattggcaatcaaactggggtaaagatgagttcactgagatggcaagtgcttcagtgggaatgtcctttttagcttttggtgcctttgccatcagttccatcatctccggttacaacctttggactgaatgagaactctgatcttatatttgatcttattgcttgtagttttttctcagtttataaatgtggggggaataactaaaatggaatgtggaagaaaatatataatcctttttattgttgtacagaaatagctctaatagtaattttttttttttaaaaaaagaaacattgtaagggtgagatactgaaaagttatgtttgaaattgtaattcgtttctgctatatttttacaaatataccttatagatgtgtacattattttgtacaagcaaagaaaattgatggcattaataaaacaagcaaacataatatttcttttcgagactcatttcataaaacaagaaacaaaccaagtttcaacatagctgtttgaaatgacaaatcactatctcgtaggactagcagtagcaagcgacaacagcaatcagtagaccaatataatccaaaaaaaaaaaaagaacataatcaaacaagtacacctaagaaaaaacataaccataatcaaactagtacaccaaaggaaaaatgtttgaaacaacaataacaagtttttcaaaagagtgagaaagcccactaccaacatttgaactttctctttagctctatctcattattatattccatctaagttccaattccattaatttaagattccaattccatacaaagcttattatacaactaagttactaatgctttggctatctactctaggttcttgcttgttagtagtcttggctataatatggttgtattggagtttaatattattacgtcattctatacacatttgattttttttttttatattatcctagaattgtaaatagtgtggctcacactttaataaaattagcactttttttgagtgattattatatttagtagtctggttatcctgattgtattattactgttttactgataaacttttgcgattattgatattgtttggtaccttgttttttcttgaagtaacttctactaaatttactttaaaggtcttaagactcttaacaaggtcgtattttttttttttttttttaaaaaacaattctttacaaaagtatgtacaattacaactttaattacttcaaatcttttcagcaataaaattgtggagtggctccgcttctctttaaattttgagaacttttttagtatatataatttttaaaaataaaatgaaattaaatgtattttttttattattatttcttttcatcaagaagaacaaagttctcattgatcaggcaccagcaacaaactgctataagaggataacaaacaaacaacaatattacattttgttaataaaatctttaagggctcgtttggtatgccgtataagggttgtattgtattaaataataaataatactatgtttagataaagtaatgtattatattaattattatg

SEQ ID NO: 44400 - DNA, 3224 bp, Cannabis sativa
tattattattattattaacaaacaccaattctctatatatttatatctataatatattggtgacggttatagaaggcctttggtctttctttcttttttatcgatacgaaatataatcttgttttaggtatgtaaatttattttgttttgtttgattgttaccattgagtttagaatcctaaatactgttgttgaaagttggaggagagaaatgtgaagatgacgtcaagttataataccaattttttttttcagttatgatgtttattgtagccatagtgatctcttacaattttttatgaaaattcgattgatttatgttactaaaatcaaaatataaaaattacaatttgtcatttagagagtgtcaagtatgagtatgtagaagctcaaaggctaaagagaaattacagagcagagagaacaaagtgcagagcacaagaacagagaattagccaaaagagcttaaccagaaaatggttagctatgatcttatttatattgagtagagttacaaagcaagaaaagtataacagaatctgttaccaaactaattataagaaccaactatcttaacagaaaaacagaatagctaactactagaatttacacacgtgttctggtttacatcccccctcaaacagaatggggacactgccatatgcagtttgcttttgagatagttgtagcggtctgtagttaaagacttggtaagaatatcagcagtttgatcaaaagaagggacaaattgaactgctaactgctttgtaagaataagatcacgaacaaagtgcaagtcgatctcaatgtgcttgcatcgagcatgaaaaactggattggcagccaaagctattgcaccctggttatcaacccacagaacaggagcttgggacagagggactagaagttcagatagaaggtgagtgatccactttatttcagctgctgcattagccaaggctctaaattcactctcggtactagatcgagccacaacctgctgtttcttggtagaccaagacaccaagttatcaccaagaaacattgcataccctcctgtcgatcttctatcatccacacaactagcccaatcagcatcactataaccatgaagtgtgaaatgattagaaacttgaagctttatcccatatgatatagtccctttgagataacgaagtaaccgtttgcatgcttcccaatgaatggttgtaggggcatgtataaattgactcaacttgttgattataaatgctacatcaggtcgagttaggctaagatattgtagagccccaagagtacttctatagagagtaacatcaccaaacggatctccatcattcaaactcagtttagtagaggagctagctggattgggacatgattttgctccttccatgtgcagctttgttaataagtcagcaatgtatttgctttgacttagatacatggagttggcatctctctatatctccacaccaagaaagtagtgcacaggtcctaaatctttaagagagaaggcagagttgagattagtgatgatagaatcaataagagaagagttaggaccagttattaaaatatcatccacatagactaggagataaacaagattatcatgagagccactaatgaacaaagacgtatctgatttggaagcttgaaaaccccaataataaagagtttgtttaagcttgtcattccatgctcttggtgcttgtttgagcccataaatggctttgtgtaatagacacacatgatgaggtttgtctttgttaatgaatcctggaggttgttgcatgtatactgtctcttggagagtgccattgaggaaagcattactcacatcaagttgtttgactggccaattgtgagtgacagcaatacttagcacaattcatacagttgcaggtttaaccacagggctgaaagtatcctcataatcaattccaggagtttgtagaaatcccttggcaaccaaacgagatttgtaccgatctaatgagccatccctgttgagtttaacccgatgaacccatttgttagtaataacattcatatggggttcataaggaacaagagtccatgtcccttgtttctttaaagcagtaaactcaacattcattgaggcaaaccagtgaggatgttgaagagcagctttcaaggacttaggttctgtaggtagtaatgactcggggagagggtgtttagtggctaagtaggctttaggtttgtgaatgccattttgagatctggtagtcataggatgaactctgcttttggtattttcagtagggagagaagggagtgatggagatatattagtaggaggtaatgtatggtttagtggagaaattgatgtagggacagggggctggtttggctcagtgacaagaacaacacagtgtggtatttcaggtaatggattgtttggtggagaagctgatgtttggacaggaggctggtttggctcagtgaaagggacaacacagtgtggtgtttcgggtaatgtattgtttggtggggaagctgatgtatggacaggaggctggtttggctcagtgaaagggacagcacattgtggtatttcgtataagtgtgcagcagtagcaggtgtgtcaaagttttgtaaagaaggaccactcggatgtgtagtggtctgtgatgcagcaatagcaccaagagtaggtgaaatagtaggcagttgtctgttaggatcagaagtggacaaaccagataaaagaccagcaggtatagcctgagttgcagcattttcaggcctggacacagcaggtacagaaccaatagggatgtcctcaggtgcaacaatggtaccagtagtaaaagtagagttagcaaatgtactatctgaaggataaaaggatgaattgcaagtaacaggtgtgtgattaggtgataatacctgagagtttgctgctgatgtggaggcagagacaactttgtgaggataaaaatcctcattaaacaccacatttctagcaatataaatccgtccttcagtagtttcacataggtaccctttatgatgagaagaatacccaaggaaaacacattgttgagttttgaaattaagcttatgcttgttgtagggcctgaggtgtggaaagcaagcacacccaaatggcttgagaatgttataatcaggcttgctatgaaatagagtttcataaagggtgacaaaatccagaactcttgtggggaggcga

SEQ ID NO: 44401 - DNA, 1769 bp, Cannabis sativa
  modified_base (1698)..(1698): a, c, t, g, unknown or other
aataataatcttaactagtcttatgttgtgcatgcagtggttttttgcttaagtattactcaagagagttatagtatataactataagagatgaaaaggagtaatgagatcgaaaccttatctccaaatgattatgtcccaaaccccacattattaatatatcttcattttttttattattattgttaaaattaatatataatataaagtgaaatcactctatttttacgtgctttacatatgttattaatcaacactttctacacagaagaacaacaaaataaaattttcataataattatgtccataataaacttgtctacattatgatcattagcctttttcacacaattaattagtgaataatatttttatatttatttataaataaataggttgcttttagtgtaattaccaacttaatctgtcaaaaagcttattactttgaattcgattttggctttcttaattattaattatttcttctttcactattgttcaattagtacatatagaagattctgattttgcctttaattttcttgctgcaaattgctggctttaattattttgaatgcttttactaatatattgggatcatttattacgttagcttggtatgttggaaaaaaaacgtgttaatttattctatggtggcaattagctaggtgtaaatgtctgtaatattaatatcacacattaaatttctacgagagtacaaaaagttgtgtaaatttattacattgtgaattaataacatatattattgtatcgttcagatattagttatacgttattgtgtataggaataagatgattgttatttagtagtggtgctcaacactttttataggtgacgtcttacaattaagtagcgatatattttttaaaagttatttttttaagttaattataactcgatacttaattatactaataatggtatataataccgaggagggtgttaggccccagtaatacttttttagcatttcttgtataggaaagtataatttcaactctcaatcattgttcatggccaattagtttttgagagagttttacattgttaattaatgtttaaaaaagataaataaatatgtaagatctatgaattactctctcatagttaattaattttgaaatagaaactcatgcgtcttataattttaacatagtatacgagtaagaacaaaaaaattctaatgattatccgatcaaaaataaataaataaataaaattgatcgaaaaagtagacaaagcaaaaaaaaaaaaaataaaaagagagctacctaaatctaaaaatcaatttaaaaaattagagtaaaagtcaaaaaagacacctataaatcagagatagtgaactaaaaaaagtcattaaaaattccaaaaaaaaacaagagaaaaaaaagaaattgatcaaaaaaataaaaccgaaaaaagttatctattataattcaagagatagtgagccaataaaactacttgtatggaagctgtaagttgtcaaattcaaacataacatactcatatatatatatatactagaaaaaaattacgtgcaaagcacgtatacataattttatattaggtggtttataattaaattgaaatcatagaaaattaaaaaataactccctaagaaacaaagtaaaataaatcacttcaataatgagtattagcatgataaatatagnagtatttacgaaagtaataaaatatttattgtgtggtaatctctgaattttatatatttatacataacgta

SEQ ID NO: 44402 - DNA, 3118 bp, Cannabis sativa
agtgacttctcaagggtgcatgtcgagtgacttctcaagggtgcatgccgagtgacttctcaagagtgcatgccaagtgacttttcaagagtgcatgcccagtgaattctcaatggttcatgccgagttacttctcaagggtgcataccgagtgacttctcaatgcccttgctgagtgtttttttaatgtcatggccgagtgatattgtcactttcaaggcttagtgacattgttactctcaaggccgagtgacattgtcactctcatggccaagtgacattgtaaatcttaaggccgagtgacattgttgctctcaaggccgagttacattgtcactgtcatggtcgagtgacagtcttgctctcaaggccgagtgatattagtcactctcaaggccaagtgatattagtcactctcaaggccgtctgatattgtcacttttaaggccgagtaacatttggtcatgatggggccgagtggcattagtcactctcaaggaagagtgacgttaattcactcttaggctgagtgactttcaccatgtcatccctcatgccttggtcaactaaccttggaaattattagtgcaaatttgtgtggttaacaactttcttctttttatcttcacgctttggatatttattatttcctttaaagtttttcttgtagttatttttcaaaactcttgcaaaattccttattaacagggcaacagtgtcatctgttagacatccagatagatttgagatttgtttccatcctctttatgaacaaaagcatggttattctttggtttttctttctataattctttctgcttctacctttcaccttgtaagagtcatttcattctacagtgacccaattagcgtatccaagtcaagctcttcaacatctttcatttcttctatagaggtgactttgtacttgaactttttgggaaaaaccgtatcactttcgaacaactttagcattagagtaagtcttccctaatgcatgactcattcgaaatgtcacacaacttggcatggaattcagctattgtctcatcttcttccgtagataaattttcaaatgcctttgccaaataccgcaacctagaatttctcaaagcatcagtcccttcattttttatctcaatttttccaaagcgtatttggctacattgaatagtgcgtgcatagcttttgaattgtgattagccttctacatttcttcaggagtccatgtgctcattggtttggatttgatcattccttcttccacaatagaaggacattgccaaccatcttctacaaccatccaaactctcttatcaattactttgaaaaatgcactcatcttggttttccaataaggataattcgctccctccagcgttggaggtcgagaagtggatctacctaccctaaaaatttccataacaaacataaaaacacagtatatactcccagagatggatctgaaaggaggttagttccaactggatgttgcaaaaagggaaaaaatgcaaaaaaattaaaaaattgcaacagtaacaaattttactataacacagcttggaagaaccctaaggatcaatatttctaacagaaaaggcccattcagataccaaatgtaaaccccaagtttttgtctaacctatatttatcatatttggattgattttatcttgatttatgcttgaatattaaaaataaaatcaaagattcaacactagaaatctacaagcttcacatgccctagaaacacattccaggcggctaatgcttggcttctttgaaccaagctaatgattcactaatccaaaaagtgtatcttacaattacaaatctaacatatacaagctttttcaaaatacagtgtagctttaccctaattaaccaaatccctcagttatatacacaagatccctttgtgtcaatcctaaactcccttcaacacttttctcaatctgaaattccttcagatttcaagcttaagactcaaattaaaatccttcagtgctttcatctcacttttgatcttgcatagaaccttgaaccatctcccatggagttcctgcaagaattcgatacaaagaagaaacaaagataaaggaagaaagggatattcgatccaagattcaatatcctctacaatattagggttagtcaaaatagttcaaaccaatgaaacccaaaatggatagctgtaactaactggacaactaaaaactcaaaaaatcgtttgccgacataaactatcagtaacagtacaaaatatagacttaacatcaagcactccagacatgactctgagacataattcgccacacataaaaataatgactgtgatagagtgtttctttagtttttgttaagcattctattaataggacatgtcatttctcaactagagtctcttataaatcatcatttttttctagagtttcctatttcctttaattttaagactattttgttgaattatttatattaatgaagtttaaatttttattcaaatatatatgatcaaaatatttttaatttatgaatttaaatttaattattaaaatatatataactaaaaatagaatggtgaataaattgatataatttatttattgatcaaatttgagtttaaagtattaaatgtgtgtattttcaaaatacaaagtactatatgagtattattgaaaacaaatgataaatagttctgtattttcataaaatacaaggcatcaaaccaatatatttataataggcattatttaaaaaaaaaaacataattaaaaaaattacaaaaatacgattatatggaattttaaatatttttaccgttttaagattttatttatatataaaatacgttcttttgatgtttttatgtcgtacacttattattttatttttggtttatggttatttgtttattattttttttatattgtttgatgttgtttgaatgttattttctcattatttttatgtatttttttttgttgttttggtgttatttttataaacaccgtaaaaaaatttgttaaaaatagtagtttatataaatttctccaaaataatatatatatatatatatatggatgtattcttaatgggtattacccatgaattggta

SEQ ID NO: 44403 - DNA, 2322 bp, Cannabis sativa
cgctcttccgatctacatattacaaatattgattccgattattttttatttatctcgttatatttccattaatttattccgattataattagtgtatatagtaaacgtgccataaaagtgaaatttgactaccacaattaaagttgaaagatgtggatgaaattaaaaataaaatataatatttttacatatttttatatttttgctctaattgcaaaatggtataaacaagtgcctttgatgaccaagcagagtttctgacgtggcatgatattattggtagaaaaggcgtggaattgttgggagggaggccacacgggaataagaaagaaaaataaactcccatctgtgtataagaataccaagtcggagcaaattcattcttataattcacgctttcacattccgatcttccacatctttcttcttaacaccgagtcgactcaggcgagttccttacgcacttttttatctttctcagttttgattttctctttctgcttccttaatcttgtagatctaggccatgcaatcttgaatatggggatttcgtttaataataactttggatctgactatcggatctgctttccccctgtgcaatattgtcatattttttggttctctaaatcatgtcaatattaattctctgtgttaaccatttaatttttgaaggggctagtatggagttttacctagtttattggatggatttggggaattttgtttgaggccattttataggtttttttcctgctgctgtataaaattcctgattttcatgagtttatctcttcttttggcaaatgatggcattaaattgaaaactttacgtcctctcaaggatctaagtgttgatgattgatacaatttactctttgcatatgctagatctatatacctctgtattcatcattatctacagttgattgtttttagttttgcccttaattttttttaatttatttgtttatttaaaatgaaggcgaattcttcgatatttgtctattaatttcacgtgtagctgagaaactagtaatgggatttgtattagaatcattgttgaacctatactaagatctaaatgtttgtcaccaaaggttttctcagctggttatgctatttgtatcctttaaatggcattgaaaggaataattgggattattccgattatttgctggagaagtggcacttgcaatcgccttaatatgcatttaatatagtcatgttgcactttattattgaaagtgtgatcatctcaacaatgagtgtccatggttaggtctcatggggtttcaggtttccgttcttcatggggggataataatttgttaagagtttgctaaatggtgtgaccattggaagttataactgtttgtttgattgtttcagaaaaaagcagaatggttttgggtggaggaggagcccctcaaagaggaagtgctgcagccactgcaagcatgcgccgaaggaggacgacaagcagtggggcttctggcggtgctgctgggaccatgctccagttttacacagatgatgctcctggactcaagatctcacccaatgtcgttctcattatgagcattggtttcatagcttttgttgcaattcttcatgttatgggcaagctctactttgttcgcagagaaacctagaagaagaatgtaacaacagagatctaagggttcatgttctggatttcatttgagttaaaaaaaaaaatagaccagttgctcattacattgcgtttactttttcctttttgttaatttgttcatttagaatgtgaaaggttggaacagtagtggcatttgttttcaaatgaaagatagattttgatcttagtatggcttaattcgtatgcaaatttagtttgtcaaacgtagaatttggccgctcacatacaaaaattggttgaatacttgaattgttatggaaattaaggtttaaaaacatttgatgaagcacaatagagcatgtgtcaatctaatgatttcattgtagtttacgacatacatgaattgccaattgtagaaatagatgaaccaactttatttgcttccatgatgccttatgtagcaaatggacttttcaaaaatggaaaagttgatgatgtttggaacaatagtattatgatcaattcaattattgctggagtttatttttttggttgacttttcttccccaagatccgaagcttttagtttgcatattaaatttgggataataatttacaattggaaagaaattctcaatgctaaaaaaacatgagtgagattgacgtgggtggaaagaatgcagtttttatataaacctcccagc

SEQ ID NO: 44404 - DNA, 1236 bp, Cannabis sativa
agtcacttagtgtaaatttccctaaaaactattttttttttaccctttatcaaccatgaaatttttcaatttggtgtgggacttgtagcttgtgatggttctaacactcttttggaaggcttttcaatgaattttcatgggtaggttgaggctttttttgtggaggtcgttggaatcaaagaggcccgaggttggataagaaaaaagggtggtttgatgtttaacttgagacagattatttggtggttgttcaaatcgtacttagtgtcattcacatgcaatctttgtttagtcaggtggttcaagaatgtaggggtttgttagattctatgaaatctgttaagatagtttttgttaaatgttttgtaaataaagcgatttactgtgttgctcgcaattcttatttctattcaaatcgtattttaaatgagaacaatactcctactgatgttttacctattgttatggctaaagctagttgattaataaagtttccattccttttcaaaaaaaaaaaaaaaaaacccctatgaaattgatactttgaacacccttttgacggtccttaaataaaattcctttttcccggatgtaaaacatggaattctagttctacacgctataattcttcatcaaaagatctttgagtgcctaggatcatcaaattcaagcacttcctagtgtcagccttcatgcatggctttagcagcatctatcaatattggtctaaaatccacagaagctctgccaagtactgtgtatccttccttgtcttccacatctacatctgctccatgccttactagaagaagagatacctgtaatacaaatacaaaaattcaagaagcatgcacgtaccatctaaatcttcttacacttagtagtgcatttcactgttcatgattttggagatgcaccaagttgttgtgaatatctaaacataagcaccactaataaaacctacctctttgttgtcacaaatcaccgcattcataagaggagtctgaccagatctgtcaacagcatctatgtctgctccttcttcaataagaagttcacacaactctgagttcccagtgcttgctgccctatgcaatggggtgcaacccacctgaatggtttacatgttagataacagaaatgatttagaaaatttaggagagcattaaattatgctattgtagggaaatgcattgcgtaaagaaagtaagtgaaggctgttaattgaaggttaca

SEQ ID NO: 44405 - DNA, 2858 bp, Cannabis sativa
tttagtgaagaagaaaactaaagataaaaataaattctctcatataagtgaacaaattactaaattaataaaatagtaaagtaatttcattacaatggcataaatgtatatagtaaagttatatagtctatgtctaattattaagtatgagtaaacattttagaaaataatatttgtcattagaacaaagagagagtggctagcactcatcttatttttatttttctttctaactcaaattcaactattttttctctttctctagactcaatgaaacaacgtcaaccatattataaaatattaaaaggtttctattaattaaatagcaaaaataagtataaaaattcaatttttctaataatactcatgaataataactattaaaagtgaatccaaatatataaattaaaaatatatataggaatacaaacattaaatgtctaatttcacatatagaaataattttctagttgaataatagatataaataaaagatacaagaaacacatgtaaaatataggttaatatttattccatatgggtgggcgccgatatataattagccctactcttgggacataatcataaaaatttcaaacaaaaataaaatgttggtggtaataatttataaaagctttatagaaatcttaaaaagtccaacatctattatatcgattaattaaggtctacatatatgtgcgctcatacatattaactttccaagaaaatatataaagagaagaaaaatatattctgatatctttgacttcccatatagcaaatataatgatcaactcacctcaccaccacaaatacttgttttcttaattttgacaaaacagttataattagtgtgtgtttagtgggaattaacatgttgatgatgtaatatattttatataagactttcacatagccgtacaacgttctcacttaaaagccttgaaataagtcattaattaagagaaagaagttacacaatttttttttacgtgtcagcttgaggttggatctaattgtgttgatgaatgatcaaatggggagaatttgattataagagttataagtagggaaaaaatggtggagccaaagagtacaacttttaaaggtgtattacttaaattattaattagtgtttgtattggtgtcaaatcattttttttttttgaggggttatcatattagagacatgaaactttaattagggttatccccttagctcaatttgattagacatggaaggttttagttctcaaggcactctaattacaacttttgacttgattgttagtggcttggatgcatggaggggaccaaggaatctttccacactattcaccttaataacaagttggaaaaccctaattaataaccccattttgaagttaagtaaggcaataatgccacaagaagtattttctgctgaatttaattattaagtattaattaacaacctctcgccaaggacatactatcaccaaactcatccatatatatatatatataaatattgtaattaaattgtgctacctttttctttttctctctatctcttttgtacttttttctccaagcatgtggttgcaaatgtcaaaaacaatgcatacacatatatccattaacatatatcaatagataaaatgtgaattattctgaaagccataaaatgagtgattcaaaagtacatcatacatcataaattataacatttataacacctaaaaccactaaggctagcttagtggtgtggtgaggaaaggaaggaaaaaagggagaggttatgagttcgaactcaaagcgtttaaactatcaagttattaattgattgtaatactattatactacactccaaataaaaaaatctataacacctaagtttgtaaaagttattctttggctgtaaaagcattaaattaattattacattaaaatacttatttattcaaattatttttttgacaacaaaaattacaataaattattatgttggtagtaatatctaccttattattttggtgctaaagtatacttatgtgttataaaatttacttataattattatcggtactatatatatattaaaataacttgagtacatgcccctcccaaattaactgaggcctttagctaaaaaaaatctaaggcaattatagcaaatgatctcaaattataggattatggtagtaaatatttttatttttaaaaatttatagaaaaatgactcttttaaactatttgtaagcataataatttaagtacctttgctctaaatgtattaactcagatacttaattaactaaaaaattttaaatatttttaccacaagtatgtatatattcataaataaattaagttgggaatgatgagttaattatgttcataattaaagaattaaatttgtgaaattttacttgtcaatgagcaattatgtgaaaccggtagcatgtcatatggggtgagccaaaacaatattttgtgattatttgacgacaagaaatattctttttaaatcttttcaaagggagacaaagcaaaagttaatgagacccatttggcaaaggacctaatcatttgggagaaggatgaagggaaagaaatggggtttccaaagctttactttcactatcattattttgtgatcatcatctcttgaaaaggaagctttattgttggttgattgtgactctctctactcaaaaggacaatgcatttatataaatatatacatagtaaatatatataccactacatctactttctaactccttatattgaagactactactaccacctaaaattatctatttgatacatgttatatattttggataccacagtcgtgaatgtgactcttttct

SEQ ID NO: 44406 - DNA, 2983 bp, Cannabis sativa
tcactttgtttgtattcacagactgtttaaaagaaggttccaaatttcgcacaataccagatctcaaaacaggagggattggggatttaccttgtttcacatcactgttacagtggttgttggcctacagaaactggataaagtccttctgaacgtcttcctgcctctgtataagctttagggacgatcttggagacagagatttctggaataaatccacaagagcaggatcctcttccgttgtctcctcgtcctctgagacctcaagcggttcaactccagtttcctcacatcgagccccaatctaaatagcttcctgagtcgattgagattgtttcttcttcgatttctttcccacaaatctagccttcccttgaatcttggacctcgttttagccatagccaccagcctgaagctgcgagagcaaaacacgagggaatagctttttatggtattgatttttatggacatataaatatgtgatattttagtataaattaaaatttaacataatattatataaaaatatattatataacccaatttaatataatacaatacaatacaatctaatacgaactaatacaatgtactaaacgagtcataaatatattagttgaaactatagtattaagtaataacaataaataatgatcattttattcgctatttcatagattttttttttatatttaatatatacatatttttaataagaatgactactttattgaattaaattaaatctatcattacaatattattaagataggggcattcctctccctcactatatatgcgaactggtacaaaacaaaaactgtgagcaagataaatgagcatctttgctagcagtacgtttaacaaaactaaacttgatatagtaggagaagaagcaagaagatttacaatcttggacaataaaccaaaaatagaagacataacaactgaattgttagtggcttgaaacaccatcaagcaattagtttcaagataaaccgaagaccacatcaatagcctccacaatagcagaattaagctttcccgatctactaatggaaacaacctccaaaagtcaaacatcatggtttctagccacccatcccaacccgaaacaatactctaaatcaaaagtagagccattatttatagttttattgttaaatatttaaacatttatagttaatatctatgatcttattatattattagaaatttaaagaatctttagcaattacaatcatataaattttattaattttttaactaatcatatttaatttaataaatattattatatatataattatatcttgccttttgttgggattattttatgctgtttggcttatttaggccattttttagtttttttttagaggaattttcataaaaataaaaaattttagtgacatttacattttattgcagaaaaaaaaataactcaaaaaaatatggaacaaaaaaataatcaatggtaaaatgagaaaccaaaaagtatataaataggcttaacttaaaaaaaaaaaaaactcatattttctaaaataatacaccatatttcacgatactatctctctcgtattttctctccgattttctctctgattttctctctcagaatcacgcgatcatctctggcaaataaagactgcaattcgatctcaaacgcaagcatttcacacaacaaatcaatctcacaaactagaattttgatcaattgacgacagagctgcaataacaatcatcatctccgattgtcttctccagctccagtaagttattcaattgcttctaatcttcttcctcaactgtgtgaacctgaaaattaatgctcttaaaaatcgcatacaaaaaaataaaaatcaaactgaattgtacacaacaacaaatcttcaacaacaattctcagtataaacaaaacaggtatataaactcaataatcaaaattatatatgaacatattatataaaaatatatatatattatctggaaaataaataaaactctgcaatttaaaaaacacatataaaataacgaaaaattcaatataaaaagacgaaaaagaactggttaaatcaagagaaagaaaaaactaaggacaaccttatatataaaataaatatgatttcatattcaacagtattgaaaatccgattataaataatattaatgaaataagatataaagaataatatataaaataaacaacaagaaaaaaataattagtcataacatgaaaaaaatatatatatatataacagaaaaaataactagttaaaaaattaaataaaacaataaaaacataaaaaaaattaaacgaaaccagttccaaatacaaaattatgataagattctaataatacatttcctttaacaatgcaaaaagtaatcaaagttataacaaataaaaaaatatatatcagaaaaaaaaaaccagtaaaaaacttacataaaatattgatacataaaattataataagattctaattttacttttcctttaacaataaaaaaagtaatgaaagtcataagtgacaaaacataacagaaaaaaaccggttaaaaaaccaattaaaaacttaaacaaaacaaacaagcataaatttaacaacaaaccagttacatttcaaaaaaaaaaaaacaagaaaccagtttcaaataaaaaattatatttagattttaataatactttacctttaaaaatgcaaaaattaatcaaagacataaatgacaaaaaaacataaaagaaaaaaaaaatcacttaaaaaactagttaaaaactacaaaaaaaaaataatacacataatttaaattaaatcggttccaagtaaaaaattaaaataagattctaatattatttttcctctaaaatcgcaggtatggaacaaatcatgtgtgtgatcaaatatgagggtcaatggagagaaaatacaaattatgacgactacacaatgactaaaattctaattctaaccaatt

SEQ ID NO: 44407 - DNA, 4492 bp, Cannabis sativa
tgtgctcaaattatcaagaattgttggttagccaacaaccacctaactattcaaggtaaaattgcttcctgcagcaagtatcttcaagattggggttgtgagctaaccgagaacttcaagaaacgaatctccatcagcataaaaagctctcacccgcttgaagcaccatattgacaatgataccagtcatgaatttcactgggagcaagtaaattattttgaaattttagcacaacaagagatattttggaaacaaagagctaaatcgtattggcttcacgttggtgataaaaatagtaaatatttccatgcctatgcaagttctaggaagcaaaataaccaaacttatcaacctattgactccaatgatgtttggcaaaactgagatttagggctttctcatgttatcattgattattttttgatatatttacaaccagatgttctttttaggaatttgttaccaatggtattcaacattcagttaatagcacacagaatgaactcctgttacaacctattcatgatgatgaagttagataagtgctctttcaaatgtatcctgagaaggtacatggacctgatggtatgagacctgactttttttaacagcattgggatattgtcagtggtgatgtagtatcttttgttagagagttctttgattctggaaattttccccaaggccttaatgataccaatttagtcctgattcctaaaaagagaaatttttcaagcatgggagatcttcgtcctatcaccctttgtaatattgtatataagattgtggcaaaagtccttacaaatagaatgaaacctctcattggtcatgttacctctgacacccagagtgcttttattctgggtcgtctaatctcagacaatattatggtggccttcaatattatgcactatttgaaacgcaagacgaagggcaagaaatgctttatggctctcaaaccaaatatgagcaaggcttatgatcatgttgagtagagttacttccatgttgttatgtctcgtattggttttgctacaaaatggatttatctggtcatgcaatgtgttacttcggttcgatattcaattattcacggtggacagttatgggaccgatcattcctactcgtggtatccgctagggtgatcatttgtctacttatcttttcatcatctgtgtagaggacttctcttctcttattcaaaagactgaagttaaccgtgccttacatgggtattgtgttgttcatgggcccccctctattactcatatgctcttcgccgatgacaactatctcttttgtcaaggcactactggggctgcttctagtgtggttaatttgcttcgggtgtctgaaggtgcttcaggtcaaaagataattattgccaagtcaaatgtcttttccagtcctaatactgagaactcccttcgccaaagcatatgttttaactcttaatatggtggaagcaagtgaaggaagcctctatttgggattacctaatattattggctaaaacaaaaatggtgtgcttggtttccttaagaataaagtcaggaacagaatcgacagttgggataacaagtttctgtcccatgcaggcaaagaaattctattaaagactatcatccaatctctgcctacttatgccatgagtgtctttcttcttcttattggaacttgtcatgagatcgaggaagctatggctcgtttctggtggaaaccaaactcgagcaaattaaggtaaaggtattctttagatgtcttgagatcgtatggctgttcacaagcaagatggagaaatgggtttttgtcatctacatgagctcaatatttcgatacttgccaaacaaggatggcatttattatgtaattctaactctcttgccagccggttatataaagcaaattacttcccacgctcaggttttcttgaagctgaacttggacatagcccaagctatgtatggcgtagcatctggagtgcacaaagtctagttaaaactggggctagacgtactataactttaggctcctcaacaagcattttgaaccatccatggcttccagatagagccaatcgttttgtgactacggtgcaccctagtttgcttaatcaaaatgtttattctcttcttagcaccgagagtcgaagttgggatagggatttggtttttgacatgttcaatgcccgcgatgctaatttaatccttcgaatccctttaagtttgaatgttgttgacgagtgttgatcttgggctgaggaaagaagcagtgatttctcggtcaaaagtgcctacaagatgctgcaacagcaaccaccattttggtcaggagcgagtaattcaggtctttggcataacttgtggcagctaaaaatccctccaaagtgtaaaaaatttctctggcgtgctgcattggatagcctccccacctgccttaacttgaccactaaacatgtaaatgtttctcttaactgccccatttgtcaagtacatgctgaaaccgcctctcatgtgcttctaacgtgtctttttgctctgtcttgctggaatgcttttggtaaaataggaacatttccagttgttactttttgtactggttggagcagttattctcttgttttgttgaggaaactatcagctgctcagcaatgatttgttgggcactgtggaaagctagaaatactaagctttggaatcaaaaaaccatctctagtctctactattgaggttcttgcatcagttgttacaactctttatcattggaaaagctcgagattaacaagttttatcattattgctccttcaaaacattgttaataaaaatgagttttgaactaaacccgtgcctggtacaatcaagataaatgttgatactgtcttatttgagaaatgcgagtcttatgggtttgggattgtggctcgaaacagttttggtcatatgctgcatttcaaggctgagtatcttggtggtctttacccagcagaagtcattaatgtgtgagtcaaggaagccctcagttggacaatagagagggaatggattaatgttagaggtggaatctgatagcatgctcaccattcaagcaatctgtaataaccaacaaatgctttctacctttggtttgattatcacactgattgtaaaactttatttttctctttatcaaatgttcagttatgttttgttagacgatcgacaaatcgagtgtctcattatgttactaggcactctcgatttctttctgatcgtagcattcttgatcataatttttctagtgatctaaaagatcttttgtactaaaaatgctagatttcaatgaattttatattttatttttttttaaaaaaattatattaataataatatgacacatttaaaagatattcaaaggcatcattaattaatatactttgtagctatatatataatttgtaatatattaaattacactaataataatatgacacattacaaaaattatttaaaaaatgttgggcatcattaattaatatagcttgtagctatatatatatcatttatatatatatatatatatattttaagaatttgccctagggttttgaagttccattattatagtttgtacaagtcaaatattggaaggtggatgtagggaataggtaatgtgagcataacattaaagcaacaaaaatgcttgacaaagtttgaggaattgaaaggaatatttgggaagatgaaaaaaaaacaaaacttatatatatatatatgtaattttataaatgtgaaaatagggttttttccattgacaactatgttgtgaaagcaaacaaacaaccctttaagcactgtacaaattcaggtcaatgtttacagaaacaaaaataattcaggtcaatatgggtccacacccaattaatcaatatatgataaatcttttttcactgattttttactattacaacaacccaatattcttgattcgatgatacattaatttagacatatttgatgatgatctttaagtggtgtagatatgatacacgtacgagtaatccctcaatgaggtgaagataaaattatactacaaaaaatctcgacaaaattagtgactaaaataaaaaagttgtggtttattatgaataataatttttatattgtgattaaaaagtttataactaaaaatattagtcacaaaaatcactatttattatgacgaaatatatttttagtcacaatacttattgtgataatattgtaactaaataacttgtatctaaatatatactataattttagttataagtatttttttattgtgactaaaaattatatttagtcataaataatttatgttataaataagaggttatctctaaagacaatttcttttagtgttacaccatgtttgattaaaaaaaaatatatgcataattataacaacttcaaattatctaattcattaattttaaaaatgtaacttcactatataataactttgaaattaa

SEQ ID NO: 44408 - DNA, 5566 bp, Cannabis sativa
atcaccatacaaagcatggtagagttgtgttatgatagctccactaagcccaacaaagcccttcaacaaccccagaacacttcctctgttttcggggaaattgttgacagaagggaccaaagctcctgtatttgcaaaagtctgagagttagctccaatacaaatgtagagacacatgtgccacacttggggtttcggtattctggacgtgacggcgagccaaatcatgaagtagccgaagaagttcatgactactccgacggagaggaccacacttggtggcatgacctcgttgagtagccctgaaactacaccaacgttggcacctaagtccttgaagaagcttatgagattgagtgttgtttggtcgtagcctagtgagttttttatgtccgaggaataaagtccgaacatgtaggtggcacctgcgactgacatgaccagagttgaagccaagaacatgaaccatcggccgaacagtacttgggaacccaagctacgaagctgatcagtactcctccagccatggctaactccataaccacccgatgcctccaccattttagtaagcttcagctaagaaataagttagttatatgcgtgtgtgtgtgtgtgtgaagcctatatatagattttaaggaaaagtttcatagtgacttgttagttgactagagaggtttggatctataggaaggaatgaagggtgagaatactacaaaatagagaataatgaaaaaaaaaaatgaagaaagaaagaaagtgggctttatcaataataattcatgatgttatcattattatttttgcttttaaaactaaataattcataattttattaaaatattatattatatactatttttttttttatttttacgggttaagttgtttctataattattataattattaactgagttgttagagttgcgatttaagttactttgttgtcgttagtgctatgtaaaaataaaaaaactctattttattattattatttttgctgaaaataattttttttcaactaaataattcattatttgataaggcaattaatacaggctttgtcgtccatgaaatttttgtggtgtaactccatgaaaacgatagaacatttttagttttaatttgttttgtttttattttttgatgcaatgattaaataagaaatattggattgctttatatatatgtacatatatattgatctttggtcattgagaaatttggttttatttcattgttttgacacagggattcagtttagaaagggataaggacatagggattccttttgggagttattttttactgtaacgttattcttgttttaaaactgtttaacgagtatgggtccaactttaaaacatgatagaattgatagccaatacaactattactattgcaatatttttggtcattttaacttggatgatattactttgttccctaaaatgaaaaagggaaaagattactttgttgccgtatatatatgttgccttgccgcatttgttgaaatatctcaacttagaataataaaggatacattgtatatgagggtatgtaatagggaatgtgaggaactcattcacaagttttcctcataataatgtatagaacaataattatagaatatatatggacaaagaatgccttaggagggtgtgttattttatgtttatccgtataaagatatatcagaataagacatattattgtccatcgccaataagttaacgttagttaacatggaaaaaaaacgacaaacaaatcaaaaacaaaccatttcaccgccaacatatatactcccttaatggtcgaagattcttagcctaaatctgtaatggaatgcggatgggaatttcttttggaagaaaaatattcataaataaataaaaatggttagagctcacggtcattacaaaataaatttcagtgatggaaataacgaaatacaactaaatttctagtgggaaaatgcctattttactacattatggactacaaaattataatttttgctaatactagtgaaaatacaactattaaacaaggaagaggatctattacaaaatgagacattgataactactcttgaatcactctccacaataataaacttggaatcatagtccttagctacatcttaagccgagcaacaggtcgccgcttccccacacaaagtatcaaaaaaatctaaccaagttgttcgaacccaaaccaccttgccgagatgactccttgctgccactgcagaacacatgctatctaatcccactttaacatcacaattaagctaaagccaattatgaggaggggcatgccagacatccaccaaactcagagaaggacgcaggaagatagaagcatgatgatttgcaaatgagatacgaatagagtcaataaacttcttcacatcaactggtctattattgtgtaccttgtcattgcggatccgccagatggtgtcaacaacaatcgatgcataaagaaaaatattctctacagtaatgcctttattttaggtcatagataaattttacccagtcccacaacctaatgccagtaccacaaacaggaaaaataccccaagaagaaaactgccacaaatgaaaagccacattgccggatagaaatagctgttccaaagattcctttttagatccacacaaggaacatctggtatcctcaatatgaaatcgtcttatgatcacagaacgaattgggaatgctttggacaggatacaccaccacaaaactttatgtcactccaagattttactattccaaagcttattccagagcgaaggagctacctcatagtgaggagccctatccaaagcttgggcaagataggtcgatttgcacgtgaaccaaccattactttctagcgtccgaacctaaggctgatttgcacgtgaaacaaccaagataggccgatttgcacgtgaaccaaccattactttctagcatccaaaccatctagtatcatcaatatgaaatcgtcttatgatcacagaacaaactgggagtgctttggacaggatacaccaccataaaactttatgtcactcaaagattttagtattctaaagcttattctagaacaaaggagctacctcacaatgaggagccctatccaaagcttgggcaagataggctgatttgcacgtgaaccaaccattactttccatcgtccaaacccaactatcattgccctggccagatggactccctccttttaaaattacacaaaaagtctctttatcaaaaaatggtgtttaacttgtggatatcccaaatcaccactgtctaacagtagattgactactttgcccagtccagtggtagaggagccattagatttcgggaataaatctttactatgagagatctaagggccccacaaatactagtatcccttccataaaccaccaatttatatgcacctttccttaagatagattagttcctaccacattttttcaaaactacgaatccgaatctttagagttgcagttaaggaaatcttctccttttagatacctaactttcataatttgggaacaaagagattgattgacaatcaacatgttccagccccatttttgtagaaaggccggttcatttctctagttttctggaaataaagtccccaatgagattttggtaggcataacttgtccctagttgttaacgcatattttcgttaaccaaaatatgagccaaatagtgataatctcacacaaaaaataaaaacagtaaaggaaaatgtatgaacacaaaggattttctacgttgttttgtagttaaaattctgcatagtgcacgagtcaatcttattagatttctgatggttctttaggacctttctctgttatgattttttcatcccttttttaatctaacttgccactatctataatcacatagtaggccgttaattacaaggttgactgtaatctttacaatgtttatcccctgaaatcgtgggaattgattacatatcacgtagtacaaatgcggctattatttgaatatcacacagctgtaatttatctgcttttactgggtcaaaatgatcgtgtgtttaaacacgtcttaaatcgaagcgttctaggatgtctcgataggaacttggttccaatgaccttgatagcgagctggagttttctcccctatctttcccaggtcgatgatgtacaccttgttgcttctttgtttgaaggcttaacgctttattttgacaatcacaattcttattaacagagagtatctcagtagtaatttgaatgtcagcttctgactcgccaagactataagtctcactgaaagatgtctgaagttaattggtgaaagtaataggaatgcgccttcctatagcgagatatgcgcctcgcttattaggtcttgaatccactcgactgttatacttagtttgtacattatacgctaagtgttttcacagtcaatacgcgtcgatttttgtcttcccagttataaagaagttgatgtctcgccttatgcattcattgcagtatggtgtctcgttaatacctgaggcaacaatttttatatctttacctcgcataagaccctatagtcagcgagttgcaagtatactctgttacttccgcatttaatgagttattccattagaagtgattaccgttccacgcattgatccatattccccttaatttgacacgtgtcctctactgaaatggtagctgaattttgggtataacaattgccccttaaaaagttctttttagtaaaaagtgctttttaataattacggagggcattttcgtcacaatccctcttggaaaaatgcatcctttgattttagcggttgtacggtttcaaaggtcattattagtaccgtcttttcatcttctgcctcactccccaccgtcggatttcccaacctttggcctttccattactggattttgagtataaaatggtggtttcggtctgtcatattccataaactcctaatttttggtaagtttcatccacaaaattggcttgtcattctcttgctaagatgtcccatccaagttcagaaacttattcctcaaaactcaaaacaccagaatatatcaaccatttttcctcttcatacgttcccaaaaacttcaagcctcaatttaaattggaaacgaaggattctaagactaaggagcttctgatcaatctaaaagcatggggacgcagtcaatcgttacgggcgaatctaaaagcaaatggtggtctgatctagattatcatatattttttgttgctccattgatcttttatttctgtttctacaggaatggacatagaatgagcaagttcaagctgacaaggaatctaggaagaagataatcccagtaggcgaggtcatggattctactaaagaacccaactggcccaagccccaagcttgcacaagaagacctttggaccagccactctttggtgttgaaaaatttcttgagactgggaatgaggtctcggctgcaggaaatgggatcttctgatgtggagaataaggtctatgcaaaggtcgagacct

SEQ ID NO: 44409 - DNA, 2780 bp, Cannabis sativa
ttaatattacacgactcattaacatttttgatccatttaatacctatttgactcaaataaataagttcaaattggtttcaacatgtataacctatcataattttagtttcacaaagcctgctctgtttcgagtaggtgtgcgaaggctagattctagttttgacagtgagattggaagtgcgatagcttatggtgagtaattttgtgtgattgcagtttccatttcgttctggtttgggcctgctttggtttctagttgaaatttcggtcactttgtgggcgatagctttttggtttgcttggtttgattctaagtggttcttgattttttcagagtgtttctaatgcgatttggtttgcttacaaagtggtcctttgtggtttgtttgatttgttccagagtgttttggcttagttacgatttgattcgatgttggtggtgtgttgattctgtgtggatcgacactggtgtttggcgttgtttgttctggtttgattgggattctcgttgttgagctttggttggattttggttgtggtggtgtgggttaatgtgtgggttttggagtggtcggggttgtggttgttggtgccattggggtgtggagtcgagtgtatgtttctggtgctgttggatttggggtttggaaccgaacaggggttggttcgttcttattgtggtgttggttttttggcgttttggggtgagaatggttggttggttgggagtgtggtaagtggaattaggcaagtatggatttggaattggtgactaagttgacagaggttctgaaactagatgaaacagatggtcccattgtcaaattgaataaaaatagccttgaaaaaggtagaaagagattggaggttagcttggtggggaaggtcatttgtcttaagccagctaatagagaagaaattgagaatactatgaagagtaagtggaagattaaccaccattttcaggtaaaggaattgagtgcaataaatgtctttcaattcttttttggaagtaaataggatcgacaacgtgtttatggaggtggaccatggacgtttgagaaacaattactatgctttatgaaactaatgagattagaagagatttcaaagttagtttttgaccatgtttctttttgggaggggctttgtcaggctgggtggagtgatacaggatgttgcaggtgtggtttggctggtttggtcatatggtgtgttaggtgattttttggttaatgtggcagaactgcttgcaattagaccgagttgactcttgcgcatcaattctatttcagtatctccattattaatatctcctatctagttaccttatctgggtaactagttatgctaaattatttttcccatattatttattcatttatttgtttttgacttttctcataagataatttttttaaaaaaagaaccatattttttttaaactttggccaaaagaaaccataaagagaaatgaaaattctttttctttactattaattcaaggttaaatattattattttcttttgtttaaatatttactaagccaaacccatcgacaaccccatcggagaaacccaactttgaggtagttacactacgtatttcttttaaattgatgcctttgatttttacccttcttttataatttattatgtttacctttctttaaaatcaatctaccaattttacttctactatttcacgatagtctctatttttctctaactaatattttgctctaattttcttacaaacttacacatctatctctagagaacataatttattgtatttgaaattgtgtcttgattatgtgagggtatgaagataatttaagtataatactcaaaaaaaaaaaaagaatatttaaattaaattttatttaaaggtaaatttagttaatatatatataaaaaatattcttcaacttctcgtccacttctcagctcttagatctgagcccaataatctcaaaggcccaaatctagacttatgagacacccaccatctggcccaactcatgccagcagcacgcaaagcccaaaacgaagcccaaccaagagcggcacaggtgtctcagccgagaaggagaagaaagaaagaagagatgcctcagaagctaagggaaaaaggattagaaaggtagctgggttttagtgttaattagtttgaaaaatgatactctatctagctcatcaaaatcaagattctatgtatattcactctctcatcataatctcaattaatattgttgtgttgtccatattcataatatctaataatgattattaatgttgtcactactttcaaaattgaaaacaatgattaaattggttcctcaaataaataaagaaatctctgttacaagcaatttaatgatgatataattcccactaacttaaatggaaaaagtataaaaattgaaaaaacgtgtgtcgtgaaacatgtgaacaattagtctgttatcacccttttatttaggagtattattattagacactagtggtgtctaacattttctaaatgtgtcattttataattggttaacggtattttttaaaaataattacattaaattatatgagacctgatacttagttattttaatagctatataacacgtaggaaagtacactagacaccattagtaccttttaacatatactaggtaaatgtacgtgtcgagccacgtattgctagtttcatttaagattttagtctttttaagattttgaatatattttatttttaaggattacaaattttttgtttgaaa

SEQ ID NO: 44410 - DNA, 3643 bp, Cannabis sativa
  modified_base (1877)..(1883): a, c, t, g, unknown or other
aaaagaaaacctcccttttgtctgaagccactattccaacactatagtgcacactactacaaaccgttagtcctcaaatcagtttttttggaggatcatcactaataaagttatgtgtctatttaaaattatcaagaatactctactattctcgatgattttaaatagccgtttagatcttcgactgtgcaaaatagtcacgatgttaaaaattaaaaatgagttaaaacagtattcttgacaattttaaactgtcagggatactgtttaatgtataaaaacccaaaaaatatcatttcattcaaacatttagatctatctatctctctctatatatatatcttgtctctctctccctctcatcttcaaacccacaacagttcccaccaccactagcactgaacccacaaatcttgtatgatattaataccaagcctaagggtcttaacaattcttcttctccttccgctgctactcccaccgcagtagattccatatttaaagttaaagatgaagacgacgatgatgatgaagatgacctcgagttggttaggaacaaaaagaaccagttctctaccttcttcgatgtatccgaacctctctcgctcaagcctctttgtgtttttccacaagctacatctgatgatgacggggtgaagactttgaaactcttcgtactatacagaatgttttgtgatgtactattgtggtaatttaaattcatgtattcatttatattttgatgtgatagtggtgcggttttcgagtaatgcgagtatgcgatagagttgtgatatgtgagatgtggagttgagattatttaaactgtttatctgagtaattttatttcaatgtcttgtttaatatccgaatgaactttctttaactttaattttaaatggtttgagttgagttgagctgtttgtgtgtatatgctaaagtgatttgcatttcggtatttttgtatgaactagtaaaacatttaggaatttgaaaatattattgtgtatatatacatattcgtttgcatataagtttgaaatttttgcatttgtcttatatattattcttgttggtcatattggaaagatctgaagttctcttttccaatgtaatgatatagccgaccaaaaggtgactttcagaccaagggagtttctgttcgactaaggaaacctgacatctacaaggaaatggtgtaaaaagctaacctccacttgccaaaggctggcctccacatccaaagcttatcctcctcttggtaaagttgacagtagtatggcctgcaagatcctagcaggcacatgacctgctaggtcctagcaggagcatggccagtcaaacctcaatctgtagaacttgtatggccgaccagaccatatcctgcagtgtatggccggtcaagattgacctgataggattctttgtatagcctgatatgttgactgcaagctacctgcgaattgggcctttaacatcacaacaatctagatagaaaatatctacttttaacgggcaatttagtcttttatatttaatcaatttaatatgtaaatatctaaaggtttcagttgtaaattaggatttaggctttcatatataaatgccttaactctaacctagaaaaggtaagtctaattctagcctccagatcattctaagtctaaaaccataatctctattttctctccctcttgtacacacccaaggggctctctcctcctatctctcacacgcctctaaggttatacctctctctcattagagacctgccttcttgatccatgctttgcaaccttataaagagctatattagatcccacctatagtgatatgaatagtattatctctacgtatcaatacaactaaaaggagannnnnnnattacccgctaactaagggggccgaacctctataaaaattcttgtcttatttactttattgttcttgttgtgtaacacgtggcaaacatcagatgcatacgacttcgctgtcggttggccacttttcgaggtcaacagttatcctaatttttgcccacatgatgtggcatgtccacgtaggcaagattgatgccacgtggagtacagcttgtcagcaagaaagtcaaatcatcatacacaacatatcagttgacaaggtatccaaatacttaagtgggataataagataacgaattgaccaacttaaggggtatggccagaccacactgaccgtccatattgccagcataggccggccagcctccagcaaaggaagggtcggccaacttttcccctggtaggtactttttgtgcttcttcagctttcagcttggacaacacttccacttacgtcttgaacaacacaataattagctaattcttgataataaagcaaaataaagtggcagttggctatagagaagtgcatatgcagtcggctaaagtagattggagtaagtttgtttggagtcgctttaatattctagatcttgctctccagatactttattttctccatgcctcgccgttgggcaacaaaagagatgaaagatgtctggaaaccaacaaacaaaaatacatgagaattttaaaggataaaaaaagtgagcaaaggataaggaagtttactgagaggctgtgagatacactccttgtaagcatctcccctagattcccattattgattaaatcccattcatgggagaggagagccttgaaatgacgtcagcatgttgcaccaaattttgtagtgtattctgggccagctttcccagcctcgacgggtagagtttcgagggcttggctcgaggaggcggaaacttgagtcgtcttgggatttggctcgtcaatacgtgcagggccggaggaggatttggatcctgagtcttagttttagggacctcgagactagcggtctgggaggctcacttcttattagcaatagtctttttgggcctttctgggggctccacatcgatgtctgctggagcttctgagatagtcaacctcttctttccctttttgtggatgaggccctcgaaattcatttttgcgagacaagataaagtgttagcatttattgaaaaacaagtaaaaggggagattggggcataatttcctgcctaaggaatttaccataatcactagaagatgaggtagaaggactataatatccactaaaatccctacaacccgtgatcctgaatatatcatagggattaattggtcctaaatcccagctcgtgtctaagtgacttgccctatccatcaaggtctcgtactactcgactatcccgtagtacgactcagtattgttaatttggacgtggaacctcggataccaactatcaaacctatgtgtaatatgatctatgaagaggggattccaggtgtaaaagttataacgactatctcgaaatgaaactagtgtgttacgctcagccctaagcactgtgggtgaccaaccacattaattacctcaggatgctccttcttcgacttcccgaggggcagtgttctggaggtattatgcccgagccacgcgatcttaagctttctccttgtctgggacaggaacctgctgccaagaagaatacttgggatatttataatcacaagtaaactccttgtcagttaggagacccacagacctcaggttg

SEQ ID NO: 44411 - DNA, 5109 bp, Cannabis sativa
ataaaaataaataacatgaaataactcaaaccgattataacgaaaatagattcagttatataacataatgaatacaaataagtaacacgcaataactcaaaccgattacaattaaaaaataagaagaaatcagttcctaaaatattaaacataaattaaaaataaaactagttccacaacaaaatacctcatagcacataatatctcataaaaccgattataattttttttaaaaaaatgggatcaattctaaaaatattgaggcataaatatgaaaagaaccagttagataaaaaaacaaaaatacttgtgaaaagattcgatcttgtatgctcgtttcacaaggtaacaaaaaagctacacggatctgaagcgtatggatatttaattctaagtgggagactctgtatttctctgagtatcacctgtaaaaggggtacatagatttgggaagaaagggaatatgagcattagatttatcagtccttttgagatactgaagtgagtaggctaggtagcatattgattagctataccacctgtgttgtctagggtgcataatgtattatatctctatgttgaggaagtacgtttcagatctgacacatattttgagctacgatgacattgagctctaaatagacttatgaagaataacatgtttaggttttagatcgaaaagagaaagtacttcgaaattagacaattttgctggttaacgtgttatggatgaagatcaaagttgagaaagcgacttaggagtttgagtcacaaatgcagaaacagtatcccaaattatttaggtaaattttgaggaccacatttatataaggaatggatggttgtaatattcccataaacctaattgtgaatacttagggtttaatatatattatgatcctactatttatttcaacataaattataaattttatcataagtgaataaataagcataatttattaactacagagatttatatagcatgtgtgaatataaaataagttgtttatagaataaaaatatttttaagtttagagactcgatcagagaccaaaatgtcataacaggttgttacgctagcagttttgataggaatgttatggtaagttgatattaggtttattgagataattagagatacttgggacttgacctaatgccctatgattaggaatttctcagtggctaaaaaatagaaaaataactttcagaataaaattttactattatattattattaatgttattattattaccgtattattattaaaattattattaataataaaaccctctctccctgctcctctttgtgcgacgaaacctatcgccaccattaccattttttttttaatttctcacccgaatctattgttttaaaccttgctagcagctaggtggtaacctttgtagagaaaagcttttgaggaaagagtttgaatttcttttaagttgaaaactttgagttttatatgttgactttgtattttagaagaattgtgagatactgtgactctataattttgttttcaggttgatacgagattgatttcaatgcttacttaatgaatttgaggtagttttgaagtagaattgggtttgagcttttaaatctcaaatctcaagatttaatagcattttttatttaaggaattgttttcgatttctgttacgttgaaaatgatgtatggatgttatatgactgttctgtgaagtttgtaatcatttggttaggtttggagttagtttggagggttttaagttgaggaaattcgtgtttcaaactgtttagaaccagaatttcggatggtaccaaccagaattccgtttggtcagtttttgggaaacattgaactttgtattttggccataacttttcaagattaaaaggattatagtttaaattaatgttaaaaatttaaatataagataaatataaattgaataaacattaaattatcaaacaacattcttcataaaataaaagaaaaaaatatattcatgtataaattctaaatttaaactttaatatttaaatacaatcaaaattatcagctataaactttaaattttaaattaaacattataaaatacaaactttaaatgtaaaatagtttaaatattaaacttaatttatatatatatattatattatagataattttagtaaaaatataaatcaatttattcaggttattttggtggattagaataatattcaacccgcccaatatattcattgagcaatatagatttttcgttaagttcttcaagttttgttttttgtcggtttgatttgagcagtttgtaaatttttttaaacacccaatatgtatatgttttacccaaaaattgaaaaaccaaaatcaaaatctcatgaaataaaaatacaattttttattctctatatgcaaataaattacatggaaaaaaatattttacttttatttagcgaaaaaaacaaaactaaaaatcaaaaaatacttagaaaagtattttatgggatcgagatctttggaaagaagagactaggtggcctgtgggtaatgtagagtctattcgtatttaaactaatacttgtatacttaaagatcatgtatggagaacatattcattccatgggggtttcaattacggcttgagtgaccttaagctagtgtctggcattagaacgtacccttagttaaggagctctttgatggtattgaatctaaggctattttgtctattctagtttcgacatttggtagacataattgctttgatttggaactttgttgaaactggtatgtatatagttaatagtgagtattggagttctgtttcaaaattggaatggggacaagtgttgttggaagtatttatgatctctcaccatcctgcccaaggttaggaagtttatttggaaagcgagcaataattttgtgccttgttatgctaatctcgcaaggcatggtatgaagacttctgatgtgtgccctttatgtttccaaaataatgaaaccacaagccatgctctttggttttgttcttcacttaaaaatatttgaaaatgctaggttgttaaaaggttggatacttggaaagaggcttcatgtttctatgattgcttgtgggttgtatggatgttctttcaaagcaggatatggaagaatatcttgtgttatgttggaggatttggtatcgtcgcaacacttttgttcatacaataagctgctctctgatatgttggttagtcaatgggatttgagttttcttttgcattatcaagatgctcaatctaatttggctttgattgctcatgtgaagctgacggagactgtgggtgggctctctagtggctcgactgagactttgaggttaggtgattttaatctatttatggatgtggatatcaatgtggaccacagttgtatgggtctcggggcagtgtgatagaccgtgactaggtggttttgttttgtgttcttcaagtgatccagtggtagcctcctttcatcctcatgtgatagaggcatcaactctcttaaatgggttgttactgtgtcgctgtttgggatacaactccattactgttttctcagactgtcttcgtcttgtccattctattaattacaaggataaatatcagagtgagttggtattattgttcatgatattttacatgtttggtcttctttctcttttattttctcttactcattgtaaaagagctcaaaaatgctatggctcattctcttacacgtttgactttatcccttgactcttctcgggtttggtgacctagtttatcgccttgcctctggtccttgacgattttgtattgaacttttgtttttggcttttttccttttaatggaattctccttcggttaaaaagcaacttgaaagtaattgtataattattaaataaggaagcatatttagatataaaattgtaattttaactgatggtttatgtcctttatgtggagtggaagaggaaactactcatcatgcattttggggctgtctttctttgatacacagtaggaagatttgtgagtttgtgttgggggacccgtggagacattgtgtggatttttttaactttgttcatagatttgttgatcccctacccaatgagatgattgattggttatggtaattttgtggcgaatttggtttcgacgtaacagaaaagttcataacaatgctgagttgactcatgcactcactgttaattgggctagggactaccttgggaatttccacaacaaacagcaagtggtgactgcttcccgtctcagccaagagtgattgatcttcagggaggtgtttcaccaacaaggttgtgttccgctttgccgacatccaaatgggttcctccccctcttgattttttgaaagtaaatgcagatgctgcacttaatttgacaaattattgtagtgggttgggtatggtgattcgtgataatttgtgtgtggctaaagcatcggctatttggcacttggaaggtggttttgatccagaagttgctgaagctttagctatctgaaatgctttaattcaatgcctctcttttgggtatgacatctttattgagtctgattgtttaaatgttgtgcataaaattaaaaacaatgattttatcataacttctttgggcattgttttagatgatattattaagctttgtaataggatccatgttgttaggtttatccattgtcataaatattgtaatgatgttgctcatactttgatcaaacttattttgtcggcaagtagtagtgttatttggtggctagagaattctaattgtatttagaacatattaatagtgaatactacccttgaataaatcctcactcccacttttttttttgttttgagtgtttatggttcttggtgtttggtggttaacactttctcttaaaaaaatatataattttttatatgcattcttactattttagcaagtaatcatattaaaaaataatatattttagtatttaatatttaattaaatgaaaagcgtgattatattactttaaaagaaggttaattagtaatttttacccttgaactttgacatgtagtaaattgtgccctctgaacttttt

SEQ ID NO: 44412 - DNA, 1225 bp, Cannabis sativa
aatttttgagccagatatcaaagatagatttggaaaagcaatattatataggtttcttccttgagagtaaaccaaatgaaaattgaaatctaacagctaaattctcttgtaataggtccttattcaatagaatcgtaatcagattaaggcatccggctgaccttttcatctaacccatgaataaagctttcagtaggactcatgactcttccaaatggcatcggaaattcaatgttgccccacctgcaataatggaatcgtttcaggtagactgcattgaatcattttatttaagcacaacataataaagaaatgaggtgtacttcttgaaattcttgaaagcagcagtgtcatccagctcgcctctcatatccaaaggatatggctttccatcaacaagtgcaaaaggattcatctctaggaaagtgaagtccaaatctggcagatgagaataaaagaagtcaacctcaaatttaaaaaagttgattgatttgtatcgagtagtaactaaccactagtctaatgcaccaatgaattctcaatggaattttcttaattggaggattgtgaaagacatttacaaaccttgaaatagagcgaaaacagatttaatgaactcctcaatttctgctttgatctggatttaaataaaaactctatgtcaacaaatttatgaaaaggaatagattactccatataataatagttttgtaacacattggctaaaataagaaggatgcctgaactctgaagctcacataaagttaaatatttgattttcaaaaatcatatatgaaagaaaaacagtctattacataatcatgtgtgaaggaattacctccaatggaagggttgcaactagtggagcacatacttctgacgtaaaagttgctccagttggaacaaatatagttttgacctgtttatacaaaagagcttgtaaacttgaagttccaaaggaacaatagcttaagaagacctaagcaaatgcatctcataacaaactgtataggaaaagcttcttcataaaaacaagtaaaaaaattcattcccaaacttaccttatcccagttctcctcaatatcaattcctccacactcggaaaagctaaggctagatccaagtctttcggagacaatattaaggtaaaactcctcattgtgagggatgaaaggttcaacaatgaatgtcgtaatgggtcctttgcatccacccatctcgacct

SEQ ID NO: 44413 - DNA, 1783 bp, Cannabis sativa
attagtattttattatgttttgtaattattaatttacaattttatgtaattagtagacttactcattaatactatataaattagtcataaaaataattatacaaatatacatatagtaagttgactcattaatatatctattataatttaattaagaatttgtatgaatttttgtaaatatgttttcaaatatgtacatttttaaaattgtattttttttgcacattttttgtaactatttaagaaaatatatacatttatgtaaaatgccctaaaaataatgggatattattgcaagaatcggtcaaccactcccaaaaatcaagggaatgattgagatattttagcaccaagatcatacctctagaagtgagacgtaaccatttctctatgtaaggggcacacttgacctgggaaggggatccaaaattcattacttaaagagcagaaacactgctatttttattccttgcactcaagagtatgttcttgacctgcaacaaagattaataaaacataaaaggagtagactatcacctatatttggagtcgaacttctttaaatttcagtattttttattaacatttattatgattttagtttaaatttccatttattacgactttatgtcgattggctaaaaaccattcaacaataagtgataaagttacctaaacaacatgttagtaattatattattatcagtgttaaggataatatggttaggttgaagtaaataaagatcaacacttaccttacttttagttcatttcatctttttgaaaattcaaactttatcactaaagaacacttcacgaacgaaaaactcatccaacacttgcaaatttcaaagtttaagcttgatttggaagggggatttccaagcatcaagatctaggaatttattttaggagaaaatgtaagaattctcaacaatttttcctagttttgctcttgaggggaaattggggattttcatataatgttaaatttaagggaatcctaagttgtttatactgatgaaatgaaatcacacatttttgagctctaacttaagtcgattgaccgaccctcactagtttagggggctagagtaactttcaaaattgatcgatcatcctgttatggccaatcgattagcctaactcagcgtggagtttttgggttcgatttcaagggattttgacaccttatggaaacaagagttaatgttcctagcatataattaatcatgtttaaagtataattaaagcctagtaattcataaagaaattaccataggttttggtaaaatgaaaaactaaatctacgttgaacttgggtatcttctttgttgctggaatccaagtaattagaaaagtggacatttgctatatgagcatacctttgtgtacattttgtgattgtttagcaatattcgtataagttaaaattagagttttgtattgcatgatttggtatatgtcatgataataattaacttgttatgttgtgggtgcttagttacgttgctattatggcgctcgaatgcacactatttggttaggcctcttatatgtgctcaaatatgcacattgattggaacgaccatctttgaatgaattggttatgatttatgtattgtaatggatgttacatattgattattgtaacgccctaaataattaggcacgctacctagaaatgcttatgaaaccctaatcccctaaccaggattactaattaaaatagcgcaaaatttaaacatttatattaaatagactgaaaataaacttgtaatat

SEQ ID NO: 44414 - DNA, 1563 bp, Cannabis sativa
  modified_base (1308)..(1317): a, c, t, g, unknown or other
aaccaaaactaaacccctcatatctaaaatgatttgaaacccacacacacaaacaataaacatgtacaaaaaagtaaaggaagagaaaacaccaagacttataaaggtttcccaaaaatcagttggggaaatcttctttcgaactcacctcagaagtcttggctcgattccactattagatttttaagatcaacaaattacaaagatagattctaagtcacaagtaacgattggtaatcctttgaattacaatagtttttctctcagagttttcctttctgtttctctctctctctccaagacttagcactgtaagtctcctcattcttcttgatatgctctcttccgatttgattctgggtatttatagatgtagagagcttgtaacacgagttggaattagttgtaacagtctctgatcttgtaactaactttagttatgaatatgagagtttgttaaagtcacaagccaatttttgtgctgtaataattttatatttttgttctaaaatatttgtatattgttgatttggacagtatatatcggaatttaatccaaaacatattcttcatctcaaaaagtttttaaaaataaacggtttcaccatatatgaagcaaacttctatccaaataatatatcgtccacatgtaaaaatattactcttattaaccttttagtatatataattaatctataaaaatctctatagttatttatgtatacattctcctctatttcggaatgcaactttcacattaatttaattaaattcaatgttgcttaatgattctttatttgcgaaaattcattataatgacctccaccccattaagtaattttatgaaaattctatattgcttttcataatattcatttcttcatgacatcgtacaattctttacaatctatagatgaaaaaaaggatgaaaaaagaacatgatatttttcaaatattgtagttgccagttggagcacataataaaatcattagaaatcactgattttgttattctaatcggtgagagcttgaattcttatttaagaaaaattaattatacttagagttagtgaaagcttaaaacccgaatacccattctaatttttgtcatcttcttttgtaaatccaactttagttgatcaaagttatcaaaatccatagtaaaggttaaaaaaaaaatatgcctccagatttattcattctaacacattctcctggaaaccacttgagggtggccataggtgggtgtgtgtgttggagatcgtgagttcgggtctcaggtgaaacatagttgtaatatataaacgnnnnnnnnnnaaaaaaataaaaaaaaaacacattctcctgactatgatataccaagatttttctcatataaatagtgggagaattcctttataacaaaatgggtaggaataacttttacaaggaatttatcaactagaattaactttctctatatatatttttttctttgatcaagtcctaactcctaggtagggatgcacatggggcggggaattagcagggagtgctctccccgtccccgtccccgttaaggat

SEQ ID NO: 44415 - DNA, 1095 bp, Cannabis sativa
acactagtgccctattactcaattttaaattatgcaatgagcaatactaaatcaatgctatctgatgtcaccattttaagaaatctcacatttattaatgtacgcagttccaaaaaataaataaaagacaacagacaaaacttaacaaaccaaaacttgatgagtgatttatttagagaaaaataataatgagtacatgtacaagcctgttgaactcatgagagaatttgtcccatatgcgtacatatggtatatttaggtatccgcatacatatatccctacgcccatatatcctgtctcacttcttgtatcatttgtatatttcttatttggtacttaaatataaaacagaagagtatctttaattattattaattcaaaatgttaattaactaagcaagaggacgcttaataaaccctagctacaaagaaagcctctaatctaaactatatattcatttatgtattattatattattttatatatagtgtcatgaccctttgtctccattatcgaagaatccacccaccaaaaacgtccaagtaatactttgacgttaagtcgtcctatgttgcgggaagaggatacaactccatttgaaaatgagagaatcaaaacaaaattatatagtggcatcgacacgtatatatatatacgatttttttttatatatatatataaaaattaattttgagccacttaataaattaatagtattttattaatatttatatttagtggtcccgtatctagggttcataactaaacttaataaaccgtaaaccggcctgtagtattggacaatatatagccattgctaaaaattgattaaatcatgttaaatcatagctttatggttgttattagtctctcagttttttctacttgctaaattgtggttaattcttcagacactaattctttacagctcaattatataaatatatagggccaaattatgatcctagggttacggtacccacatttcccttcatgagatggggacccgctcctaatggagcggagattcttttcttcgtctaaatgggaaacggggtgaagacgaagattattttttgtcctcaaatgttaa

SEQ ID NO: 44416 - DNA, 2580 bp, Cannabis sativa
aagtagtgagaatgtaacaaaattcaagcttttcaatcttcccaaaagaaaaaaaaatacctttctggcccttcgatcaacatgggaatctgagtttctctgtgtggatgcttccaactcctcttctggtagaagttccattgtctcgcaaaatgtaatgaattcctagaacaattcaactctaaacatgtcattattacagcacacaaaacacgtctaacaaacagtaagtatgaaacataaatagcaacaggatatctttcagaaagtgaaaaaatccaccttcaactttgcttgggaagtcttaagaatctgtatcctatcatcttcctcgactttttcagtcaattctccaagataaaatggcacctagaattgaaaattaagtaagtagctgcctataactaaataaattatgtccttaaacaccccattacatcagaatcaagcacacatgtaaagccaccttattaaaagaccacacttttaaatacaatttcttcaccaatttcctactttttattcgccttatcttatacttgctccagtatgaaaaaaaaccaaaaatttataatactttccaaaacctattcccacaaaaagaaacatgatatgaatcaaaaatcgcagtaagattcaaagttaccagaatgtatttgagattattggtgctgatatcctccttggtctcgttagtagagaacaacccaagcgtacctaccatatcttcgcacttttcaagagcctcacaacccttcctcaccatttcctgaaccaaaaacaaacaaaccatcagccacgtaaaattcttcaaaaaaaataccaaaagcccttagacttacctgatcagcttcacaggactccgtagccaattgatggattttccgagcttgatcgaatagcgctgagagaggcatttcctccatttttgattcaaccatggctgtaacccctttactgatctgttaaagaaacagaaaaacttaagtgaaattagggttcccgaacactctagggctttcagaaggaggagattcttgagaatttgcagataaattcgggaaaattcggacgaggaggactgagagagttatatatacagattgggaagactctgagccctcggcgtatgttagaaaagatgatttctttcgattcaggtgtgaagcagtgtacggtatgtatccgaggtttaccaattagatgttgccacgtatcaacattcaatgagatccattttgggcgaggctcatacgacgatctatttgttgtcgttttgcgtttgggttctcttggaaacgagctccctcgttttcaagtgtaggccattttgtgcctagaaacttctgcatttgtgtcacataaggtatttcaaataaaaaatgggccccactttttaagaccgtttatttatgggatgaggtgtaagatgactttaaatttaaaaatgttcaccaaaattatctgacacaattacatttccttaaatgattcagctcatcaccaacaacaataatccacgtcatcttgaaaaacaggctttcagtatggacaatccgaaagcttgataaacaaacaagccttctaggtacgtacaagacttccttcccggatggtccttcaagattgatagtaagctatctaagaatgtacctccaaatttataacaagctatctaggagagatatttcatacacggtacaagcttatctaaaagtaccttttgaattctacaagactttctgcacatggctttttggatctacactaagctttcggtatctgctctccggattaacagcttccatttcggatgacaaaacttgtaaccatggctaacaaatctccaccttggtatcaagttgaagtcacttgaataaatcattgttttaaatgttgttgtcccctcagcccttccgggctcagctgactccaatcagtttcaagcaatgctcaaacttactacttaacactaccttagttatcataacagaaagattgttttcaatttgaaccttggcaatcttcacaacttctttctccacaatctctcgtatgaaaaatgaagtttgatatcaatgtgtttagtacgttcatggtgcacacaattcttggttaattaaattgtactctaattatcacaataaacagtaataaacttttgatttggcttcaacacctccatcaacccaactaacaacagtgcttccttgatcactttcatcaaggccatatatttacctttagttgtcgaaagtgccacaaccttctgaaggtttgctttccaactaatagttattccaaacatagtaaacacatatgcggtcgaagactttcgggtatcaatacaccctacataattaaagtccatataaccattgataacatccaagtcttcattctggttatttataccaaataccaatcccttcaaataacgtagaatccattttaacgcttcccaatgctcttttctaggatttttcataaatctgctcaccatgctcaatgcatatgctatgtctggtctagtacagaccatgacatacatcaggaagccaacaacactagcatatggaa

SEQ ID NO: 44417 - DNA, 2817 bp, Cannabis sativa
attggttagataataccatatttaatgacattcactttttatgtcatatttatcataaccttaataatttttctcatattttttaaaataaccctttccaaaatagctttgcagcccgaggatcccaatagctgggtgaaggtcttgcgaaggccgaactcataatcattaatcaccgactaatcaaccttcgatccatcctctatttatcgttgacttgctgctgacttaaatttgctgaaagagatactaaccattccaggtgtcataactcattgacggtccccacaaagaagctaagagcggcaccacgtgtcagttgaggtgagccaacctggaaaagatgtattccgagaccaccacgcaaaaaaaggaaacaactgagcccacccgtaccgggacacgtgcctcaccatcacatgaccaacaacacctcatggcccacattcggcatgggccacagattaccttcactcgttactttttatttctcttttgctggggacttaatgcgcccaaagtggaccccattaacctcacacgtgcacaacccattttaacgtgaccccatctcccccgtgtgaggtactaattgagaaacttactggcaactagcactaaaattaaaatcccgtgcaatcgaaaacgaaatttcatgtgattaaacatgttcagaacaacaatgaggaagagaatggggtaaaagataagtttgaataaaagaacttcaacccaagattagaaaatggagaatggaaaatttgttctagatctttgtgcattaaccaataggaaacatctacaactctcagttactctaaaatacaaaacaactcataactttgaaactacctaagcttaatgggagttgttggacttgggcgtaaagaacgagaaaaaatgtaaaagtaaaacaaaaaaaaattcaagtcaaggctttgagcgttaagtttgttgtgaacgacccataagcggcacctccttcttgtcgtatatctctaaagagaaaccccttaacatatgagttgttgtcgtagaatcggcaccattgttatcactatttgtgctagttgtagctactgcactacttgagcttaaagtaggtcccatagtagacgaaccactcccaccgaccccagttgtaggtgtaacgcttgaaactgactcggccgatgcttgtgggtcccggagctgaaccagcaaggccgagacaaaattcgaaatgggtctcgtttgcacaccgaaacgcccagtattgggtttgatttgctatgccaggaacagttcccccagaatttgggaacattataaaatgcccagcaccagcagcattatttgttccaacttgccacacaagcactagtccttgtgccccattatcactagccccgtacgccattggtgctataggagctagcccaaaagacactgaagccttgtcccttacatcaacaaactcactatttgactccttacgacgtcgttttttggaatttacttcaatgctttcgccgttcggtcttgcagacgatgtcgttggaatcttaagggtcccacccacagagatcgcgatagcagggatggtaccggtccccgtggctttgattatggcctgctccgccttctctaatagccaccggatgctctcgccgtctgactccagccctaattcttcggtcagctggaatattcgtgtggcacatgctggcggcattcgaatccttcaaccacggccctccaccttcgtatgtcggtcctttaatttcttctttgcaaccacagccacagacgatgtcgtcgagattggtacaacagagagagatttgtcatccaactctccttcggtttctgaaatctcttctttcattggaatcattgttggaaatgcttcaatagccatataatttgacaccgatgtcgccgcctgtggcagcagatgttctaccattgaggtttcagaggctgagatgtcattgctagtgttaatgttttgttcgtcgtcgtttgcgtcaattatttcatttgtttctcgattactgtccattatttttcgaacaagccaaaaatctgaacataccaccggattgggaatgactccgaagaattcaaacaaaacctagataaaattatacaaatattactaataaacatcaatcaattaaacaatggaaaaggttaagaagtatgaatattggtaataaacgtacttttcaagcagatgtgaaggaaaaaaaaagtttatgcaacttggttttgaatctttctctgctacagtcaagaaaaaatttagaatgcgaaattatcttctcttgttttatcttcttttgttgatggtgataaaataaaaataaggagaaaatgatgagagtgtaccaaaaaaactaagctgaagacaagaagaagaagcagccccacttatccagtttgatagggacccccaaacccttttatatttacttggacgagatgggactttaatcgagggttgaacattgttgacgcaactaaggatgcattagattgtgcgacgtggtagatcagtaatcgtgtcttcaaatggtcaaagctatcgggtctacaattattagaagggtttgtaatttttttttttttgttatttaattgccaaaaatacatattttaatggcattcgaagtttttgttatgtttatatcaaaaatgaaagaaaatgctacggtgcacttgttgggttttgtgccccccattacaatctgattagctatcaatttagaattttgaagtgatttatatttacatgtattttacatgtttatggtttaatatacatatttaata

SEQ ID NO: 44418 - DNA, 1009 bp, Cannabis sativa
gttcttctcattaggagacatacttctgtttggcgatatggagagactcaaaattggctctgatattaaagatatatttttggaatatcgagttcaaaggattgcggagtgtttaggtgcggatggctggaaccattgctttccttctatgataaacttacttgaacgttgggtttctcagtactgtgttttcctgaaaaatgaattgataaaagcgcaacaaaaacagtgctgtgaaactagcattaaagaggtagaaggcactgagaagttcaatccatttcttgattatgtgagacaaagatttgtttttattgtcaagcagctaagaaaatacatttggatcttatgtacacatttacctcaaagtttcattttggatcaaaattttctgaacatggtaacccttactgaattacttgatcgttttgaaacacttctatttggagatacagtgatttctgaagaaataagacagatgttatcttgtcccgaagtaattgctgattctgctgattcatttgtcaataactgttccttgctttcggttggaaggcagtgcctttctatactgagaacccttcttggttctcttgaaaaactcacatttccaaattttagatctaaggaagaaataacagagttctgttttcaaagagcttcgttgatattttccactgcatcgggttcttttcaactgcaccttatgaaaatagagccattggctgttctggtcattgatgaagctgcacaactgaaagagtgtgagtcaaccatacctcttcaacttccagggataaggcatgcagttctttttggtgacgaatgccagttaccagctactgttacaagcaaagtatgtatatacatttacttctctttttcatttcttaataattactctttcaacctaactttgcaatatataattccttatctacaatgcttttttcttaacagatttctcaggaagctagttttggacgaagtttgtttcagaggttgagcg

SEQ ID NO: 44419 - DNA, 2168 bp, Cannabis sativa
  modified_base (431)..(432): a, c, t, g, unknown or other
  modified_base (2100)..(2126): a, c, t, g, unknown or other
ttttttttttgaaaaatatttaagggttttttatttttacacttcaaagtaatttttttgtatttttacagaaatctacatagaaacctatataataaccaacagaacaacctaaattgcaaccaaaatctatatagcaactcacataaaaactttcagaacaactcaaactataaatttaaaaaaaaaataaaaaattatatataagataattctcctacattatttatttatttttagaaatctattagtgtattagttgacttaagaaaaatattaagagataataaacttttttaaatggaagaaaccttccacttatattatataacttttattatttttattattttaatctttatttatctgttaaaaaaatgggttttttcatttttacacttaaaaataattatttttttttttgtattttnncagaattttacatagaaactcctattgcaactagcgctgcaacctaaattacaataaaaaatcatataaaaacccttattacaattagcgttgcaaccactttaaaaacccaaaccataaatttgaaaaaaaattaaaaaaacaatatattaagtaatttccctaaaaaaaatgttaagagaaagttaggaaaaggcaacatggtgaaagtaatgtcatctacacactaaattgacaaaatttattttattatatatgggcaaggtttcatgctcttagactaattaacaccacacaacatatatattaatagagatgtagagtaatataataaccagtggcacacgagcagaccacaaaaaatccattatcttaattaaattgaattaaatgaaatcacatttggaaaaataaaatgtgctaaacctgttagttataatgcatgtacgtatgtatatggatctacattatatcaacaaagggaaagaaattggttttctgactctgaaatccaaatagaagcaccaacttcttctcttcttttctattcatacatattttaatattcacacactatcatagtagcaatagttgggattttttaaaacgttggatttaattaatttattgacatatttttatttagtttaattaaaatataataatgctcaagacaagcacgtgtcttttaaaacaaattacattctaaagattcgaattatactactctcttattatttgttcttgaaccaacttatcatcatactatttaatattattaattttggaagagtttttcatagttacatatactaaaaataggcaacggtaaaaaattttgctcacactaaaaaaccatcggcaatatatactaagaaaaattgtcgatggttttgcacattcgattatactatagtcggctgagcaaatcaataaaaatttacgtttaactgctttttttcgttatgttgtagaatagagaaaaactacaaattttctaccatttttattgtgtattgcttatacatttcaaatttttaataattttatacaatagcaacaataattaatccaacaatatttgtaatataataaaaatatttgtatcatataaatttatttaactaaattaaaaagtacacgactcgtaagtttaatgaaactaattacttaataaaaaatataaacatgaattgagatatatactcataattttccttgtcgctctatctctactctcacataatctacccactgatcacgtaaaacattaatatgatcatttgtgtatgaggtgttgaacttactgcctgtaaaacaaaagaaagaaattattaaagtaacattgaaattattaaattaaaagaaataaagtacttaaaaaaacataaatttacttatgatatgatttatctcttcttattggcgcatattggatctgcttcgttcatgtaaccttcaataaacttcataacatagaatctacattgtacactatctagttactgcgatatctcagagtcatccatttgatgggactgatattgtgccaatttttaccaggactgtaactttccactgagctacacaaaaagtaaaattagaatattaaatatcaaacaaacttatatattgtgatgttggttatagtgttgggttttatgcccnnnnnnnnnnnnnnnnnnnnnnnnnnngatttacttattaataaagatcagcaataacattttatgttg

SEQ ID NO: 44420 - DNA, 1736 bp, Cannabis sativa
ctcatgctacagggactcatttggaccaattaaaaggagaaaagatgaaaatgtacacaacttatgttgtattcatatatagtcgattccttcgtgggaagttgggaccctgaatatcacacaaagcccaagtgtggctgtctggttgaactgcgcgtgggtggaatattggggatcttataaaaatattcattttttcttttgttattttaatatttttattgtcacacattttttattattttttatgatatttttattatattatgtttttgaaaatatggtgttataattttaaaattacaaaaatactatatttaagttaaataaaaaaaaaaaaaaaaaagacaactctcaaacaacttaacaaacaacatgaaaacaattataaaacaacaaaagataagtacaaagcaacgaaaaataacaaaacaatgacttgattgcaatatgcaaaacattcacctcctcagatatatttttatattataattagttttacttagttttgaaaatttatcttcttatactactacattatttttcatggtgtttaccgagattttcgaaaactaactaattagagcttaaaaaagatataaaacgataaataatagacaagtaatttttacgtagttcgagcgttaataattcctagtccacgaggtcgacgagtgtttgaatatacaaatatttataggataaatattaactctgtattcatgttgtttctctctcaaagaagaaatctagtaggaatttttgtaaaaattttgtaagtatcaatttgttcaccctttgcacatgaaaaataggggtatttatatataccatccacccacatagggtttcgtactcaacatgttataatggctggtactacaacatgtcgatatgaccattggtaggtaggaagccttcccatcgtgtagtgtacggttgctccaaggctttttgtgggactaatgacatgtttcgcccaaagttttcacattgcaaagttgttgtctagataagccgtggacaaaaaggaactttaaaggcacgtgtgcgcactaccaaggtctgacgcaggggacaagatgcgatttggtgtcaaagatatgtaatcgttgccctgagcttcgggtaagctataaccaaataagttccaggactatctagctatagtcttcccggattagactagcctgctaccctcctggaatactcatagcttctgatcctccttaataacgattaatagtgggtgtcccagaatcttttccgtccttactaatagggaaaagcctcgggtaactcatggaatataacatctttcgtgatgcagaagggaagaaggtacatgttaattgtgcatgctatgacgtggcaccttccgtaattgccatgtattatgcattcgggaatttagataacatttacccccatgctcgcaggacccatgactattgggagcttgcaacatccttccagatgcttgacttactatcctcacttgctgactaggtggtggcatgtgaaagatgtctttcgcgttaccttgggtaaccgaggggtcaatacgttttgcagtattgttgtcattctgctgaagcttggtgcttgcttagtgcttagtggagacgtggggctcacgctctgaatgcacgtttctcctgggaagtgaatgatggctgaacttgaaaagatgttaggtttctggcacgttggtgatgctgccacaaaatgatgag

SEQ ID NO: 44421 - DNA, 2469 bp, Cannabis sativa
tgctttaagtagatggtactttaatggagagtggtcttatactgttctccattctcaaagattagtcatatactaatctttggtttgcatcttttctactctctctgtgtgatcttttcgtgtgttctgagtgctcccttttgttcgtccctagtttcctgctctcttttttgttttcgctttggtgcttaacctttgtgtagtgtcttttcatcattcttgtgcttttggttctatcttaccttctaatccttcctgccttgcatttctttttgagggtggggtccttgtgcgccgttttcttggttgaaactttccttgtttcagtgtcgtgtagtgctttgtttaggtttggggtgggtagttggccgctcagttattgtttcttgtcttttattgtcttgtgtatttggtttttgagtgtcatggagttagtaaatgcccctgctgccacacttaaaggtaagtgcatcacctgtgcggaagcttcaatttctctggcaccttgtgccacctccctgaaggttctatcatctctttgcttgtttggaaaggtggtggcacctatgctggtagatgcggatgacattatagaatttgtaacaaaaaattggcagaagaaagtaactgtttgtctgcttgctgagggacctgtgtcaaagaattgcttcaagcttgggttcgcaagtggtgaagatagagattgggctctggaaaatgctccttggtcttacaaaggatacacctttgctcttcattcctggttttctggtatagaactttcgcagtcggtggatatcctaagagtttgggtgcaatttcataatctgcctcatgagtacttttcgattgagaatggcacccttttaggtggtaaggttggagatgtcgtgaaggtggagttagatgaggagaagccggtggaatggggtccttttctccgtgtgttaattgatctaaacattcaaacccccctgaacgctggttgtttctttgatttgttctcaggaggcaaaaagtggatacaatgcaaatatgagaaaattggtattttctgttacttttgtggtcgactgggccaccagaggaggggatgctctctctcttctccggtcatggtggaagcggttgatggtgcaacgtaccccatgtttggcccgtggttgtcaacggtctcaaggttccatgatgtcttctcgggtgctacatctcaggcgggggtggtcgtccatggaaggcctttgcccgataatgctttggaggggacggtggcccgtccggtcgccacctcgtctcgagcttctcaccgtgggaagaaaaggacagggcgtgcgctgtctggccatcatcggggtacgattcagacttggttgcccaaggtaatgcatgcagggagagtttcaagatttgctgaaaatggtaatagggttggtgtgattttgaatgaagatggaaagtcatctgggccatttccaaatctcttgtcttcgtctcaggagggtcaggttaataacctgttggttagttctgataaggtttgtggtggggcccctttggtctctggggcaaataaaacaaattgtgaattgggccaggggtctcgtgggcctgggggtttaaaggaaatgagttctgggctgggcttaattaatattgagtgtgctggagggaatggtgagctgaatgtttctcgtgggcctaattgtcttaacccctctgggccgcaccttgctcttgaaccgcccatgattaatgggctgaaattaaatgagttttctacggataagcttgagccgaatggagagggtgggctgggccttttggagattgggggatttaatttgagcccaccccgtggcaactttcaggttaacatggggggacctcagcttgtcaattctaaaggaaaagaggcagagaatgatgttgaagagaaaaaggccttgtctcatttttttaaagcacaagaagaattactttatgacttgaaacactttggtaagttggacttgtatgagatcaaacaattgggtggtgatattggagtgccgctttcttccgaaactaatgagcgtactacaccttttaaaaagaggaaattcgagggctccgcttctctatgttcgagacctcacaaattagtgagaacttatcatggtgttgttcgagacttcccctgggacactaagagaaagattcatgaggcacgtgcggttggcgatgatctttctgaggaaccttcggaggagccctctggtgagagctctagttgcaacaatggagttataagagatcacctgattggctcctttgtgattgaagaatctggctctagcttatctgttcactcgactaaccctgtggaggagaatgtcaaatctcctccacaggcgtcatgagaggtgttgcttggaactgtagagggttggggcagacctctacagttcaggagctgaagtccctgctcag

SEQ ID NO: 44422 - DNA, 2608 bp, Cannabis sativa
gcacagggttaaagccggccatgaatattattattagtgtaattaagtatcaagtttttataatttaatttaataatacctaataacaatgctgttttataataatattgactcattttttgaaaataaatttaaaacaaagattgacacattaaggagtttgttactacatgtcctatcatcattggtaggtaaaaacatcagttaacagtaacaaatacattacaaatagaagaaagcggacaaccaaaaataagcaacgttagaccaaaaaaaaaactactcacatatactaacaaattacgtatatccaagacaagagaaaactaaatataccacctcatgttatcacatttagttttaagttttgtcaattaatccaatcaattcagttagcggtgctatatttggtctgcgctgtactattaattattatgactaaaatgtagttgaaaatataaatacaaaaattcaattttgggtcttagaaatagttaatacagatcataggtgggggttagaattagaatcccaaacaaaaaataacagaagggcaaagtgtgaaaccctgcgtatatataaacacatcaaaatgtgtaagagtgaaatcattaaatacacacacataacaaaataaaatataagagaacaaaccaaaaaggccccaaaaaaaaaagagagtattggttggtggttacgtttattaaagagaagaaccaactcatttctcattttcccactatatcttcctattcttgctccccaaaactaaaatttcaaaacatatagctctctatttcttcatacccaccaaataggaagataaacaaaaataatggccaaaattacatccaccgttgctaccatattcttcttggtaatgacttgtgcgtgggcgcagcaggccccagcgcaggcaccgatggatgggagtatggggccgacggcgtctgcgccggggcctgactgcatgaccgtgctgatggggatggctgactgcctgtcttacgtgcagacaggcagcaacctcaccacaccggataagccttgttgctctgagcttaagtcattggtggacaataacccaatctgtctttgtgagtttttagcccatagtggtgactctggctttcagatcgatatcagtaaggctaaaaagcttccttcagtttgtaaagttgatactccacctcctagcacctgtgcctgtacgtactctatctttttccccttattattagtttattgttttatttgaattaaagtaaaagtaatataatcatgaaattagagtgattttcaaaaaaaaaaaaagaaaacttttggatacaaacattgaaggtttgcattaattatgtttggtaagaactaagaagtaatatttatggtagtttcttgtattgatataaattttattatagtattaattgtttagtggctgtttaacattaatttccacatagaaatggaatatatttagttaagaaaacaccaaaatttgatcagtattatttgatttattagatctattcaatctaggcgagttttgcggtcttgtgtttgttaattactgcaacacacaaataacattttcttttaataaattaaatatagtaaatataaaactaacaaagcaaagaaatcaaataagtgactcaaatgcacatgtttcttaaaatgcatagattttaaagtagtttaaaagaacacatatatacgtacattattaccctatttatgtataatgtttcttaaattatgattattataactctattgtcgtccacataaaaacgaaaaaaaggtaattgctttgatttttggtttttggtaagaacaaaaatagtaatatgtatgggcccatggagcggtgtgtagcggtgccccataactcaaatctcaaaatgtataggagaatgaataaatgagctgccaactgcctgtgatgaaagccatgtgtaaatgtatctatatatatatatatatatgttattatgtaaaacacttgtataatataaatgacctcacctactataccattaccagcttccttatatacctctttttgacatttaaggatttactagcttttctctacttccaaccaaatttgtaatgtttagaaccaccatgcttaaatatatacttcaatactataatgaattaggatcgttgtttgaagatgttatagttttattgtataaatttttggaggcagttttgtcctatggggctcgttctaagattttagtggcccatggtgggcaaagcatgttctgcggttagacgatgagctatcctggttcgaagaggttctagcgctggtggcgaacgtgggcgtcgtaaattcataagtgattctaatcactttttcaaccaaaaaaaaaatatattcattaactatactaggaaatgacctctaactttctatactaaaaaaattgatagaaaaatttctaaatataggaagtttcttattttttttgtaataaaaaatattgttacattataattattttattaaattaatttatatttaaaaaatttaaattaaaaaatattattaaaaataaagctttattttaatttttttttttaactattttag

SEQ ID NO: 44423 - DNA, 1425 bp, Cannabis sativa
aaataaattcttaggttacttttaggttacaagttatttattatttatttttatttaattttcaaattaatcacaactatttaatagtaatgtaactataatagttacaataaaaatgtaaccattaaaacttcttccatatatatatattgcgaattaattttgacgtaaaaatttcattttatacttgcaaatacatataataattattatcgggataatagggaataaagtaaaagtaaaaattactcatttaacaagtaatttttttatgatatatatttataaatatataatattgaccaattactaattgtacttcactatatcatggtttttttttttaataagagccttatgtttttaattgtcactaattaatcactaatgtagttagtacttctctactttccttatcattggaaaaaacacaaatatgttaactcatttatttatactacaaaaaacattttcaagggttgtgaaatagtgaagagtttagcaaaagaaaaataataaggaagaaaagaaaaaaaaaaaaaagcccattggactagctatgatgagtccaagtaagtaattaaataataagcttcataacataaatggtaattaattgggtggattataataatttcttggtgtttttcatttgcatggccccattttgtgtgcaaattaaagattacctaactaatttatgtacagcaccacaaagttagtagttacttattatatatgcataagaatatattttaatacatattccatctctaaaatatatttgtatataatattaatatggatgcatatttttgataggagtgaaagtttatgtttatggtcgtattcgtgtcgtgttaaagtttaggtattataaacaaatctcatatttaaattcgatctatttattaatcatatcaaaaatcaaaacttagtgtcctccgattttatttttggacacatttttaaaaggccttatattaatggagataatgtcaatccttatatacccatgatttttcacattcttagtcaatgttagactttggttgcacatccaacaatccttccttgaaacacagaaccacatagcgcctcccctcaaatgatcttctatcttgcaccgccactgtagcgcccgtattttatatttaccaagctcgaaagattaactttaatatattatatctttataactatatgggtcgggatcccgaatatcaaaatacaatttaaaagtattttactaatatataggtacaactttttttttaaaaaaaaaacttgctagcatgcaacctcaaaatacaaactccaaaataataacaaaaaaaccgaaaccctccaggctgcactgccgcgatatgtacaatcactgccaagctctatctcactgttcctccagctttgcttttcctttac

SEQ ID NO: 44424 - DNA, 1397 bp, Cannabis sativa
  modified_base (61)..(61): a, c, t, g, unknown or other
agttcggggggaatttctaacggccaaaaaagttcagagggcacgatttagtacatgtcanagttcgggggaaaaaattactaattagcctttatttatatgcctataagataaaacatgcttgcctacaacaaattttttgaattttatttttaccattataaactaatatgaatttttaaaaaatttacgggatattctaaatatgtacagttataatgtacattatcatataaaaaatttaaattataattattcaaatattaaaatatatacataaaaaaagtgcgtcgttaatatatttcaaataatattaagaaaaataatatatatatatatatataaacttgttaaataagaaatgggtaaatattattttaaaccatgtattttgtaaaagttagtgattagaccttctatttttttaaatgacaaaatggacactgtattttttaaaactataaaaataggaccctaagctcaatttttaacaattttttttttcatataattaatttgaagacgattcttgaacagatacagaaaatataactagttttattataacacctctggatcaaattattattaagttttattttgataaaaaattagttcaagttcctatttgtactattttaataaatacatggtctatcttgtcatttgataaaatagaaatttcaattagtaacttttgtaaaacacagaatacaaaatataattacccattaaaattaaagatcatttttcttttatatatagatttaattacatcaaacaaattattaaactgtatcaggggattaaaatttaattattattaaaaaatattaaaagaaatgagataaaagaattatttaaattaacagaaagtaaaaaaaaaaattaaagagcatacatacaaagtaaatttgaaaaaataattttagttttttttgtttgtttaatgccccaaatctaaaccaccacataatcatgtcaacggcagaattggcctaaattcgtaacttttatattagtttccattgagaactgctttggttgaaaacatgataataaattataataagggtaaataaaggagacaaaagaggtgtcaaaactcaaaagagttttgatattgatatgggttagggttaccatccttacccaaaaatatttatgttgtttttttttgctctttttttttttacaaactttgattaataccccatgttaccaatggacataaagcccagagacgcaggcttttgttttagtccaagtctattgagttgagagtgatgtgtctagttacaaacatgtctgtcttcgcatatccttagaaaatctcgaaactgactaaaataaatcgtatttgttttgtggagctatttaatgctgtgatcacattt

SEQ ID NO: 44425 - DNA, 1392 bp, Cannabis sativa
aagtcataaactttttaatattgttacaatagtaaaagtaaaattttttgtagcgagttagatacacgtacgtaccgaaatattggtggtttttgaggccaaaattggatgttatactctaaaggaagagaagggagtctcaaagcatctctccaataatgcagagactcattcatataatcaatgcttgttaagagcttacgattattcaatttcacatgattcatatcacaacacaacctttctttttcctcatcaccaggcaactcaaaaaattccttagccacatccaatacatctttcaatagcttctcttcaacaccatgattaatcaactataattggaaattggcataaattttgtaaaaatttacataaaaatgatgtctgaaattacgctatgtactaaatcgatcgtgtgtgccttttgaatctgtcagttagaaagtttttttgaactattaaagttattagattcaaggacttccattaattaattttactaacgaacgcctaatattgataaaaatttattaggagacacgatttggtaaatgaacaatcgtcacgttagtaaaattaaactgaattggataaaaaaatttaaatctaacaatcttaatattttaagagaatttttgaggacgtaaaattacgttagaaagagggcatacatattttaaagaaaagtcaaatattaattagaagaaaattatgatgttatatatgatcatacctggaagaatccatattgtttggaagcatgaatgatttgttgaatgagtttgggttgttcttctttgaaatcaatcacaggaatgaactcacatatgggaactatggtgttaccaggtctacaatcaggtggtaatttgtaacattctggtacaaatttcaactctcttttggttgacaacagcttctccattgaagaaaaactagtgtttttgctttggtttggtaattcaaagctgagtaatttgggaacaatttataacccttaaataggatgttattttagtattcgaaataattttttagttaaattttatttttcataattatgtacgttatagttatttaagatattttgtgaaatttagagaaatttagaaaaaattaacataccgaaaatagggttcaaactatgtattgcaccatgactattttattttacatacgtatgaaataaattatttgaacaatgcattttatattgtaaattattctaattttcttaaaattttgtaggatgccttaaataattataacgtacataaatatggaaaaatagattaatttttctttataccgaaatagatataaattatatatcagtatatctcttttatggggatgtactgtataagcaatatatataaatatgtaaat

SEQ ID NO: 44426 - DNA, 2182 bp, Cannabis sativa
acaaaaatataattttcctatttaataaattattaaaaaaaatttcaaatgtttaagtatcatgatgaaaattcataattttttctcttttggtacaaattaaagtaagcaaatagagagaatggtcttgtactgttactctctccctggagcttggtcattcaccaatctctaatccttgatctttgttcggtattcatatttgtttctttgtgtctgtttgctccctctgttttggggtctgtgtgttattttcctggtgtttctttcattgggtggtggcttctttcctagctttgtctctttgttttactctttactctttcttttgtgttttgtttttcgggtttggggtctttgggattctgtggggtaaagggtggttgagtcttgggtgtgggtagttggtttgctttgtcttttgctgtctctcattaatggagttgattaatgttgctgatgcccctattaaaggcaaagccatctcctgtgttgaagctacaatctctctctccccgagtgcttcttccattaaggcactctcttctttgtgcttgttagggaaggtagtggctcctatggctgttgatgtgagtgatatgttagagtttgtcactaaactttggaaaaaaaaaggtggttgtttttgttctggctaatggttcggctacacttaactgttttaaactggggtttgaatgcgaagaggataggcaatgggcattggataatggcccctggtcctttagaggttatacttttgcacttcgtgcgtgggtgcagagtgttgaaggcactaaacctgaggacaatttcagcttgtgggtgcagattcataatctgccacatgagtatttttcggtggataatggtaaccgactgggtggtttaattgggaaggttattaaagtggaactagtggaggacaatcctagctcgtggcacctatttctcagagttcttgttgagtttaatttgaaaaacccgttagtttctggatgtttctttgatttagactctggattcaagcgttggctccagtttaaatatgagaaggttggaattttttgttacttctgtggtgctttgggtcatcaaaggaggggctgttctttctcttctccgatcatggtggcgagtcttgaaggtactcctttccctttgtacggtccgtggctttccacagctttgaaataccaggatgtgttctctggtgcgttgatcaagaacccagcgacgttttgcggctgggtctgcttctatagctggtggcttctagcgggcggtttcgtcatctcggtctgccgttgccggggataaggtgaagaacggagtggatcgtattccgagaaggggtttgatgttgatggatcgacccttctctgggaatggacaaaagcctcagaacaaatgggttcccaagaaggtggctactggagtgtttcgagagaatgctggaaatggtagtaagccaattgataatttgaatttaggtgaaaggttgtctgctcctttacctatcttggaggcgttgaccgtgggtgaacagggtgtagacccgttggttttaaataatgagaaaattgtggaaagtcctgtggataaagagatgggcttttgtgaaaaggacattttgtcattgggagtaggagttgggtcggctgggccaagaagaaaaaggtcttttgttagtggaaaaggtgagagtagtggaccgttggttatgggccatgagggtccttgtcaatttcttgtttactcaagtgggccgaaagaattaccaagtgatgggcttaatttaattacttctaaaaataaagggcctatggagatggaggaaaggtccaatgcaattaatgtaaatgaagttgagcgtgtgggaggctttctttctggacccactctgttgaaagataataaccgtgagggggattactcttgtaatgagaaaggaagggttttgatcaatgaagagaatccacttgctctgggtgttgggagttcggtcgaccccccttttaatgaagagaatgctttggctcattttttccatgctcaagaggagttgcttcatgacctgaaacattttggtaagcttgatttgtatgagattaagagtattggaggggacattggtgtgccgacctcctcggatatcaatgaaagaactactccttttaag

SEQ ID NO: 44427 - DNA, 1781 bp, Cannabis sativa
atagagtattcttaaataaaggttctactgtatatataatacatgtaaaaaaaaatggagtatatattgatttttttttttttttggaaaggaatatattttagtgtaccttctacattttgtattctattaatttattatgtaccaacagaaagaaaaattgaaataaaaatagcttaggctaattgattaatatctatacaaatagtgctatcataattaacgctctagattgtaattgcgttatgtatcaaaaactaaagtagtgtagaatatatgttggaaaattatacatgatttgggttatatatattcatgcctgactaattgacctttaatagttagagttcgatatatagttaacatgacattcagattttcacagtatgaagttaaattaaggggataattcacacaaaacattaactatatctttttctttggaacaaaaagaaagaaacaactaccatatggttaaagattaggggatcttcttttggacgagggcccaggcccaccattatttgaagaaataataataataataataaaagttgaaaataaaaaataaaatgcacacccattaggtacggacatatatatatttatactatatagtataaaaaagtagccaacaagaagaatccatcttttctggagttttgctttaaatgatcacaaaaatcaagtgaaaaacctttaacatgtccacaactattagttatatctctattgattattaattaataaaagatcaaataaaatgaatgaactaaattaaagggcctcttaacttttgtttagcaaattagacgttgattttctttctaattaaagagcttaatcgtatactcatcacaacacaaatatatttatatatagaaataattaaggaggtgtttccactaatataagactaaagttttttcccactcccaaagtttcaacctgctcttcactttaagggacaggctgcccccccatcaattgacaccaccatcattctaattttcacaatacaagagtttgcccaccaagagtattttggcttttagattaggattagatttttgttattgtgattagtcttgtttttatgacatagtattattttattttgttttgttttcttgactcgtcataaaatcgttgttagcggctgacattaacaaattctctattaaagtagttgttagtgttctaactgtaaagagttaaatgctcctacaatagtggaaattgaatatagttgttttaaaggttaacttagatatgtaattttttttatttaattttattttagtttcatttgttaaacgattttagaattagacgttttggttgattcctttttttaattctaattttaatcagttttctaataaaggagatattcacattgatttgtaaactattattttaggtggcatttaataaggaggaataaaataataagaacatagaatagaaagaataaaaatagaataaaatttaaaatttataaaaaaaataaaattaataaactttttttcatcatgcattagaatattctttcattcagtttactaaaatagtagaaaaaccattctatttcaatactttaatatgcaaccaaacaaaaaaaaatagaaggaaaattgtttctttttcattctattttatttcattaccttcgatcaaacgttaccttaattcattactattaataaaactgtatagtttattaaaaaataaaaaataataataatgaaagtatatatttgtttaaaaataataataaa

SEQ ID NO: 44428 - DNA, 2423 bp, Cannabis sativa
gttcaggggtatttttaacgaccttaaaagttcagggacataatttggtacatgtcaaaattcaggggacaaaaattctaattagcataaataaattaataacaacaataaaaggaggaacaaaaacgaaacggatctaagtgcttggaaaaaagatattgatctcattataacataactaaaattaaggatttataagaagacttaattatagtataataattaactagctgcagatgcttataatatatatgtaccgtcgtgagagacataacatctaaaatgtcatcatcatctcctctctactcggtttcaaaagctagtgctttcatcataaaacgctgctttaatttgcattatatatttatacaaatcagttcaatattatcattactttttatatatatggaagtgtcctatatattttgagatcttattactttgtcagatttatataaatctaaactacatttgaattatttgacttgttatttgttttggtccctagccctagctatatagctactaccgtagtgccactataaaatgttttatgtaaaaaaagaaagcaacaggagagtaagaaaaacaatttgaaaatacctcactgtggtgtgtacattggtataatattttgtcccatttcacttacctcatctctctactcacaatatgtatattttaataagagggtatacttttaggtagacccaccatatgatataattccatgtgcagtggtagcctttttttctcctcactatgatctacacaatgactcgcttttctcatattgacacacatcttcaaacatgtatgtatatataaattattttctataaaagaaatccttttttttttttaatttaattgggtgctattacagttggggcatggggcacatgctatggccaggcaaaaagattcttgcctgcataaagtaccatcttcacagattctaagttactctcttctaccagtagtcgtagtggtagtatagtactactatatgagttttttttttttttttgggctggaatactatataagttattagtggcactgttgcagatatctgcaaagtgcactgatcttcacattcttttaacttctgggcacagtggccctttatcagttaagctaagtttatatgggcctagctcttaattatttcttttaaaatatatgatgggtccatccaacccaaccatctcttataactatatatgaccattaaattctgtgtcttataagttatgatcacattaaaagaaaacgtaacatgaatctaatatcaacctctctattatcatactattgtcaaatggtagagaaaatatatatatttgtggtaaaaatacttaaggtttaaacaaatattaaatttaaatactcaaactcaaaattggttaaacataacattttttgtcctgcagtaaaaatactcagtgctaaaacgttgcaccttcactactaaataatttcaaagtcaataaaaaaaatattttacgttttaaaaaacattgaattttttttttggtgaatgaacaagaaattttattactccaaataacaaactttacatcttaatagcatctttaatttgaagatctaagaatcaccaactacacagtataacgattaattgttcatagaaagttccctattgtatttccttattttcccttacttcttaataagattacaatgttgcaaattaatttatgtctactatatattaacacttttaagctaaatacaattaattgatcttcttttaatttcctctttgatcttacacaccaattaacctccacttgctctagccaaaagctctaagggggccagtactgactagcccagcctgccaaaatcaaccacttctacgctcacaatccagccacagatgaagaaggctaaagagatgctcagtttctattagaattgcttaatgcctgaggccaacgagcaccttaccggggcggaggatatacttgtgaaagtcttggttggcagcagagttgtgaaggaggttactagggtaagatttttttttttcttgaagttctttgtacgggttctacccattgggcttaaagaagctctgagctagattaagcagaggccaccacaaataacagttgttgagatggactgccttttgatggtgcaagcactttggcatcatttgtctactggggatgagtgttgcatgtcctcttattttggtttgttggttgatgattgtaagatgttgttacaaaccctaacttatatgtctttatttttggttaaacggtctatgtgatggggttgctcatagccgattagcaagaacattttatcctgtttttgattgtataatgtatctcttgatgttaaaaacattttgtcatttgatttgatttgataaaattctacca

SEQ ID NO: 44429 - DNA, 2405 bp, Cannabis sativa
tagtataaattaaagtttaacgtattatataaaaatatgatatataatttaattcaatataatacaatacaataccacttaatacgatgttccaaacgagtcttaagatttttttttttttttttatatatatagctcaattaatagtggtgtactaaatatattttatgtccttttatcttcttattctttaattaattgtatttattttatttgtttttggttatttttaattttaattaaaaaaaatatgtaaaatataatattttaaaaaaagttaattagaaaaagtaaattttgttaaaatattataaagaatatagagttggaatgtaacaaggagtggtcttacaaagcagcaggagaaacaattctactagacacaactactcctctcgggcctctcctcctacagtagggggggttttggagtgggtagagcccacgagagtaccactcagtctcaaatctcagtcaccatcttaggcaaagctggtctaaaatgctctcaactcatctaattttttcgactttttgttcgtttctgttgctctaatttgggaagggttgggatagaaggaaaatgcaaggagaggtcaagctaaacgattttattcaccttttcaagcatgggattcggacgatttcacgttcgagctgggtttcagcttctgggtttcaaatatctgtcgctgggattttgggtattgctggttttgtattggctttaagggatgacaaactgggcaagttgagcacttcccagtggttgttgccaaagagtgaaaatcctcagaacttgcggttggttcccggattgcagaatcttggaaacaattgttttcttaatgtgattttacaggtgcgattttgtacttggatttgttactttttcgattggatgctaagaaaatagcagaaaatttggcaagtatagaaaggacaaaagaaagaaagttgaaattgagaagtcatattgttttaaagtgttgttttttttttttcccggctacattctacagaattttgactttactgatcatttgattgtggaaaaatgagcaggctctagcaagctgtccccacttccatatttttctgcacaaatccatagaggaaattgaacggtcgcctgatgatgaggaattggttgatagtttgccgcttgcggtttctctggctctattgttacaaggtaacttgcaatttatgcaaagtttgaattttgaaagcttttcccattggatggtacgttgtatcacttccaggttaactgaatgtccttttacttgacctgtcttttttataccagctgtgtaataaatttgtttagtgattggctatgtctgtaaatgacagtttttcttgattcaagttttgtgatgggcttactgttacacatttcattgtattgtaaataatatgaaagaggtttcagcttgttttggctgaattaattagttctccatcattctagatttatgtgcaattggtgaacaaagtgtggtactcaatccccggaaagtgatgctttcgatggctcagtacatacctaatttcagtctcaccgctcagcaggtcgaactttgcgcttttttaattgcattactcgtatgcacattactatgtggttatgatttgtgattctgtaaatttgtaggatgcagcagaagcattccttcatcttctgtcttctttaagagaagaatttgctgattgttatgatccaagttactgttctttgtttgaatcttgttcctcaagttgtaggattattactccaaggagtggggaggatctgaataagcaggaaaggtggacacagagtttcattggaccatttgatgggattcttggtagcatcttaacttgccaaagttgttcatctcaggttcttattgcttaatatagcacttattagttattacaatgaactgcttatatggataatgagttatagctttgtgtacatttttgcaattcctgaaatgcgctgcatgtactctagccattatgaaacttgtgaagagaaaaaaagtcgaccccatgtatatatattttgtgacgtgatgtgatgtgatcttcatgaagttattttgcaaatccactatatcagggtctattatgttattttggttttggtcttttggagctcttatgtatttagtatagtttcactaaaaatttctgtaatccatgccctttttaaattttgttcattttgcagatctcgttgaactttgaatcttttcacagcttgcctctatctcccgtgcttgctactggcgccaacatagtatgttctgaagattccactctatgatagtgcgtatttttaagcctatttcttggacctcaattgtagtagctgcttcctatagaacaaaggtgtctcatttctgaaa

SEQ ID NO: 44430 - DNA, 2733 bp, Cannabis sativa
  modified_base (2679)..(2687): a, c, t, g, unknown or other
tttgatttgattgcatgtagtttttgaacagctggatttttagagtgtagactactcattattattatactaatacgtgcgtagaagtaggctaccctagtagtatggttggtatatatgtatgtatgtttacatgtaatttgacagtgaaaaagagtgtatttgtacctgactgatgttatgtatgttgataattgcgtgacccaaacgccacccttcggctaatgacctgaccgcatatatctgccataatgccatatagtccactccccatttcattttttatttcggtgaaatttcaccctatgctgtactatatgtcttcgtcaaattttaattaagtttctacatgtagagaaatcagaaattattgtataattcactctaatcagctgactccctaacttagtcaaaataaaataaaaatagagtaattttattgcatttattcaaaaagaaagttattatttagttgacaatgaccaaagtgcttgtcactgtaataagaaataaggtggaaatcagggtttgtaagaattttctgaaatactagtctatgatgattgttgaattttattttcttgattaggtccaattcaataaattaatataaataggcattatattcaaattttatatttctaaaattacataagtctaattataaatttctagaagatatatttttgagaagtgctaataattataatttcttattacaactttttagtaaactttcacatctgaaatcacatgttagaatttattttttttatagtgatactcgttatagttatagtatcattcttgtaaatttttgaaaaattctgaatggtttacaatgtcgaaaacattgttcctgatattcaagtttactacgcacgttcaaaaaacttcaaacagatttttggcactgtaaactatttgaaaatttttaaaaatttacagagattatgttgtaagcataacgaacaaaaccataaaaaaattcaaaaaaaaatattttgccatgtatttttgggcatgaaaaatgactaagaaattataatatataggaggttgacagtagtacacatctatatttttagaactcatatgccaaaaactccaatttctcaatctaacaaatagaataatgacatcttatcaaacctaattcccttatttataatataagtttttttaatgattatttataatattagttttttttcaaagaatatattcttataattctcaaaaagccaaaaataaaagattaatacaaaatagtcaagaattagaggcaagacggtaaatcagactatcgaactcgagaagagtgcaagagaatgagtcgtagcactttgagcccctttacaatgagtaagggaaataaaagagaaaaaagactaagtatgtaaatatcaatccttattattattagcttgagtaataatataattagttaacattgttttcttttgttttagttaataaagataattaaaaaaatcaaaattaaaagattcagagagttccaagactatttactactcccaacatctcatttagtgttgtaagttcgtgcctgtcgtgctgactcaactcgtatttatccgtgttttacaaaaaacgtgtcgtgtcgtgccacagaaaaatacgggtcgtaccgtgtcgtgctaatatgggcccgatacggtctgatatttttatgtcatactcaaattcgtgtcgtgctttgctcgtaccgacccgtatttcttaaacaggccagcccattttcatatctcggcttaaattcatgctttacctttttattttttttacaattactaaattatatgtatatttatatataatcataaaattattaacatcattagaatttcaatatttacttataaaaacttaaatttttatatcacaccgtataaataaattaatatttaatcttagtttttcgtgttttaattataaaattataatatttaatattatatttaaaatttattattattttaacttatttataattaataaatttatatcttattattattaaataagggttttgaatatgtcgtgtcgtgttttttgagcttgtcatgtgtcgtactttttaggctagtctattcgtacatttcgtgtttctcgtgttgtatcgtgcttaaagatatattttttatgctgtgtcgtgccaatttgtagcatcatgtcatgtcgtgccaatttgtagcattgtgcctgtcgtgtccaagcctgtattttttgtgcctagtcgtgctcgtgccttctgggctcatgctggtttctgttaaccccaaaaatttgctcttgtaatttttaaggttagttgaacaaggcatgaggatgacaatggcacttggtctcaagagtgacaaaagtcactcgacctcaagagtgacaaaagtcactcgaccaagatagtgacaaagtcactcggccatgagaatgacaatgtcactcggccatgcctcctgcaaagtcacttggccatgcctcttgcaaagtcactcggccaggcctcctgcaatgtcactcggtcatgacattgcaaaacttggtgcaaccttcccaagcaagaggagagtgaagcaacaagaatacaagcacaaggttagtgtaacaccctaactaacataggcgtgttatcgtgattttaaacgtactgtgcannnnnnnnntaatcaacgaggttattgaaaatcatgaataattaaaattttctta

SEQ ID NO: 44431 - DNA, 2912 bp, Cannabis sativa
caataaatataaaatattcatttatcataaaattaattttttattttatttccttaaatagaaatttatttccttaaaaaaaaatatttcccaatatataaatattcttttatagtatactttacatttctttgatgcttgactactggtggcttatttaattcttaattgagattgttgttagagttttcttccatattattgtaaacggcttggtatacttaattttcataattttgctcttttaaatcttcatataatagaatttatttgatttacctattaatggatatttttgttttatctaaaaagagccttaatcaggttttttaaattaacttactaaaatataataattaaaaatatatatgaatttctcttttttttttttttttttttatttcttaattcttacgtctttttttcattatatatattttttcaattcatttctttctagagtaattttttccaattaatttaaatcttttaaagttgaaaaaaaatatttttaattaattttaataatatagggtccaaaatagaataataaaaaaatatagagtttgaattggtaattcgacaaaatataaaatctaaaatagtataaaccttattaaatttcattaccatcatcattatgattcttattttcttacacctcaaacaaaaccaaatataggatgcatttcgaataagccaataaaaaattgaaattaaatataattgaagatactattaggcattttcataagtttgttcaactacgtaattatatattgtaattgcataagtaaaggtaattaccctttttaattctcatatccccatgagaattgagtttaatcaataaattgtataattactaatgattttaccaacaaaacattagtgattatcaccccatatccaacatcttgtattttaaaataaaatataattactactctaataaattagtaattacactacctaatattacacaattatttcgaaatataattatactatttttttaaaattatatatgcatgcacaaaccatagaaagatggcatgaaaataacctcctttttatttagttatttatttatattttaatgtttcaactaccaacaacaagtgaccaagaccagaaaaatcttctccattaataaccccatttcctttctttgaaatgggatttttcctactttgacaatttttgatacatgcatattataattgccttccatatgcatatattacatttatgtaggattttttttttcttttttgaacaaatacatttatataggattgaacctaataatatttaataaagttttgtatgttttagtcttcgatttagaaaaaaaggggctctctatattaaagttaattgatagaagaagaaaccaattaaataagtactaacaataatacttcaccaaaccccaaacttattatgtcattatatatatacatgtggactagctttcatgtacgtatatatatatttattattaataattagtttacgttaattaatatttattcatcaattccaactattgaaaagaaaatttagaacacaatctacaatcagtattatatatatatataaaaataatatataatatatagagaattacaaagtcggttcctatatattattattagtattattattggccggatataaagaaaaaaaaaaaggctcaatcatacagttattgtctgtttataattgtgtagggttgtctatagacgtgcaatatattcgaaccacatgagaaagggattagagaactagagatggtcaagtaccttcatctttattaatataagacaccactagttgtctagtactttttacacatgtcgcgttatgattggttagcgatacttcataaaaattattatattaaattatataagtcgataaattgaaccaatagcgatattaacccataaaaaagtgctagacactgatattttttaacatttctctaatataaattattattttactttttttaatcaatgcttatgggtttctctgtcgggtttatttggttttgcaaagaaaccccttaattaaagttaaagacatttaattaaagtccttcaataatatatgagatgatatatataataatatatttatgacaaccatatatatacctatctatctaatcaacgacccaaatttaatcttatctatgttttttctctcctttatctatgcgtcggaatgttatacacccattattgtttgtgattattcttttagggataagtacaaatagaaataagaaattatgtgcattttatgttatacagtttagtagtttagagttgggtgcccatcccatcttttattagaggttgttaattagttattctaattgatttggaatcagagttattttttctgttaattatcttgccaagttgttcatttgtagcacatgtctatttgtatctttgcctatataaaggcttgtaattcagctcaaccataatacaatagattatttttttccatctttactctgttttctctattacaaagcttaaagcttctcatatggtatcagaagttaccctgcccatttcaatggcaaggccttccacaagatctcaggatggactccttcatcctccacctgagaacaactcctcagaccctcctgctgaggttacttccgcccccacagcagatccaatggcgacttctcgacgaactacaaccaggactcgacctcaaaatcatactgctgttcacgaagatcagtctccaagaaccgaagacaatccgattttcaacagacgatccacttctcttcaagatcgccatgctcatgaagattctagtgttagaaaaattaataatatactcaagatctatttgtatataacatagaacac

SEQ ID NO: 44432 - DNA, 2836 bp, Cannabis sativa
agagagagagagagtggagtgagttattagacttagttatcacttaatgacttagaatgagacttacggtttttagggttgagttaaggctttttatataggagagtttaaatcataattaataaataaataagtagtatttacatattaaattgattaaatacaaaaaaactaaaatataggtctttttcatctactttattggactgttaaggcccaatttgtggtccaactagtagtccacgtgtaagtttgtgcaccagaatcctgcaaggtccaatcctggccagcgaggcacctgcaggaagcaggctggagccttgtgctgtccaaaagttggccggccagccccttaaggtggctagtctgccacttgtcatcttatttgagtgtcaggtaccccgttggctagagtgctaacttgaactccttgttggttagttgtactgccatgtggcgctaacattgaccacgtaagtatgtcacgtcaagtggacaaaaatcaggataacaacactaatataacaagactagattagttgcttggcagtggcaactgtctactctccgaatggaacagcctttggcttcagtctttagtgattcacacttggtgttacaatggtgataatcaccaacagctatgaactcgctaaagattgagttctatagctttatttttgtacagagagaatttagaagaagaggagaaagaattctaaattgtgtctctgactatagaagatgttggtatttataaggtactgtctaagagtgttggagagatagtaatgttctcaactaacttaactgctaaaattgaagcttaaacaaactaactggttttgactgaatactaaccagacataactaacttcaacaaacaccacaaataggattaagatgggcttaaagtatcttattctcaaacattaaaattttattatctaactttcttattagggtatctctcttatatttgtcgtattttatgttgctactcataaattagctaaacatatccttaaaatagataatgagttttcttaaacgaatgatattccttttaatagtactttcttctcttctaaggtgatcatgtaaaaaaaaaaatcaaaattaacatatattaattaacatacatatatagaatttatttacatttcttttttcatattacacaagaaagatataggttgaggtgagtccctctccttaacaatctaacttagttaatcactcgccacactcaaattattattacaggaaaacaaactaaatatatttttttgatacaattataaagatctttcatgacctttagtacgtatagttacgttttcctttacatattaaagcatatttataattataattaatatatggaccatacagcaaacgataattaataataataataataataataataggtactatatatagcttattaattaataattcattatgggcatgcattgtccaaacgaggagccacgtgacacgtcactgggttcttcatctccatggacagcctcaggcactcggagaggtccacaggctgagctgggagccacttgtactggtgcagaagcctagctagccagaggtgcacagaggccaggcccagggccttgcctgggcaaactcttcggcccgatccaaatggagccaacctaagatcagagcccattatggtcacatcttcttcaacaaatctctcgggcctgaaagcccatggatcctcccaaatggatgggtcgtgagttatggcccacatgttaaccattgcggttgttccagctggtatgaaatgcttgtctatatggacatcgtggaccgccagacgggcccatgagagtaatgggcctggtgggtggagtcggaggacttccttgacaatagcttggagatatggaaggtttggaatgtcagtgtctcgcacgtgcctgttgttgcccacgcacgtgtcaatctcatgctgtactttttcttgcatgtcttggtgcaaaaccatcctggccattatccattccagaagtatggcaaccgtatctgtgcctcgaaatatcatttcctgaatataaaaatagttatgattagaaatatattaatattcctagtattagtgtataaatagaataattgaggccaccaatgcttaaagttcaatggaataaggaatgttttgtatggattgagaacgtggagagcacaaataaaaatgaaaagcatttaagattctcaagcttgaatatatggacatagagtgacatcatattcctatacatgataccatattataatttattatagagtaacattattttcaaagtggataaataagttcaactataagatttgtctggcacccaatttttttttttttttttttttgggataaagttatatttcaataataacgaatgtattgtgtgagggtatataggagagttaagatttggggtatggtgtggagattattggtttgctgtgactatccttgtcttctcaaaagattgactaatgagtcaaatggttttttgggctgtaagtgttataaaaaaaaaagttgtttgaaagtaaaatacccgtaaaggacaaaatcataaagccttattaaggataacaaagctgcaaaagaaaacactacctatcaacttcaaaagaaacactacaacttttatttctcaaaagcagaaaaggggagttccttctttacataccaaaaaaatctttttctcttttttgtttgggtgtatctaatgagatgtcttgtcatatcataggctaactatttcttttgggatttgatcatggactttactttgagtta

SEQ ID NO: 44433 - DNA, 1552 bp, Cannabis sativa
aatcacaatttatttatatatccgccgcaaagcgcggaatgtttactaatttatattaaaaggagagggggtaaatgtcccccttgcccttcaatgcgctcgcccgttgctaaaacccttggcctgcaaatattatcatgccactcgcgattattccacgtcatcaaatctataaggaaaataattttcttgacaatccaagtattttttataactattaattgcgaatctagttattattatatgtaatctaactttaatgcaaacattaactttaagaattttttttaattatattaacatattagttttctagatattagtttcaaaaaatgtatttttgatttaataaaaaaaaagtatgtttgattaagaaactggattgataaaggttaggtaaagattatttctataactatcatttatgaaaatatcggtctataactgcttttacctgtatttacgtcatctatacgttttcatagtttcttttttaagcaaaattttgtaaagaaaaaaaatctgtattgttgtaagcaaaagtatacattgattttttttattattgtaaattttcctattattattatttttccaactatgtgtttgtaatttgatttaatttaggccaatttgtcataaacctaaaaaaaataagaataataattggaatatctcattagagttttggaatatgatagtgaagtctaaaagcacaaaattttgagagccgtttgatttaaacatgatcaataataataagttgggtaataagtcaaaatcttttgatgagaaaaactcagctaatcagatgatgagagaccttattaggaccatcccacaatgcaaatatctcaactttcatggggtttgtataataaatcatacaaaaaaaacaaccaagtctaaaagagtcaaaaatcatgggatacccactatgtaaaaatggatttgtaccagttttatccctatatacatttatgaaataattgaacaaattaaatttaaaattagagtactaaaacaatgagttaaaaagaagatgaatgataaaataaagaaaggaaaagctaattaaaatcaacggttgtgagtgttgagtgagtggtggcgtggttgatgactttagactttattggtattagccaagccaagccaagaacaaagcccactcaaaattttatcaacatcatgtcaccacatatacctaagaatattaatttatttttgaaaattattctaacattatttctaatttctaatataaaataaaccaaaaaaaaaaaaaaatgaatgaaagaaagaaagaaataataagagaggaagacaaagaagccctccttgtttctttctcctttttaattattattattatttttcttctttggttggcaaaatggcttatctttttaatttttcgttttcctctttcatgtgtttttgatatcagtcaaaatattttcccaaaatttcattgcttctcaattcagtttattttttatttttatcatatatatatgtatttaaattttagtggggtaattgatttttt

SEQ ID NO: 44434 - DNA, 844 bp, Cannabis sativa
tatatttaatttgtatctcaatttgtaattaacgactttttggtgtttgatggatgattagataaagaggaagcaatcaacaagtggagtgcttttaggggacgatgttttgacaatggtggtggagccctttattgatcactctttcataatggggctttttgttgtgtatagtctcatcaactgtcgaatgtgatgaaaattacatctgtttctatctcaacatagatatgcatatatttttgtagaaaaagaaaaaagtgtttaaaaagaaaaaagaaattgtgtataaagcactatagttttttttttcagcgaaaacaaaaggcactatagtgatgcttatttccttaatttgtgtaaagtgtaaagaatttgactgcttaaataaagatgtcgcgcgttgcacattaggccatcttcttcaaccttatacatcaaattttgtgtggcaatcacaacactactgaaatttttaaaaatgtctattttttctaatattatactatttttaaataaaatataatatttttttttattattatattaatttacttgtgtataaaataataaaaacacgcatataataaatttaaatcttatttttgttgtgttaattttttttttttttaatttatcaaaatttagaaggtcacctaaaataaatacaacctaagcaactaagaaagaaaaaaatagactaaaatattattcacataccaaaaagttcgaaacagatatggatggatcaacatcctttttagagaatatattcttaatatatatttaagttttggactctgtcttttgcaaaagttatagattggaccctgtattttgttaa

SEQ ID NO: 44435 - DNA, 1544 bp, Cannabis sativa
  modified_base (1229)..(1239): a, c, t, g, unknown or other
ttaaaattgctaaaagtaacctcaaagtatcttaaataataaaataacacataatatagcctaaaaattaataaataaaattatagttttaaagtaatctaattaaaaaatgtaactaaatgtatatgagaaaaaaataatcttgaaacaatttttttaaataaatagtaactaattgatatattatttatatcgaaagcaaccaaaaagttgctctttttaaaacttgcaaaacactaaaatttctggaagcgagaatttttaagttttttctattttcggtaatgattttaaattttggtatttatgctgacattgcaatcggtatttgtgcaaataaatttttgaaggtatttttataaatatatggtgcgtaactttttctgcagctagtaaaatgcgggagaaaataatttgccatatatttatattactttgattctatcttattttgaaatttttggtaaacgataatttatgaaagctaatcaattacgaggatataaaagatttatgttattttgatttcttcccctccaactccaaccccgttactaatgattggaagtattgtttagttactatgtacctattgcatgcgtggattgggacaatatacactctcaaaattgaataaattgcaaattatctgtctatctattgaaaatactaaagtgcctataataaaattaatagggagtagaaatcaccacccaaattcttttttctacataaaattatattaattatgaattagccaaataacaagtgatcaaagtatttctacctcttgaaaaagatgaagagcaaagcaaatatatataaaatcattgactgaataattttcacatgctcattgctaaatttgctataataatatgcagacttaggaaatgactagacctttttattgaaaattataacaagaataagtatatttagatagcccacttgtatctttcttttgttgactagagaatctatatccatatatatataaatatatcctagagtcccactagctagttttggatgcttttagaaattaagttctaaataatagaacacttgaggagtacgactaatatataaaagtattacatatataccgtgcctgcttccatgtgcttctaaaatttacaaactaaagcacactatacgtacgtgccatgcataatcatcattttacttttgcatgttttaagaagaataatatatatatatatatnnnnnnnnnnntatataaatatatatatattgcatgcagaagtaaaaattaattaagttcgcatatataacttacggcttcctaataaactcatactttgatgcgcatgtatattgttatatatgtcaatatatacactttaccttcatatataaatgtttatctaacaatttttgttctacatgatttaacttttattgtgtgttttcacagaataaacctataacaaaactgttaactctaataaaataataaaaatagaacagttgtattcattcacatttttatatataaaaaaaacttagaacaattgcat

SEQ ID NO: 44436 - DNA, 7614 bp, Cannabis sativa
  modified_base (75)..(84): a, c, t, g, unknown or other
tttgaaaacctaattacatatatagcatatcaaataccataaaaagacctaaaaacaaaaaaataccatataaannnnnnnnnnttaaatgtgccatatttatcataaaacttttaaaatcccagagtatgtgtaatttcctcaaactaaaaattagacttcatggtcattacataaaatattatttggaatctcgacaagatcgactattctaattatattcgtgacaaaagttttaatcatattatgtgatagaaatagaaataaaattacagctaatgaatagaattgagaattgtttacattgaatcacatagttatcgatgctccaataggaataaattcccttcaacgcattgataacattctcggagtcactctcaatcatcacaaaatagtacttcttcgagaccgctgattccacaactaacagacaagccatcgcttctccaattagagggtcggagaagttgagcacttttgatgttgcccacaaaattgtctccttattacctctaaccaaagccaccacgtacatcgaatcgaagccaattttcacatcgcatttaattttgacctagtcatctaggtgaggggaccaagcgggagactcagatgtcatcagagaagttaacaaacatgaaccataatctgcgtagcacatataaatagagtcaatatactgtttagtataacatatagaattattatgcaccttctcattatgagctttccagattgtgtcaactacaattgaagcatataggaaaagttcttgaacgttcacacctctagtctttaaactctagagaaattaaacctaatctcacatttgggctccagattccaggatagggaaaacaacccatggggatgatcttcaaaggtgaaagataaagttgcaatagagaaaaatgtgttccatcgtttaatcactctctctacaaaaaggacaggaaacatcctcaatatgcaaccttttagccagaatggagcgaataggcagagctttagagagaatgctccaccaaagcaccttgtgacgctccaaaattcttgaattccaaattttattccacatactcggagcaaaactgcaatgaggagcctgattcaaggtctgaaccaggtaggccgacttagtagagaataaaccatttgactctttagtccaaatccacatgtccgtaccttgacctctaggtttacctcccttggtatcttagttaaattccagtccccattttcagttagtaagtctgttactttctccaaaccctctatccaattgcaattcggttgagggtagaaatctttgccatgccatgcaatgcataatccacgccacggatcggatcctctcctcccagatattagtatctttcccgtctgaaattattttataggcacccggtttaatgattaccttagtttttaccacatttttccagaaccaagagtctgagctcttgtaggcacaattcaagaacgatcttcccttcaggtacttagcacttaggaccttataacatagtgactgatctccagtaagaagagccaagtcccattttccagaagtgcacgtttcatttcctgagttttcctgaagccaagaccacctctagactttggcaaacaaatatgatcccaagccttcaagtagatacccttgtttccccactcacaaccccaccaaaaatccctaaccataccatcaattttagaagcaacctattagatagcttcgttgtttacattgcgtaaaatggtaaggagaggcctactgatttgatcagagtagctagacctgctttagagagaaatttcaacttccacccatgaggcttggagactaggttatcaagaatgaaattaaagtttggatctttatttcaactatgaaacagtgggagccccctataattaatatttctagcggcaatgttaaggccaagttctttcttgatattatgtttcatcccctcgctggtattcttgctgaagaaaatagaaattttcaatttatttatacgttgtcccgactagtcacataatttttccaaacacctctaaatacccttagcctcctccaacgtggctacccacaagaataagatcatttgcgaagaatagatgggaaattcgagtaccattcctactccacttgattcctttaatggttctattgtctagttccctttcaagaatacgcgatagaatctcggccgcccatatgaacaaataaagggatagagaatctccatgccttaaatcgcatttgggggtaagcctattaatctgatatccattcaggcatagattaaacgaggttgtggatatacattgccttaccctattatatgtatattatcagatctggcaacagattcagtagctgacctctcccacatgtatcgtgtctgcaaattggaacaaaagtcaattcgaacaccatcctctatttcagaggctaacatatttcgcttcattttcagttgatcccgaacaaagatattattataaaggaagaagattcaaattaacaaatgtgtgatacaataaaactaaaaactacgaaactggtttcacattgcttctttttatttttattttaaaacttgtgttttcttcaacaagaacacaaaacagtacttatttaaatttaatagattaagaaaaataatactaaaaaaagttttaataaaaaattattattatatataaatattgtccgagtttccaatagatgacaagataaattaattggaaagaaaaagtgatgaaactgtagaatataacttatttccaaaatttacacttttttccaactttatcttaaaaaatggcctactcaaaacaattttaaacagggagtttttcggttggtttagttttgtgatatagcatacttttttttttttgagagaaaagctattattattaatgaacaaattcatttacaagaatagcttcaatggggctaggacaaacagccctccaaacaatatcagaatccacccttaaggcatatctagctagaccatgagcagcaaagttagcgcttcgtggagcataactaatagagataccggggaaagaggacatctgacaaataatatcattaattaagtcattgaatcgcccataatgttgctgaggagtattaacatgctgagagactatgagtgcatcagtttcaatgaagtggatctggcagccaatgtgatgcagccaattaaggcagtaggagatggcttttgcttctatctctttgacagtgaaattccctttaattggcaaagaaattgcagcaatgacatgaccattggagttgcgaacaataccaccaattcccatctgttgattgtcaacatctaaagcaccatcaacattgagtttgtacaaaccgtgagggggaggctgccaaggttaatctctgagtgaagaggtcccctgggtttgagcagtagtagtagcttgacgaaattcataaagataggccattgctttgtctaaaaggacagattgtggaagactataggattgatgtagtgtcttattccgatcataccaaataaaccacatgagagtgaggatagtctccaattgagcatcatcatggcgggagaaacatagatgaagaaaatcactgctgttattgttaaccaaaccagaaaaatcaatggcaaagggaagtttataccataggttcttcacagcccgacagaggaagaaagcatggttaatagattcattgctgtgagcgcatcttgagcatttgggatcatctattatatgtcgatggtgaaggttagcagcaaggggaagtgcattgtggagagtacgccaggcaaaaatcttgatcttgcggggtagtttgagcttccaaaacctattccaccagctggtttgtgattgagagtgtgaaggagatcgagattctcgtagggaagacgccagatgatacccactcttaacagagtatatgcccgatgctgagtgatgccatatgagtttatcttcagaagcatattggcataaaggcaattgcaatatacggtctatgtcaatgctgagaaagtgtctcttgagggcagtgatattccaagtacgatcggtggtgataagatcagaaacatggagattgttgtcaggattcatgagatgcatccgtttaaagttggtaatccccgggagccaggagtcattgatacgaacagaagtacctgtgccaattttccaaataagaccgtcaagaaggagctctttaccccaatggatacttcgccatgtataagagagattgttgcccaacttggcatgtaaaaaaccagtacggctaaaataacggtgatggagaattcgacaaagaagcgaatcaggcttatcaagcaagcgccaagcttgtttagcaaggagagcttgattgaagtcaataaaagattggaatccaaggcctcccatttgtttacttcggcataggtagttccatctcttccaatgtatagaatgaccatttgctttgaaaccccaccaaaaacgagccatcatgctctcaatactgttacagaaagatacaggaagcttgaaacaactcatagcataagtaggtatagattggaccacagcttttagaagaatttctttccccccaatggaaaagagcttttcttgccaagccgtaagaagcttccaaatacgattcttgatttcattaaactcttcactcttattgtgcccagtataggagggaagacccaaatattgctcatgacaagactggataggcattccaaggaggagactaaatgcattctgatctgctgtggaagtgtttggagagaaagacataactgacttatcatagttgatgagttggccggaagcattgctataaacatccaacgtgtgtttaaccacagcaagagaacgagcatcagtacgacaaaataggaggctatcattcgcaaagaggagatgcgagactttaggagcttgtctagtaacaccgagccccgtaagcataccttgctgttcatgtaattgcagcaaccgagaaagtgcttctgaacagacaagaaagagatatggggaaagtggatctccctgtggaataccacgttgaggctgcaactgtcccgtaacatgaccattaataaggaatgaaaagcttgttgaagagatacatcgcataataagcccaacaagaccgtggccaaaccccattttcaatagaacacgctctaaaaaatgccattctactctgtcgaatgctttactcatatcaagtttaagggccgcatagctaactctacccctggttttattgcgtagacaatgaagcaattcataggcaaccaacacattatcaataattaaccggtcaaagataaaggcactttggaattctgaaatgactaagtgcaaaactggcttcatcctgagaacaatagccttggaaatgagcttgtagatgacattacagagactgatgggtcgatattgcgtgacagaggtaggatgcttgactttcggaatgagagttatgagagttttgttgatacatgagggatccgagcgattatttaatacatccaaaacagcagtagtgatatgaggaccaatggtactccaatgattagtaaaaaacataaccgacatcccgtctggccctggacttttgtcatttcccatgctatttaaagcagctagtatctcatcacttgtaaagggttgctgaagaatgaaattcatttcgggtgtaatggttgtgggaatagtatccaaaacaagatccatagcagtagcatcaacaccagcagttgcaaagaggttagcataatagtcctggaaacagccagaaagaccttgcagatcagtcactaactctccattattagtctgaaggtttttgatgtggttattggcttttctaccagaagctcgggagtgaaaatacttggtattagcatcaccagcttttaaccaattaatacgagaacgctggtgccaataagtttcctcttgctcaagaagatcatcaaggattcgttcggattgatgaagatcatagaagaaagcttgactagagagatcagatgctctgagatctgagacttttttctgagcatcagatattttcctcttgatattaccatatttattaatgtgccatgattgcagatgtgaggaaacagtgtgaatattctgaacaacttggtgtagagaattatggtcagaagtagtccaatgtcgatcaacaatttcattgcattcaggatcgttgagccaaagagcttcatagcgaaaacgtgatctgaatttctggttaagaggagggtcattgctggtgtggaatttagttttgagtgccctgtggtctgaagaataatagtccaggtggtgaagagttgtggtattgaaaacattatgccaagaagagttaacaaatccataatcaagacattctttaatgtgtagagaaccaggagcccgattagtccaagtaaagtcacacccagtataatccaaacgagagaggttaccataattcactgcctcatggaaattatcaatgaatgtaaggtctctagtggcaccaccaactttgagatcaggggagaaaatttcattaaattcccccattaccaaccaagggtcaataggggaaatatcagcaagtctcttgagaactctccaagtatgaggtcttagttgtgtttcgggtgcaccataaaaaccagaaaaatagaacttgggaatattgtcacattgaacatagcaagtaatatgattcattgaataattcagcaaagttacatcaatattatctttccataacaacattaatccacccccaagacccctcctaggaacttcaaagccattgggaaaattcaaagcagctctaatcttattaatagacccagtaggtaactttgtctccataagaaacaataaatggggagcctgttgagaattaagcaggcgcagttgacggaatttgctcggtttccccaacccccgagcattccaacttatagcaatcatggcgagtggcgggtgtagctcaatcagcagaatgtgttgataattggtcattcacaaaggctgcaatgtcatccgaagcttcagaaggcaagacagttgaggattcaatagtgtccatcatggtatacataaggtcttggttggaggaactttcagcagtattctgtagtcgacagcgtttgagtatagatcgcaaggaatctccagtatggacagcttggcgtttgtaagtatgagtagcagtaggaaggttattgtcagctatggtagtgttaggaggagttgatattatgggtgagccatgagcagagtgtgttggcaaagttaattttggcaagatgttggggggattagatagatgggtgggcagtggaatgtgggtttgtgttggtgatgagttgtggtgggatttttgtaatgtttgatattatgggattttgatgggaagatgctggtatggtgttcgggggaggttgtaaggcttgttgtatggtgttgcggacaaaacgagttagtaaaggccatgccacattgttggctttacttcctcgcaaaggacggcca

SEQ ID NO: 44437 - DNA, 1926 bp, Cannabis sativa
ttaataaaaaaggatagtcgagaagcttccatatattttgtgcaaatggacaccaaagtacagcatgtacatttgaatcaacaccataaccacataaaggacaattactatttgtccatacttttcttcaaagtaacccctttactgtaggcagaatctcataaaatccttatttaagcaaaaaataatattttaggtggtatctttattgcctaaaaagatttctaccatttcgataaagcatctgtcgatgagaaagggagaaatttgttagaatttattgccaaattatatctagtaccaacaaaataggtcccatggttcgtgtgatgccattgccacgaatcttcatgattatatgttctaagaggaatagtcattataagcttagagttaatagccattaaaattttatgaatatatccttcattccattgtcctggagaaagtataaaattagatactgtcattgaatcagatgttcctcttgtaattggcaaaaaggagggttgtcttggtatctatggatctttaaatgctttagtttctcgaccattacctattcttcttcttagacatagaataagcaactctctgtcccataaaatatcccgccatatcatagacgaatgactaccttcttctacttccaaaaaaatttgtcttggaaaatatcttcctttgagtacttgtgaaataagcaatctaggatgaatcaatatacgccatgcttgtttagctaacaacgcttggttatattgtataaaccttctgaagtatagacctccttctatttttggcatacatatcttatgccatactttccaatggattttcttcttagtttgaaaagatccccaccagtatcttgccaacaaaccttcaatttcctcacatgttcctactggaattctaaaacaagacattagacacgtcggcatagcttggatgactaccttcagaaggattttctttccaacttgtgaaaacaatttagccttctacaaatttaactattaccaaatcttatcctttattggcctgaacatcattttcttatttctccccacatcattggtatacctaaatatgtttcaattttatccgtccttctcatttcaagattagccatatacatcaattgaatattcgcaggtgtattaggagtgaaaaaaagaatggttttattgaaattgattacctacctaacacacataaatataagataaaaccattatttaaattttgcgttaaaataatagactaactaagcaaataataatataattttgcatacctgtcctgataaattccgaataaagggaaaaaattctttatatagggaccaaagatctctctgatgctcttacaattatcatgctatcatcagtaaaaaagagatgtgtaatagaaggagcagaattggccacttttaagcctagtatgtctcttcgactcacagcttttcatagaagtgctaaaagccttttgcagaaatcaaaaacagatatggtggtgaatcaccctttcttaaacctcttgatggagtcacttctctatatttctgaccattaatttggaatgaataatgaacagaggtgacacatctcattaacttacatacccagggttatttaaaatctaacttaagtagcattctttcaatgaacacccactcaactagattcaggaaactttcacttatttcatgcttatattcaactagttggttaagtatgattataacaaatatgaacaaagaatgaaggcaacttatggtaggtgatcccattttaattcttctctattacacaatgatatataaatagagaggtgttgatcataattaggtttcaaataaaaaaaatattttatccatttttgttgaattaactattaacaacgattattttggattggcaatag

SEQ ID NO: 44438 - DNA, 1742 bp, Cannabis sativa
aaaaaaagaaaccaaaaactcatcaccgacctcgaaccgaccattggcgtccgccacatgcagtggagacagcttgcctcgacctttggtctgcgccaatgaggatcgatcagcctccgccagggcttcgacgagctcaagttcaccatctctgatagctccaaaaagagcattttcacggcgctccctgcagctcaagccctgacccatttctctgtgtagtccgaacgtgaagtcagcagtacatgggagcgtttccccacacgccgctgtctacgctggtgtggtggagtcaggacctttggttgaggttgaggttgagagcaaaaggtaatctaagtaatgggcagagagaaggggttcgttggagcttggacctgcccgccgagatttcgggcagctgaccgtacctgcaatctattttatttatttatatattattattttttaaaatgagcaatctattttatttataaatttcaaattttagtttgattgaaaagagaaatatattgttttcaaaaaaaaaaaaaagaaaaagaaaagagaaatacaaggctatttattcaatgtcaaatattaacaatatattaattaataaaaaaggcatccaatctcattcatccatattacctttatattattttatgttattattattattttactttgttattattttattatttgagtctctttctttgtcaaaaaaatggagttcatttcacacatgactcatttcttttattttattgcagtttttaaaaatttctttttcttaaagcaaattttcaacacatttttctcataatgttggcagtcaactttttgtgtttttctttttgttatgttttccctttgtagccgccacataattttcatgaatcatggagttaatatctttttttaaaggatcattgaaataatttgaatagtagttttttttttaagaagtaatatatcaatcaatacgtcaattggataaaattcattacaaggggataatgcagacagcaaaattcactagttatgcttatcaaacagtttacaatggtcattacaaatttttttctttcatttctctcccgaaattgctcagaaattctttagggacttttcccttcctcttttgatccttcgtatactcttttggtgtgatgcacaactacccttactcttctttctctttccttcattagtgctcttccttcatcattaaaaaacattaatgcttcccacccctctctaaaaccgagaattccatttattgaaccttcagaaaatccctggttatcctcctccctggcatctaatcgagcatttaattccagtcgccatttttcaggtggatacgaatcatcgtctcgattttgggcaggcgaagatctaggctagtgatggctaggattgatatagcatctctacatctttcgtctactgttctctccaggtattatttctattttcttatgtatttaaggttaatcaagttgttcaggtgttattccatatctgtgttattctctttgtcttctcttagtttctccctctgcatgttgaccaccatgagcaccctcactgataaccctaaccactccatctaactcacagatgaggaggctttgatccatgactttgatcatgtctccatccaccctgaaccccaagccgattccttttgccttgttgttaagatcctatccccaaaaactatcaagcctgattggattcacaacgccatg

SEQ ID NO: 44439 - DNA, 9757 bp, Cannabis sativa
ttatttcattcttttgtttaattgtatattaaataatataagtattaaaatatcattttaatagaatggtctttctactattttgatagaatgactattccatatttcaaaatatagaatgaaagatcatttccaatattccaatgcatgatttagcaaaaaatttaataatttttttatcaatttttctatatattttaaattttaattaattttatttctatttctatttaaattctcatatattcttatttttatatatttcattcttctcatttaattacttaattaataatttccttccactttcactgaaaatataaataaaataaataaacaaatataggagtttgattctctaggaccctccgagggccaagtgcagctgtcaaagggaatagggaaatatatagatgaagaaaatgatcagctgcatctatggttcgatctatttctgtacaatccaatcagacttaagccatctatatgcctaaataatatctccattcaataagttaaattaatataccatatcaaatatcattgtatataactttatatatattatttgtataattctatttaatttaatttatccatgtgggcatacataaaactgtcggcctgagtctatgcctccttcatataaaatagtaattaatgcataataataaatatatcatcaattttaatatgtatatgccatacatatataggtgacatctacataattgtctgcttttaaatttcatcataaatcgacatcaaaattaaacaattaattaatatgcaagtttcatacaaaaatcttatttgttatataacataacacacaattataagatgaagaatcatattattataaattgaattgtcaactggtaactaattattaacttcataggaaaatgttcttgttaccatatatatgtttcactatataacaaactctagcttcttttgtccccagtaactaattatagtgtaggccaacaaatttcagtggtgaagtgaaactatataaatatatatattttgagtattaagattaagaaaatacaaagtatgtttatttaaccttgtattagagtttacaattaattatctaaatattaatttaaatatagtaataataaaaagtaataaacttaatatatttaattatatgttttaaatatatacaaattaatatagttttaattttatttataaaaaatacatctaattaattttattaaacaataaaataaataaataattatagatattttaagcataataactaataaatttgttataaatgtataattaattaaattaatgtttaataattcaaattaaaattaaaatttatataaaaaaaataattatctaattttattaatacttttaataattatctaattatattttaataaataaattaaatttaaatatttaaaactaattttttaaaaaataattaattaattgattgattaacaacactattaattttaacctgctaaacttaacggaaaattttaaaaaaaaaaaattaaacaattacatttaatataagagatatatttttttcatcataaatatagcatcaataataataaaaaaaaaattgattgaattatttagtaatattgttaaatgtattaattgtagtcacacagaaattagcaccaaaaaaattaattaatatatatgtaatagacccacgtttttttttctttttactttgtatatactttatacccaacttacaagcgtgagtgatttattgtgggtaaataagagtgagagatataagtataatatataacaacaaagtgaaagtaaaagtaaaaaagtataaattaaaataaacttaaattaaacataagagtagtatagctagtacatggctgaatttttcaatatataatcacttgatcatttgcgtaagcacttgatgagtcactcatgtgatagttacatataaacataaatatatcaatttttaatcatacttattttgaatatgttgaacatgaattgttcacactatgaaataatataaagaaattaaaggctgtccaaatgagttacattaacaattaatatatagatattatcaagtaataatatataacagcaaaattcatgttttatctcatcttatctcttcttccctaaaaaaatatcttatctgatatatatatatacgtcatataaactaataaataattataattattaattaggtggactgaatttgtatatgtaataaatatatttcatatagatctttctcttttttattaataatttacttacatcacaatttgaccaactttgcctttttatatatatatacatatataggaaattcatgtttctaaattgaaataataacatttttaggatcataatatatctataactaatggctgtgataattaatatggagaaaccatgcatgcatttataaagctggtcgactaattactgtggtacggagtttttttataaaaaaattatatggctaatacgatttaataatttgggatccatgtttttgtacttgaattaaaattattttatatgaataaacataattattatttatatatgttgtccttaagtttaactaatgatatagagactagttttctctatcttttagagtcaaatatatatagctatataattaaaagtgttattttttaaaaaatattatataattcaaatttaaatttacaacacatatttttcttatttttcatgttattttaaatatatatggctatataatataatatacttttttaacattacaatttacaattattttacatatatttaaaaaaaatatatttctattatcattttttttacaccattcacataaaaaatgtctttctaatatttttttctttttaaacactattgtgacgctgttatacctaatgtagttaccgaacaaaatatttttattattaattaaaaaataaaaaagtatatagtatttctaaaaaaattaaatattattatatttttttataaatagcaattaaattaaatattttttattaaaaaatgatattgtacaacttcaaaaaaaaaataattaaacaactaaaatatatactaaataaaaattaaaatatataatatatttatgaggaagattgcttaattgaatatagtattgtgataagggttttgtttttcatggttagctctcttgcatttttttttagaattgtaaacttcaagaggattcaagataagctatatatatgagtgtgataatgccttaaataaaatgatgtaattttgagttgtttcataattattgttgatcaataatctgattttagatttcatatatatgaaattactaacacaacaatgttcgtccgtgcgcataatgtttagtaattatttatagataatactcattgaaaattgttttatatatatatatatatatgatgatgatgatgatgatgagtttttgaaagaaaaaatgaatggttgtgtaatgacctaaaaaggaaaaataagtagagagtgaataagtagtgtatgtattggtatagtttgtttgtgctacattagtgggtgcatggcactagtattaattagtggcatacacacatctaattaatacaccacacaatctgaatctcaaatctatatatgctttggttggagcttccatcagtcacctatcatcacataatattaattatatattattattaagtcaaaaattatatatatattgtgtcacaataagataacaacactagttctcaaattaaatttttgccatactataacaaaaatcgactaattaattaatttatttttcttattaattacattacgtacgtgtatatagaaattaaactgttatattaattaattagtgcgaatatattcttattttacgtatctaataaatttgtgaggtgaatatataaaaatataataaatatagttaagatggaaaaggtataaagagatggggatgaggctagggtttttgtttttgggaagaaaacaaattagaatataataagataagataataatcttttttatataatatatactaaataaaattaattgatatatatatatatataaatgtgaattagatctgactatctgaggtgaggagagaaccaccacgattgatcgatctgcagtatgggaccttatataaatattatatgtataaatattaaaatctgtcagtctctcctgatctgcattagaacactatgcatgcatggttcatcaatctgtaaactgtcatattttttgttttttgttttttttttaagttttaagaaaaaagaaatttaattaaccaaatatagagttcatagataacaaagttgaactatttttacaaagtaagttaagataatcggtgtagatattttactaagttgtttacaattcaaaaaattattaatcccaatataatagctaattattaattaccatatgactccacaaaattttatttctatggacacgaatattgacacaacatactctagtactcctaccaaagaagatatagcatgaaaaataactcaaattaatttctaaaatgcacgattttagggaactactatttttacacctttggtttctcactgaagagggttcctacccttagtttggattttaatattgcaaataagtgtcgtctccctctttacactttaggattctgtttttccttttgtttgacatatattgatatcttgtttttcgcatctcttagactgccttttcaagtcgcttctaattcaggagctggagaagagggtaactttctacaagtgatcatttttatccaaggagttgcaagtagagaagcttgtgaccaagaagtaggtctcattgccccacaccaggacgtggctcacctttccgtgaaggacatagtctaggacactctacgaggggacccaaacgaggttagggaggtcatcgcaattattactgctgaagaatactacaaaaaaagactgcttttagtgacaaccttttagtcacaacagaaaaattttgtgacaaaatatgacttttagtcacaaaaaaatttcttgtgactaaacatagtatttagatacaagttctcactaatttagctttggtcacaacaagtattgtgactaaaaacacatttagtcacaacaaagtaattttttgactaatacttttagccacgaactttttagtcacaatgtaggagaaaaatttataattagtcacaacttttttacatttagtcacaagtttagtaaaaaaatttgtagtggaagctttgaaggcaatgaagttcgatgagcaatggttggtagattggaggagacaattcccaaaaagcctaagcaaggctgaagaacttactatccgattcaaggaggtagtgtgtaatgagggtgctccgggagcgagcacctccagtagtagtgaacacccttccatataattagggctcccactacaattgatcttgagactgtcattcaatgtggatttaatccatatttcttaaacttagaccagtgtagatatccatacagtaagtatatatatagatagagtagattgcatcatataagagtcctaaccacttgtgtaccatcatgtcagagtagatgtgtttagtacaatttactttccaagcttctttcaatacgagaataactcaggttaagaagatatcgctctttttgttaggaaaaaaattaattatactaaagttaatagtttagatcttcttaatgtcttgcatgatgatgtattgtaaagatcatatcttttattgtagtcttgtttgatggatattttgttcattttatgcaaatcaaccagccactctacaaatgagattgttgaataggttcctggagaaaatcaaatcttgatctaacgaggtttgggaaattgcccaggggagtagagataaaggaaagaaggactagggttctgggagcagatctcagcagccagcacctctggcttcgaatctgaaagctgcttctaaggctccaggcacggaggccatgtccacttccatcattgacctaacagaacctgtcctggttatggaaccgttaaagcaggttcttatggaaaacacttagagaaaatagttctgattatgatgggccagtcgcgatcaacgaaaagcaagctgactcttttgaaggtggcgctagcaagaagatgagggtggagaccaacgagaaggtagacctcaaaaacttaatcccagaagggatctgatacatctaatggcggatggctgcctaggcgaagcaccagaacatccagggacaccctaaatagctaagggagccaccattttaaaaaatatatataatttatttaatttatatgtattgtaagatttttaatttaataaaaattatattattggtaccctcaagtttttttaattatttaaaaaattgttatgatttttcattctcttaaaaatgaattaattaaatttaactcttacatttgtgaagttattttaggcaatgtagcataaatacaaaattttgcatataaaaatatacgtatacatttaactgaagtggactcatcaaaataagaatactctagagagtctagatagtggatattatttgtatatatcttttttttatataaaataaaattacaaaaattattttatatttctcataatatcttgaaagcatctttattgttttaaaaattaaaaataaaactaaagaagtacaaataaaataagaagaaaaactatacttttttatttatttatttttgcgacaaatttatatatttctctttttttagaaggaaaatctatacatttctattaaagctctagggctgctacgatgcaattaatgttaagaaaataaatgataatatatattatggtaaaataaagttaaatattaagatatattaaatcatattttttaaaaaaaataaaaaatagctcttaattttttacgaattattgagattattaaatttaatttttttttatctaatttcattcaatttactaattaaaatattcttcttaaattttgatctaccatattatatcactcaaatttttacctgtactaaattatatcttgaatttttttattttaaattttcgaaaatttttaaatacaacaatctcaatagtttaagaaatttttaaaatcttaaaaatttaaaagtaaaatttaatatattaaaagttgtgagataaaaaccttaattaactttatttaaataaataataatataagtagcacacttcaccttctaggctgctatgataattattacaaaaaaaaaaaaatccataaataaaattaaaaaagaaataaataaagaagggcatttaagtcatttcacagagcgagaaccagtataaaagacgctcgactcatctcgttaaactttagctgcgaaaaacacctaacaccccatccaaattttcgccaactctcgccggagatcttctccttctcagtctccgacgtactacaccaccggccggaaatcccagctgagaaattctctaaccttttctatctccacatccaaaagggttcatcgttaatttgtgtcttagttttcatttttaccggtatcggagattggtagaagtggtggtggtatgatgggattttgtatttgtccgttggaaacgccggcaaggttactgtggagtaccagcttcttccgccacaagattatgatcttttaataataattattattattatctatcttaaactcccgaccccaccaccaatatatatacaaatatatatatataacagaaataaaatcaaaaccacgtaaaatattcgtgctttgagttgccggaatctaaagtttgccggagatcttacgcagaaattcataaagaagaagaaataataggaaaatggaggccggtcgtcttttctttgatcccacgtccggttgccacgctggcaacatgttgttcctcggaaatggagatcccgtttttcgaggtagttattatatattattatcatttaataaattcttgagatttattattcagcaaattagaatttttattttttgagataagtacttatattcaatgcagtttaattttgctaacttaataattatttatttatcaaattatgttccttaatttaaatatttagtcttcaaattttaacatgaattacatattaaaatttgaataataaaatttttaaaataaatattattttagactctgtatttttataaaaattattaattagattttttattttattaaatattagaatagatcttatattttccaaaataacaaaaatatgacactggttcaattttaaaaaaaattatttttaaacataataaacttttaagacaatttaattttgtcataagattactagattagattattattatattttatattgacaaaaaattaattcagtgttctatttattataatacattaacaaaatagatggtccaattagtaactttttaaaaaaaatctaaaataatatatactctttttaactaattattattgttattctttaccttttatgttgggaaatacaataaatacattgttttttaattacagtggtaaaaaagtaaaatataatcacgttacacgtacttaaatttttgtgtgtaatatttagtttggaataatgaataagaagttgggtttaatatatacataattaattaataagttgaatttttgtattaagcaatatatgaaatgatttgtattgtatgattatagggccaacaagatcatcaatgatgagcatggatattaatgaaagctccaaaaagagacctttctttagctcacccgaagatctttacgatgacgattattacgatgaccagttgccggagaagaagcgccgcctcactcctgagcaggtatacatatatatatatatataataaactatatatatagctcgttaatttctatcctaatctcaaaaataatattcctttaattagatcatatatatatatatagcttgtctttttattcttcacttttttatatttaatgtatctggtttttatagggaaaaaagtaattaacggatcgaatattagaataatatctagagttatatattaattaagagaattgttattgtacactagaccagttttagtcactttagacacattttgtttatgtcccatttgtccaaatacacactactacactgtatgattactaaataatgattcgattaattatagcttttcttgatatatataaagtttgacccttttttagttttaaaagttatatatttatgtatatatatatggattggattggatattgataaaattgatgatgataattaattaggtgcatctgttggagaagagctttgagtcagagaacaagctggagcctgatcggaaaagccagctggcaaagaagttaggtctgcagccgagacaggtggcggtgtggttccagaaccgccgggcacggtggaagacaaagcaactggaaagggattatgatcttctcaaatcctcttatgattccctttctgctaattatgactccattcttaaacacaatgataatctcaaatctcaggtacatacacttcacttgttattattacttaataaatttaattatatgatcacgtcctaattaattaattaaggtgccgtttgataa

SEQ ID NO: 44440 - DNA, 2371 bp, Cannabis sativa
aaagtgtggaattgggtagctgaatagttagctctaactcttagatggacaaggcatcattgcttgccgaagtgataagccacttgaaagatcttaagaggaaaacagcagaaacgagtgaagattgtgctatacctaaagattttgatgaagtaaaagtggagcctgaggatgaaatggaaggaaggccttattcaattagagtatctctaagttgtgactataaacctgggcttctatctgatttaagacaagcacttgatgctttacaactgataataatgagggctgagattgctaccttaggatgtagaatgaagaatgtctttgttataaccgcctgcaacgaagacaaggttcatgcaaggtctatctaccaggctcttaggtctgtactcgacaagtttgctgtttcagaacagttcattggagctacactttctaacaagaagagaagagcttctgtattcattccttaaagagtttatcttcatgaggagatatttggtgtatgtatgtatccaattgcatagattttagtcaaccaaatgcatatacttcagacatgaatgatattgatactggtatagttagaaatatctgtgttttccttttctttctttagtatattcatgtagatgtatattccaatgtcttattctctaaaaaataatttgttgtaatatgaattgaatagtagaaagaaagtttgttgtattggacataatttgcatatggaatcttgcccttgatgtctattctgaatttgttaacacaatggtaaactaacaaaatctctaattacatttttaatttaaaaaggaaaatcgtatagacaagacaaatgtttattttattattacaaaatatagtcacaatcaggggttcaaatgtatgaccatgatcaatgtattaggatggataagtacaatcatcaagattattgatgatgtatcaatattatttattctctgacctgttttatacacgtcgaagtccataattttataatggtgtcctactttaatacctaactagccacaaatactctgttttgcataacagagaatgaaataattttcactaatttagtatacgaatgtgaataaagtctcaactaccatcatttatagcagtaataataataataataaaactattgagttgtgattaatttgataagaagattccgagtttcaaaaacattacatacaatacgactgcctcctagaacctttgatgaaacagctgtatggctgccgtgattcagatcagagagacttcatcaccattgccacacttacccatatcgtgtcaggtagttgtcattgttgcttttattactattaattatgagactattttcattcataagtctaattttaattattcatacttactaccatggatattaatttttctaatattggcaagtcttttggagaccttcatttcattattgaactgcaactttatgttgttgaaataaagcattaattcttcaaataggtagaagataatgataatgttgtaaaataagtaagcataaacagtgctagctgcaaaaacattgtacactcttaacactttttaggtcccgttctaccactttgttgggtgattattttaggttgaatattatttatttgaattagactctcacggttttgtttttgggacctttctcgtactaaaagagtaggtggaacatttatatccaagacaattcttgcctattattccaatatggaacttaggttgatacctcaacaatccttccctcaaactaaagatcacatactcgtagcctcctacaaaactcactgcctgaccatcacatttgttgggaagactttcgacacaggtcctaacaccaatctctatcttgtactactgtaatcatcaacaagacacgccgcctgaccaccacaatatcagatagactttcaatacaaggcactatatagattttcaatcagtcatcattgagggcttctcccacacatcactaatacaactcactatcttagtgctcttgaacctttggcttgataccacttgttaggtccctcaccttgactctcacattagtatgatattatccgctttgggactagattctcacgattttatttttggatatcttcccaaaatacctcataccattagggtaagtgaaacacttatctaatacaactcttgcctatccttcttccaacgtgcgacttgaattaattcctcaacaacacttttttactctacttgttctataaaaacaacaaatggaaagacaataaaaatgaaggctgaaaacttgttctaatattccaagttaattgatcatgtaatttcacttagaagattagagcaa

SEQ ID NO: 44441 - DNA, 4105 bp, Cannabis sativa
  modified_base (1922)..(1922): a, c, t, g, unknown or other
attcaaataaggttagacctcatggtcattacaaattaaattgtctggtagcgaggctaccgggatattcccaaacacctgatgagcaaaagcccatctaacccagctattattttgagtattattttgagttctctttcagctattattttgagtggtagatgaccatcaaggaaggagagtggtagatgaccatcatccccatacacgtgtttccaaaatctataacaaaaatattttacttcaatcatcatataattaaataataacaaaaataatatatatatctataataatatattgttacaattataactattcgaatatatagagataataatatcgattcaattattttaaagggtagaacttagatatattcctaactcttctatcaagataacataacttataattatagtgataatgcatattttttactgtgttaattgtaacacaagacaggttctcacatttttctagtatataacaaatttttgttaattataattagaataaggacaattaagaaaataaatctagactttggtattctaaatcatgctcgtaaatttattaaactattaaaattgttgaattaaaaaataaaaattttgacaatttaattttattaacaagcacctgatctgaataaaaaattaaaaaacaaagcctaattaaacctaattaagctattaaaattttcgtccaaactactaaaattattgaattattgagcgatttttgtatgacacgatttaacagttatcaaagttcagataatatgatttagtagataaataattaccaaattaataaaattaaacaaaaatggttaaatacaaccatttcaataatcataaaaaaaccactatatatataacaccctattctaaagcaacaaaacactcgtaacattatagcttaattttcttttgatctctaatggaggctttacgacgtcgtttgagaactacagaagctccaccactccacaaagctgaactctcccgtttcacaatcccaaaccgaatcttcacgctactttacgcctcagcagtggtgacactactctatcaccacactgtcacactatcaaaaactcacttattcatttccacatccttactgttatccgacgtcgttttggctgtcatttgggtcacctcacagtcgtttcgaatcagacccatttaccgtaaagagtttccccaatatataaataaagaatcgtcggagaatgagtttccggcgattgacgtgttcgtttgtacggcggatccgtacaaggagccaccgatgaacgtggtgaacactgtgatttccgctatgggttttgattatccggcggagaaggtttctgtttacgtttccgatgacggtggctctgatttgactctgtttggtttgatggagggtgctaagttcgctgctcattggttgccgttttgtgtggaaaacgacgtcgttcagaggtgtcctgaggcctattttgcttctgctaatctttcttcttctaatttggatattcacaggattaaggtactattattattattattattattattataaaaggtaaatagcggcataattattaaagtttcaagtttttaaatggcataaattcaatgtttatttttagccgcataagtactaatatttgtaaaactgtaattttttttctaattttgtcagtacagactctattattgttttaaacagggcacatataaaatccaaaattctagatcattgggtctagatagaaatatgtagtattagttacttccaaatattcttttaataaatttaaaatagagtctgtacgaaactggaagaaaattacagttttacaaatatttggtacttatgtcgctaaaaataaacattgggtgtatgccgcttacaaacttaaaacnttgggtacttatgccgctatttatcctaaaataaatgacgataaaaatgttttattttacaattttattgcagtagtatcttttttagttattaagtgtctattaagcatgttaaatcttagctcaaaaacacttgattacatatatttttttagtttatttaacatgtggtttaataatatgtcaaacaaaagtacaatcgtaacaaaatcgtaaaataaattacttttactattactttttttatttgtattatatgtgtaacaattgtaaatattaaaagagtttcgtcgtaaatattttttattattgttattattaattaatattgctaatttatattagagatattaatattataataagttattttcattagaaactctaataattaatgtgtgagaaatattaactgttgtaatggatgatgagatattatatttggttctaatatattagtggtaaaattaattttattttaaaaatatatttgcagtgaatttttttatgttttgattttttacatttaatttttttagggcaaaatttatttatatttattttttatatatataaatttgaggtgcatgttggataccacctttaaacatcaacttaattattattgtattggattcgaagttaaatttttacgtataaataatgacgtttatttagtatttaatggtaatattttattgacgtcttaaatttatataaaaaaattaaacttaataaagtattgtcatcagaaaaagaaaaataaaaaaattaagtgtataaaattaaatcataatatactcgtcgccaattactaagtcaagcaatcaattctttgaaaagccacaagaacaataattttgattgaaaatgtataaaggttttattatatttataaataaaatataaaatttattaataatattaataagcaaaaaataaatatatattgtaggataaaatttggtattatattttatgttaatttaaattatattatatactattattagagtttcatttatagcacttgctctaaggtgttaagcacaagtggtatattggtgtattttattcttcaattttatatattttaatttaatataagtaattaaaaatttgttaactaattataaaataacatatcaaactagtgttaataggtatcaaataacaatattcttaatatatagtatgtctgtatgtggttataatttctttgtgcaatattattgtaattagttcttgagaaattttattttttcttacaaaatatattttctttatttacactaattttttaattttttttcttttgtatatattttttttaataaaaatggtacataaatttttattagaaaaaaaaaattatacatgcactcgaaaaaataaatcaaaataaatattaaaaataacacaatataatgtaaaaatagttaagaaaatattaagaattattttttattaatattaaagtacaaggtacaaataaaatttataagtattaattttttattcattaatagctattaatctaattaaataacaccataaaaaattgaattgaataacaataattatttttaattatattcaaacgatcaatcgctattatttgcaacttgcaagtccacattaagtttttgtttgaaattggacattatttttttttaattaaaaattggacattattagtcaatccatttcaaataaaaaaaagaaggtatttagatttttattatatatttattttataacaaagatactatgtctattttaaagtaatttttcattttaacaaaaaaaaaaaaaattaaataatttatagtggcgaaatttttttataatttattattatttatttattcatttaaatatgtgcaataaattattttgaacttcacttttttactatggactactaaaaaaatttaaaacagataaattatttattataactacaaaataagtttttatattataaaaggattaatataagaattttttatttttatattttaaaatattttttttatatttttataaaaattcatttaataactcacgtagtaactaataaaataatctaaactgtaataaaaatttgggtaaatactattttggaccctgtgttttgcaaaaattacagattgaaccctgtattttattaaatgacaaaa

SEQ ID NO: 44442 - DNA, 1753 bp, Cannabis sativa
tcacgtttcaagttgccgaattggagtgctttatcaggtgggttttgtatctttgagctctttggattaattctgtaatgatggttaaactttgttcctggtgtaatagacaataataacatcctaacatactgttataatgctcgtatactgctcgtagttgttgggaatacattatgggttgttttcatttacattatgccttgtatagttatgttttcactggcactttatacatgtattctcgacaaaactgctcctgatgatgtctcggtggttctatctgctgcaattatattgttaaattcaaaattaatgcagttactcttgataaggctttgccacaatacaagcatttaacatgtaaagataatccataaggtactggagttgcttgatatctcttttaataaagggagcaagtccatctgatcttacactgaaatggaacaaaagaacttaaaatagcacagcagttaactggatctgcagattactttaaccctactgagggaggcaaagttctccaagagtgtagagatatattagagcaagcagaaaaaagggcatcatcatctgccgaggaaattgttgtaaggtaattactttatatgtgcatagaaaaaactccctgttgttctcccatgcgccaaaaggttcaaatctccaaggataactctttctttcttcttgatgttaagatattcattcctaattttacggctcccccttcatgaaaaattaaaaattgcttgctatgtaataaatctgtgtgttatgtgcaactcattatgagtcacctgcttgatgatatttttcctactctatctccacacaaaaatatgagagggtgttgtacaaatgcgagtttgggggatttctagaatgtataataggttatttatttgttatcatttgttgcttcatctcatttactttacacggttatcttttagatatgaataggcattattttcctttgtcttctctggctaaggctctaattaattgatgattatgcttttctaaatgggctaaggtcaagaattcagctggagaggacaacaactctcttgaacaggtaagtacatctatcaatccttgtgctatgttgcactacacgaaagtcaggttagagctcactaagattactacttccccagaaattacttgttaccttttttaaaatgcgtttgattttagaagtgtgtggctcgcctctcacttaacagatatgcaatacttaaaacttgcatatatttaaagccaagagagaaaaatcttaattgtgattgtaagattgtttggtgtaagagaatttaataaaccaaataaaaagaaatttgaacatttattttaggagttaaataacttaaatctgatttctgaatcaaagaacgagtgctgatgacttgtcacagttggcttatttgggagacggcactccattagaacggctagtgaagtaaagaagatacatggaagttctaacaaaagcatttaatgaggactaacaacaaattgatcggtttgttttatcctattctttatcttcatcttcaataaggttggtcaggagtctaataatggtaagccgagcataaagaaatagcaagtccttgacatctatataattttttatattatcaattagtataaaaattactaggaaaaagaaaaatcataaaagattgattacatatgcatgattcatagttgatgtcagtgttttaatttcattttcctcttctat

SEQ ID NO: 44443 - DNA, 2448 bp, Cannabis sativa
gtcggttggatccattggatttacatgtcatccaagaaccgaccgatccaatattggattttcaaaaatatcatccgatccaatccaatcatgattggatattcaattttggccatcggttgacattggatcggtcggtttgtcattagattggatcatttctggacaaccctagtcccacgtactactttttatttaaattttataattatgtatattcttttaaaaaattgattagtaataaagtaatttttttaaaaaaattaaataataccacatgaccattgctcattttagacaagagcattgtaattggatattggtggcgcccatcactttttagatgttatgccctacaactacaattaatttgtgatatttcctaaaagttattttatgagacctgatacttaattacatgacaccaaggagcgtgttaggcactggtaacatttctctttggacaataatgatcacaaaattaatttaaaatgttgaccaaaatacacatgtgtcaaagagcactacatgggcaaccgccgttggagatgctctaatgtaattaagtataggtggtggtacaaattaagggtgctcatccaaccgcctacactgtacaaattgctcgcgcaccgcatcacatcatataaaaatgctgtttgaaatcttttgcagtgcggctgtgatttacccggtatagtgttatttgcaatttcgaatttaataattgcggttcaaaccgtaccatattatatattataaagttacaaatttgtacagatttttattctttttcatttgaaaaataaatatatatatataatatatattattttttaaaaataaatcaatataataacttaatgattaatatatattaagatattaaaatttaataaaatattttttttgttttattaaaattttagtagattaatttttaaattttcattataatttgataataataatagtgtaaattatttaaatcatactgtatttttgcagtgcagtttttaaaattttaaaatttcacgctttgagaaattataaaaaccgcatataccattaggtttgaaaaaaaaattacaacccgcactactcaaactgcgaacacgaagatgtccaatagtaaattattagtaatgctcctcccaattgaaacacccctgtacaccggtcccacacgcacgtacttaccgctacaggtagtttcgaccgaaggtctcctcaatagaaattgaactgaattggttttctttttctataacaatttatttttgtaagtaatttttgatttatagtaaacgtttctactgcctttttcctcgagtgccatcttgaaattcaaactcagctaaagcggagatgcatctatggccttcaacaaagctgagggactcattcaagttcccttatgtcagaaatctcgacaggaaaaccagtcaaatgagagctgaaaagagagcttccgctgccctacaacagaacctgttggatgctgaagccggagcttccgttaatggaaaaatggccgataactgtcaaaattcggagggtcaaagtcaaagtcggtttattcatatttgtaaaatggttctgctttctttaacgtgcggttgctgctgctgtggaggtatatacaacttgttctatctctatttttctaacgttcaaattggtcttttgcatttgggttttgtttatgtgtgactttagattgtgaatttgtattgttgatttatatgccgagtgatcgtttcgttgaccaaaattaagtttttcgttttgtctcttaaatcttttgttttagcagtttcgctgcaattctttacttggattaatatgggttttacattatttgtggcttgagatgtggagttatgttgaattttactccatggattaagctgacactgccaatgagaaatgacaattctaaaggcttttaagtcaactgttttcctgtgttgagttgagatattctgggagaaagaattaaacaggtgattggaaactgttagctgtaaacaagccatgaattggataaattaccatttaagatttagaactgatttcctcgttcaatttgggtcatggaacaaagatcacaataacccaaagatatagaatttcttttgttggatttaaaagatatgttttggaggagaatgtttatggagcttttgtttagctaaaactataaggcctagcaaatcaacacattagtgtaattgcttgatggtaagaggttgtctacgtggttataaagtttgtggacgtgctaaagattgcttggagtagcattcagtcttctttgaagattttgttctgttgacagagtagattggtgtagagatagaatagataaagtacgagtttaggaaaataatttgcaattgtctacttggtcattttgttaggtttattaaggctataagcctaaaa

SEQ ID NO: 44444 - DNA, 1509 bp, Cannabis sativa
  modified_base (26)..(53): a, c, t, g, unknown or other
cttgatttttttataacaaattagannnnnnnnnnnnnnnnnnnnnnnnnnnntagaggttctactgtatatactttacattgtataatttgagattcgatttcaagaaccctacacatctcatacttcttatggttacttgagctaacctcaatggttaagaaaataaattataaggtaattattttaataataataatatattaattcaaatataaatatcttttatattattagagattttagagatatatattagaagagagaaaattggtgtgaattttatttcttgcaagtgtgggaaacatataataattgagtggaaatagaaaggggttggccatgccatgtcacaatagatcactaataattagacattggcactttggcctttatattgtgtcgatggttctcattcatatctgcatatattattgaccaaaatttcccatattcatgggaaaaaaacaaagacatatatatacaagaagaaaaaaagatgatgtaacaatagggtcctcaattctagaaagttcaaatatatatatatatgaagattttattctcttgatttttttttttattttgatatataaaaaaaaacatttttttaataagtgtattagctatattgataacaaatttaaatataaatattaattttaaaaatattaaatcattaatagtaattaaaaaaatatatttaatttaactatttaattaaaaatataaaaatatatatctttttacattacataaaaaatatatttatatgtaaaaaatttaaatcgaactcaattttttttttttgttaattttttttaaccaatggaacaactcatgagagatttttctaattaattagatttgaaaaattaatcataaaaatacaaaattttctaatacttctaattcatgtataattctcattaaaaatagactcatatatatggagattggaattataattcatataattaatggacttgaatcaatattaattgtaaatcacttttatgtattcacatttattaataaattttatgcttatcctcctcaaatacgttattaagagttaagactttctatttaggtttcattaaaattttcaactactacatatatatgacatgatgattgatgcattacaccaatatattttttgttacattaattatcacaccttaattaattataaagttgaatataaagatataaagttaaataaattgatataggccagtcataaacataatctagtgattatactacaccatttaatacaccatttaagaaaagttcaatttatttcctccctctaatattaaaaaaaatatattaataatcattttatttaattaagatttttattacgtaaaaagaaattaagatttttattattattaattattattattattattattattagtaactattttattctcattatgtgattgctagtgtagtgggtatggccatctccatttcttctcaaaaaaaaaaaaa

SEQ ID NO: 44445 - DNA, 1284 bp, Cannabis sativa
tagcttaacaattttcctctcattcggatggccatcctgcaattattttaaaatataatcttacttctctattaactctttgatgaagagataattgactgtatgttaataatcaattgaccaaacagaaatccccctacctctgttcacaaccagtaatcataacaaacttatcttaaatacatgacacaacttctaaagtgggatctcagaaaaattgaaagtgatttatataagcaccttttatttcatgcaaagggggtagcacttaacgtgatttttgacttttcagagggaaaccatgcagtaagatcttgaaaaaaatgtgatttagttaaggataaatgcttgaaaaaaaacttaaagatcaaaaacaggatctaaaagcaacacaacatgaacaacaaaaattttttttgtaaattttcaacctcattaacaacgtaagctctagaaactcgactaagtatcaacagattaagaacggtcattacacattgggagtgattacatcatcaagcagacagtcagctatgaaataacctagccacgaacatgaatttaataaaagtagctaaaataaaaaatataaaaacgataaatttactcacaagagatttaggaaaaatttcagcaagcaattttttgtagcgcttgacgggttttcgagagcttgacctcaaagcagggcagcatacgcacatgctcccacatgctgggaatatctttctggagatgacacccatttttcactaacgaaatcaaaacacgaggaacaagaattagggaaataaataaacccaaataccaaacaagaaaataatgttatgtaaagcagtaaatcacagaaagcatagaaaacagattagaaaaaaccaaaaagttcaaaatttgagaacacttaagaatgttagaagaagaagaacaggaagaaattcccacaaccgacaatgaaaggtgtaagagaaaatgtagataatagaaaaattcaacaaaaagaggtaaaacaggcgaaatgtacacaaaaaaagaaagaaattatttgaaaaaaattgaaagaaaagaaaagccagaatgaagaagagagcaagaaaagataggggtaccttaaggttggatttgggtaggtgaagagagagatctggtgagtgaaactgaaaggaaaggaaagcaaagcagtgagaaaagcttaaagagtagtgagaagaagaagaagaagaagaagaggaattgaatgagaagaggaaggaaactcctacctgagagaaataattgagagaaata

SEQ ID NO: 44446 - DNA, 2929 bp, Cannabis sativa
tacttctattttttagaggtacaagattaacatttgaaggaatagctttttctttttttttttttttttttaatttatttgtcattcccagttaggtattttaaatatttccttattgagtttgggtttagattctgctcctagaaagcttgtgaaagaggtaaaagaagttttggttaatgaaaaccttgagtttcttatccatagaagaaagactctttaagaccaaataatgttccaagtaaagcttcagactcaaactttaacaagatcctggattctctttaaagccttgtctgattatcactatcctaaacaataaaagtgattttcctcactttgcattttcaaaaacgacagccaaaccatatttcttcatgaaagtttccaatttagattaaattatgagggaagtgcattagtaatgttccaataaatattgtaaattaacattttacatgaattgcaattatcatcaatgtatgcagagggatgacttgccttaaaaacataatttttgatagatcgttgtcatatggaaatatcatctcgaaagggttgtgagcatgagctcataaatttctcttgtaaattctctttgacgccaccaagtgtgtttttatggctaatgtatgaagagtattgttaggattcccaacctgcaatacacaaaaccagtagcaatctaatctgaaaacacaaaccagaaaagcagagcacaattcaaatactgggtgatcaaaaagagtaaatgcaagaaaagtaaaacagataagaactcaaccagttttacttggtttagatccgagtcaatgagactggtcctactccaaggccaaagtagtgccttgagtcgaattcactatgtggaaatgtgttacacacccagatcagaagtgatcttcctcactcaagctcccattacacatttctctcattgatacaagttctctctctgaacttctctctagaaatctcactgtacaattaatgttttaactcttagttgatcaggttaagagtctaagtatatatagggtgagagagagtagatgagctaaggtaagttgtaatagaatcaacagattctgttacaaaccgttgagctgagtcttgagtcttggattgactgttgcaattagcaagtcttcagatgcaacaagggtccgaatagatgagtctaacaaaggtccagagaaatagggaccaaccctccacaagtatcatgagatctcttgaccttggaatgacctattggtatcatctctccctaatttggtgttcattttaaagaataccagttaaaactgaacctgactgcagtagcagatgtttttctgtcaatcctacatttacatgacatttatatttcagtttaaaccacgcattattttcaagtgtttggtgacatcttgcaggtatattcagtatgtaaaagaacatttttcaccaatcctaacaaaagaagctgaaacagttatctcaagctattaccagcttcaaagaagatctgcaactcacaatgcaggttcaaactaaattaaacatttattttttctcatatagcagattggtattttttcctttttactagttttaataggagatgtactgtgtttcagctaggacaacggtgcgcatgcttgaaagtttgatacgcttagctcagggtatgttaccttttaagattaatattatcatgtgagaatccctacctaagattttgattttgtcaatgtttctttcagcacatgcaagactaatgttcagaaatgaggtgacacggttagatgccattacagccattttatgcatcgaatcttccatgactacctcggctattgtagacagtgttgggaatgctctgcactcgaatttcacagataaccctgatcttgaatgtatcctcccactttacctatatatacataagtttacatgttttcttttgtcagctatttatataaagaagagcacatttaagaatgtcaaactgccttgtgtgatgactgattcttaactgtttacttcatagatatcaatcaagaaagactgattcttgaaaagctaagatcatttgatgaatcttctgaataattgatcggcaaaggaacgggatgttgttcgtgtttgagataggacctcaagtgagttcgctgttcgctgctcaattttggcgacctcaagaagagatggcttctatacaacttaaattgaagcctgctgcaatacttttaagtgtaaattattcttttggcacctctcattaacaatgttgtatttagaactctagggaaatgaggtgtgagatttgcatttgcatttgcttttgtaatattggataatgtatgtatttttttagcagatgatctattcataccgatatgagcgttattaggtaaattaataagaaaatcaactatagtatatgttgaacgaaaataaaaatgataataataataataagcagatgattaaacaactttaatttcacctatacataatttcacaactttgaaatttcatatacttaatttcacatctatatatatagtcaaacaactttaatcatttctttaattttctgtcaatttataatgttctttctaaattatttttcaaccaaataaaattataaatctaatttagttagtaatcaatttcaatttccgtgagttcgacttcacctatgtgaacattacttatgatatgtgcacttacataattctatatatatttgacaacacttgtgtaaaagtttaaaattgggccctatataaaaacaattatgtgctttaagacataattacattgcaagttttttttttttttttgtctaagatgcagttataatttttttttatgtataatagaaaaaaaaccaaaaaaaaaaaaaaaataagccttttctttctaaaaaaaaaaaaaa

SEQ ID NO: 44447 - DNA, 848 bp, Cannabis sativa
ttatatttaactttttcttttaaacaaataaatacttacattggatgaataattcccacaatatgattggtttaattaattaaaacaacatataatattatacggcatttatatagttatgccgtcaaaaaagagaaagagagagagaatatgcataaatatatgtgtgcatatataactaggagagaaccttatctatatataattaagtgttatacatacatacatataaattacatgggaatcttttgaacttcacgtcattgtttgcgcccttggatccgagcatgtcattgagaatgggagcctagcctaatttcttatacatatatgtgccattgtatatttatatgatatataatttcttattcaattaaaaggattcctcaataatgtattccatttggcttactattagattagtttaacacattaatctatatatttaaatatcttgctatgccagtgccactctggcaatttaattagcagtcgtcatcttaaggattcaaaatgaagcttattattccaacatatatacatttctattaataaccaaatgtccatcccagatgattatatttgttcagctcaataatgttttgtgcattattgataatatatattatgtatatttagctcatgtcctcaccaattatagcatatttattaaattctaactggaatcagaataatcaataaaagaaataacttaaaataaaaaataatcaaaaatattttgctatgttgttcacaaaggcagtcaatcaagacaaattcaaacactatttggacattctctgcattaaggagtgtagttgaatatgctaaaagttaaattctaattg

SEQ ID NO: 44448 - DNA, 1910 bp, Cannabis sativa
aatgtatgactgaatcattgtcaaaacttacattgccactacaaaatgtttcaaaaatgttgtagattaggctgaatcataaccgaattttcattttcaacggcataaatatgactgacaaaaaagaaaatctgtataacaatagagagagaagacaatagggatcatttcagtatcacttatttgcgatgagcctcgagatctgacagcgccttcggtggtttgttcttcttttgctgatatttggcatatgaataccataccccgccagcggtgttgatgatcaaaccagtcacattcaagccatgcacttgaacccctccaagtaggacaaagccaagggtctacaagaacatgaaagcatgagttaaattggtcataaatattttatatgaactaaacacaatcacatgatatgttccctgaaatagaaaagtaagcaagaactttaatggtcacaaggatctggtcttcaagtggtgtttaattcttcttttatttaaatgtttgaaattgaaaccacaacattattgaagtagcatagtcaagagtacataccgtggacccgacccctttgaggactcctacaatggttgtcgttagagctgagttgactatggtacatagaaacatggtgaagttgagagcaatgcccatcaccaatgaaagaataagtatcaccaaaaaataaaatgaattactctgccaaaaagaaaaagaaagaagtattatcagcttcatgtataaatgttacagaaggttaatttattaaaattctaatgacataaaagatggaaacatacattttctccaagaattcacttacattatccaaatttgttcacaaactatgctctctatgtttaaggaattgcaagcaatattcaaaatcttatacataaacgtatcgtttctaactaccacagttcggctttgagcgagtttttaatcatatatattaaattataataaacaaaatagaaaacccagaagcctattgtgatttatcaactagaaaatcgagtgcaaattgagttccgtaatctgttgtgctctaggctcaagcagtattcacttcccacacagtgagtaaggaaatgtaaataataaacaaaatcagtaatgattctgacctttgcaagtagtatcgatatagaattcgggaattctcctgtagctatgatgaggaacaacaagaatggaatagacaaaaagctgttataaaacatgatctcaactgatgatagcccatcttctgcaccagacttctccaccaacacaaggtacatagtctgcagttaaaaataaattcagtattggttctaggtgcacaatttaggtgtacgaaaatatcgtataaattcacggtcaggaaaaaaaaacacgagaggtcgagaccaaacctgaaaaaacacagatataaaggccatgctatatccgaaaaggtcaaaggaaaagtctcccaatgcagctatgacaaccccagccgcagtaagaagtactgaaaggatgacctgaatttgaacacagccaaaagctttaattaaattgcaacttgccaaacatgtcagaattatgcctattgtattctgagaagctctatactgtcaacaataaaaattggtgatgctaaaattaaaatcaaagggaagccatttgcataggctctcatttaatgggcccattttccgtgacaaacatgcctgagtagaatttgtatggggatatgttaaaatcatctaattgtcaatccatcctgacattaatatatatcctttatattacaacaaaaggaacaataaatatacaaaagagccttaagagatttgaaattgcaattacaggagaggagaggcacactcctttcaaatgtttccaacaattatcaccttccacatatgatatgagta

SEQ ID NO: 44449 - DNA, 4554 bp, Cannabis sativa
gctcaatgagagggtcgcgacacttgggttcctaaccccgaaaatccactttacagcaaacgattttcaagcccaaaacaccaaaactcacccaaatacacacacaaacacaaatttatttcccatagattatagccatctcaatagggaattaaaacgccaattcaagctcaaacacaagattaacatcaacgtactcttcaattcaaagacccatgaaactagcaactaacaaaattaaaaaaatgcacaaattcaatatattatcaacaacaaaatacaaagtaaagaggtgcaaaactacctcaagttgttcagaaatacaagctccacaatcctaattcaccaagcacaaatcaaccaaatctaatttgaagagaaataacaaagtgaggagttgagaaagagagagagagggttcgactaggagcaaggaaaccaaaaatgagttttctatttttgccaaaaatcccttttgttgataattaatcaaatggtccaaagaccaaaatggccttagggccaatataccacatatgcatacaacaagggaaaaatttcatcacataccatacttaaataaatttcaaattattcaattaattataaaatgccaaaataaaataccgaaaaatgtatttcggccccgaacccggttcgacccgaaatacccaattgtgactaccgcgctgcttgtcagaaaacaacacctacagaaggaaaaaaaaatatactatataataatatagaccataagcacgctataacatcaaaattacagtttcacccttctcgggtcaaaattaaaaaaatgcccctggctcaccaacagggttttaatatgtcatttatcaatttaattcatatatattaaattatataataatacaattccccataaacacacattaactagttaggtttgctaatctatttccttaatcttagggtattacagtaggtttggttaagtttagagcatgattttaagtttacttcaaggttatttaagtgttaatttcatgtttctagggctgctatgctttgagttgggtgagttgagttcaaggactaaaaactcactcaacaatggtgagtttacaattttagtgtatttttgtgttttgaatgtttggtcatgttaattttatgttgataaaatgttctagaaagtttcaataggtttggagaagttttggaggggtttgatgtgaaaaacccaagtttgggtcgttttgtaggaaaaatagcttactgtttttatagggcagaatccagagaaacagtggaccattttcagaaaactatggaccgttttggggtgtttcatgcagctagatttttttgatttagtgataggggttcatccaattctgagtttaggtcttggttcgagattgattagattatttaccaaatttccattgtcatgacatagggcccaagatcgtcgagcattattccactcaggtcggctcgcacacttgactttggacttgaggtaaaaaaagtcaattgtatcgcttaacatgtcaaaaataagatacggtaattaccgttattaagaaagagttattactctcatttaaaaccgttgttaggtttcttacttattagttgcttaataaagcaatgatagtgacattagaaactcgctgataatgagggttaaggatgctttataaagtatcaagtttcgcttgttttataagacaaatagtttgttattagcatttgatacgctttaaataactacctaaactatatgttacaatgtatattttgggttacataaattttgtgctatatgtgatgtttgagtgttttgtgactcacgagttgctatgtggtgtaggttaggggaaggggaaactagacaacccatgagtcagcagtctcccagcaatgtacatatcaacctgccatattttggttcttactggacatgatctttcttttgttatattttgaatatgtaataatattttgaaacaagctagtttagttgtttttagtaaaagtttgtaactaaggggatccttgaatccattaatgttttgaaaaagagtttaagttacacttaaattgattttctaaaagttttaactaaatcatattttcttcctaaaatcattattttattattataaactaaattataaaaacacacatgttgcggccttacaggttagggcgctacaacatagtatcagagcaacaaaggtttaaagatgctgaagactggtttaatatgtacattgattgtgaagactcgttcgactcatggtattgtagtaagtgttaattgttaattgattattggattatttgtcaattccttgaaatatttgtttacctgaaatgtataagttattagaagagcatgataagttttgtaaataatgatgttatgtatatgtaagtatggaaatgcttattagaactagttttggtttggatgttctaaatgttggaaagttatggtcgtagtattagattatgcactttaggcgatctggtagggttaaccgtgagcttctgggctcgaggctggccgtgagggtgcgaatcttctaccaccataaaactgggaatggatgtatgctgcgatgcaagagaccatctagcaggaaggtgatcagatcagagagttgagagagcagcaagctcgacctactcataatcctaaccctaatcctatacctccggcacctctggctgtgccaaaggacatggaaaataatttatagtcgttgtacgagcagtttagaaagcagaattctctagtgtttgaaggtggtgcttacccacttaaggcagagcattagatgagcatgataacgttaatcttttactttatacgagttgagggtaatgatcgagttgggtgtgcaatattcatgctaggagaaaatgcccacatttggtgggaaattgtgtctagaggtcatgatatgaataacatgatatgggatgcctttcggaccttgttttatgaacagtagtacaataaatctatccatactgctaaagtagaagagttcatgctactgactctgggtagtatgacaatgatagagtttgccaccaaatttgatcaattggcaaagttttcctcagattaagtgaccactgaggctactagaaaggccaagtttatttgggggttagaatagcatattgctcgttatgtaattgtagctgctaagcaacccaggtttgtttgaacttatgctcaggtggttgagttaggcttactaatgagggtgcagaagattagatccaaaagaggagtagtatgagaagagattcatggaaacaatctcccaatgcctgtctaactaggggtgctgaccctaatgactgtaagaagagacctatttacccaccaaccatgggtcctaataagaaatttcaaggtaatcagggtttctgccgaggtggaaatgagacctagagaacctatcctaagtgcctaaggtgcaaaagacaacatcaaggcgaatgtcaagctcgagcttgcttccagtgttgggtaatacgccatctgaagagaaattgtccacagttgcagagatcgaaacaaaagaaagatgatgctctagttcttgcttgggtattttctttgaccgaggcagaggccaatgtttgtccttctactgtgacaggttagatttctattgattgtattgtgttgtctggtttaattaattcttgtgctatgcattcttatgtgtctagtagagtgattggcaagcctagcaaaatattatcaaatggttttggtactttactgcctactagagatttactatctccagcaggtgcgttaggtcccttccggtggataccacgagggaagtaccaataggatgtgaacacgttccggtggtacgagagtttctagatgtctttccagaggagctacctgggttaccaccaaagcaagagattgactttgagatcgaattgataccagggacagagccttatctaaggccccatattagatggcacctgcagaattaaaagaactaaaggttcatttataaggtaagttggatttgattttcactaggtcgagtacctaaccttggggtgcactggttttgttcataaataagaagggcagaacactaaggatgtgtattggctaccgagagttgaataaattgatagtgaagaataagtatcctttgccaagtatagacaatttgtctgatcaattgcagggaaagaccatcttttctaagatcgatctttgatctagttatcactagttaaggattcgagaggagaattttcccaagatagctttttgtacccggtatgggcactatgatttcctagtgatcttcttcggattaaataatgccccagtggcattcatggacctgataaaccgagtgttcaaagactttctatatgagtttgtaattatcttcattgattacattctgatgttttctgatttaaaagatgcacatgagaaacatcttaggatggtgttacaacgtctttgggagcatgaattctatgctaagtttaagaagt

SEQ ID NO: 44450 - DNA, 1688 bp, Cannabis sativa
ttaattattatactgaagaatattaaggcaaaacaatctctttgtttaaccttttgttttcttttcattcaagttagaggtaaaactctacatttttttatatatatataaaaaaaaaaatctcgtagtgcagattcttttctcactccaatagccttaacaattctaccacgtgtcagctataaaaatcttatacctcattctgtcttaattaagatcatcgaaatgcacctcgagaattctcaccctaataaaaataacaccgccacaacaaaactagcctgaattaaactctacaaattaagtataattaagaaaggaaatcaagttatatatacttaggagataaatcataaatgttctatgtatctctaaatatatagataagaacatcaagaaacccaatataagaaaaaccttaaagagagagagagagagagagagagagaagaaagcaaagcacagtggaaactgaaacaataatggggagcaaaggggacaagcgtggggttgtcttgtcatatcactttctttcttaccttattagtgctctgcaatattcaaatctctttctttttttatttatttatttatttatttatttataattaccaaaaaataaaaataaatataaaactttttatttttactactacttagttattcctttgaaattactatattggcctctagcttgggttaaagagctctgtcacactcatatatgcatctttctattgtactacaaataataaaatggatcaaatgtaattatgaattttattttattttatttgtattgtatttttgcctagattattaattaattagttaattaatgattgatataatatacataaaaaaaacatattgaaaaaatttatatgtggcaagacatcttactagtgttacataaatagttccaaatttcaatcttttgtattttttttttttttttttttttttgagtataaaatcttaaactttgcatgtgaaataataatttatggataatgaggtaattgggtcagtcagtaacctttatagcccaggtccatttacgggttttgttttggacctgggcctagagatctgaagtacattccaagcccaaaatattattatatcataatattcttggtacatatgtaaacaaattattattatctgttaaattatgtaaagactattgttaaataggtatattttttccactaattacctcaaaaaaaaaaaaaaaagactggaaggaatatattttctatgtatacaattgaaacttcagttgaattcaatgcaaagtagttttgtgtatatttttcttactgacaacatagctttttcattgtgtaactactaactattataaaatattaattagtaaaatttttgactaaaaactatgtacaccgatcgttgacagtattaaaagtggtatatataaatatatatatatatatatacatataattactcagatttttcatatataattccactattttctgtttttttctttctattcatctagcagttcaacaagatttttcaagttcctagtatattattttcagcctttaataattttttaaactatatatattctctcccactatgtatttattggtttttgaatattattaatattattattattgtgaaaattttatataaatacattatttgta

SEQ ID NO: 44451 - DNA, 1941 bp, Cannabis sativa
aaaaaaaaataataatttttttttggagtggtggttaacatatattttatctcaaagacaagaatttatttatttatttattttttgagctcaaaggcaagaatttattaaatctctctacaatgtcattttttcttttgagatttaaaccattgttattagagtattagataacttaacttatagatctaacgatttattgttaattgttaattttaaataatatttaatactacacaaccacccatacctcaacttaaatcacgagtatctcactgatcacaagtagtgtttgtttaacagtaaaaaaacatagtaatattattcatcatttaactaaaaaatgatatgattatgtgcggaattttttaactatatatttaaaggactattatgataattaaatagaagataagtgttaccgttaatctcttgttataatttattagttaatttttacgttcgaaaatatatgttgaaatattttttttaaattttttttcacagcggtatttgttatgattaaaaattttcactacggtaaattattcaaaaaatttcaaaaatttacaaaaatgatatactataattataacaaatactactatgaaaaaaaaattgaaaaaaattattttagcatatgatttcatgtgaaggttgactaagagattatgataaaaaattgtaattttagcactcctcttaaataaaaataaaaataaaaatgcatataatcttaagatttaagatatcaagccctagaaaaattcactagtgtaatttaattttcgacatacatattttgatttaatataaatatgagttcagggaataataataataacaatagaataagtagttacctgcaacgggtatctcaacagcaaactctgtgtaacaaaacacagaaagtaaggcggagacacccgaaacaacgtaggataataggacggcgggaccggcaacctcgttggcctcaagcccagtcagaacgaatattccggccccaatcaccgcacccattccaaaccacataaggtcccaccaattcagtgtcttcttcatctcatgttggctacgagccttcatatccacaatctccgtactatccacggatcgggtcatgatccgatccgttaacctgtacggagtctcttttattgcttttacataattaccccagctcttaaacgattcctcagggagaaaatcgtcttttgaacacgaacatgagcctcttctccttacccctgatgatgatgatccctcctcatctagtattactgagccttcttcaactcccataatcctcgatcgccaatcaaaaatgaaataaaggtctgtttgtttccagagaaaatgggtcactatatagtagtactgttactctaattcggcaaaaactaagagaagtttaacataaaaagtcatgatcgttgatgaatcatcgattggaacaagaaagattgtacaaacgaatgggtttcgttttcgaaaaatatacatactaattaaaatttcttatatatatttataagcggccgttgtcaaggaaacaataaacaattgaaactattggaaattattcatatttttttttttgaaagaattatcaaaagatttaactcaagagaaatgaaatgaaatataataggagcagattatatacacgtatgtcaatcaaactaaagcatatgtcagaatattttaatatttttttttatgataatgtgtgatatagttataatattagtttataaattttaaaaatttattttatttgaatttactaggcctattgaaaaaaatttaaatttgctttcagcatgtaaaggtggcgtttgataatatttttttgatcagttttttgtttttaaaattagaaaagtaaaaattactttcaatatttttttaaactattttttttcttaatcaatattt

SEQ ID NO: 44452 - DNA, 2953 bp, Cannabis sativa
agcaagaaaattagcacaccactcaacaacacatctgttcttggagagggctcaccatggatccatttattcctacagttctaagtatgccaataaatgatagtaattgaactccatttgagagaaagtacctttcatatgctccaagaaatccaatggatgattggtattatagtctttgatttttttcccagaagtcacttttcgtctaagtagctatagtggcagaacatctccatattgcatgaacattatcctcattagaacttccaccacatctaggataagaggggttaatttgaaatttcctacaaaacaaaacatggttagtagggagccaagagtggctcaatttccataaaaagtgtttaatattttaaggaattctcgacttccataactggttccaaagcaactcagttcccaacatatctgaagccttagtcttttcaattgaatcaaaagccaatttgtatccatttttgacactatattccccattagttgtgtaatgccccaacactttatcactaaggtgctcgttggaagagggaatagatagaattacattagcatcatcttcgttaaacactttattgataaaggcagtatcccattctctattgtcatgcttaattaagatcaatcacatatatttgtcttggaatgcacagcttgtcgaagatcttgaaatttttggtcttccattctaaggatctttaagcacccttactgaattaccatctccaattctccatctacaacctttcataatcaactccttacccatcttccatcataaccaagctttaacatgatttcttcaatgaatctccattcaactctattatacgccttggtcatgtcaagtttgaggtcaagttttgagctatttttgaattgattcttcctcatatatataatggaggccttcaaacccaataattgcattatcaaaggttactcttttctccacaaaagcactttgcgactctgaaatcacctcaggatatgttgttctaagtctatttgccaaaaatttcaagacaattttgtaagcaacattacaaaggcttatgggtatgaactcttccattctttatggcttctcaacttttggaatgaaagcaattaaggtctcgttgagctcatcgacaaggctaagtagcagttacatccttcccaactatcttctaatatttctggtagaataaaaccaggagaccatcacccatgggcttttgtaggattcatataattcacagcctttacgatatcatcaagagagaaatctgcaagcagaaaattattcatggcagtggtaatcttatgaggaatggttttagtatctagatgacttcattttgaggggaggaggtagaaaaaagtttcgaaaagtagtttatagtgatcttttccataatattttgctcatcttgccaaaccccaaacttatctcttaaccctctaattttatttttcttccttcgggtcgaagctttgtgatgaaaatagcatgaattacgatccccctacctttgcctctccgtccaacttctttgcttccaatacttctcatcttttttcaaaagacaattaagcttcttttcttcattcttcaactaagtccacatatataccaagatcattacatttagaaaggcttttgagcctcttctttgagtcttccatttctttctttaactctttttcttttccttttattccagctattgagattaaagtcgcacctaaccagttctctcttcacatcagaagtcacgccattgccacaaatggaatcccacgagtgaccaacaatcacatcactttttaaatccccgcaccaggcttcctcaaagtggaaacgacttttcctcttcaccaaaccacacttattattagtactaaggctcgggcaatcaacaactaaagctctatgatctgagttccactagtcaaggacaaagatcttcgcatttgggaagttttggagccactctaaattgtacaggccacggtctaacctctcattttttttttctattttgttgtataatactccaagtgaaggtatctttgatattgctaaaatccaccagtttgcaatagtcaattgcagttcaaaagtttttcatagtagcccaacttctttctcttccccatttttttcactattgcaaataatctcattgaaatccctaatacaaatccaaggcccaacaagagagtcattcatcaggcacagaaatctcgaagattcatttctctgattgtggtcagtatgaccatagtgtaaagttccaaggtaagaaaccattccctgcaattgaagcctaaatatgcccttggaacgaattggatcgaaacaaagatattataattccattgttacattagacctgcatgaattggtgtcaaattgtgaatgtaaaaaataaaatgaaactttatatgtctgaataccaactactgctatgtaaatattctatcagttttggttatgaagtgttgagtacaagggaggagatgtgagttggtatggtcaagtgtggggacgttttaatatccctaaacattgaattatcctctagttggcagttttggaacgtctgtaaataaaagacaaactatttcgtttcaaagtttgtatgaatcaagtttgtctaatctgtggatgttatactgaattaattgagtatctattttttgaatgtctttatagcaagagatgtttccaagttatcaaagattgggtgggctgggatattcaggaatctaacctaaaattgttgttgatatatatggctgaagcagaactgattttctcctttcaagaaaaaggtatctgttttagtgttgacagctatagtttatcatgtttggagatgtcgaaacttggtttttttgggaatctaaagtttccatcttaaattctaccatatacagaata

SEQ ID NO: 44453 - DNA, 1946 bp, Cannabis sativa
tctgttgatgtgactaaatttttgtgtatcaaggtattcctccgccccaagtgaggtttaagacaagtgacatcttacattattatataattattacataaattactcttttcaacagtcttgagtcaatttcagtgttgtacaacatttaattctatatagtaaacaaaaaacaattaatcagcatcacaagcagaaaagtcaggttcagggggtttctgcagattcactaatccccggttactttcactgcgaagccttcgaccacgaagcgcatttgctgcaaagcgagaagcaaggatggtggcacgaagcctagaagaactgttacttctgttacctaaagtcctttcatcgtcttcttcgctatagccatactcttcttcttcctcctctttacgccttctttcagccatttttctcctggcatagcgtcgccatgcagcttgaataaagatagcagcccaagttctccactgctgcgagtagaaacggaaggtatgctgaacctgtctgctatgaagacgcctaaattgagtagcaacaaacttcaactcctctgcttccaaggcgaaagcctctacttcagtcatggcatttactgttctagtagatgaaggtaaattggaaccagcttttggatccagtgcccatgttagaagctcttctccacaaaaatccccttctttcaataaacctctgttgaaaaatccactcctgccaccatctgtagtcacactttctaaacgaccccttataatgaatagcatctcattaactgggtcaccttctctgactacataggtactttctgtgtataaacttggcttcagacgctcacaaatggcatcaagcagcctctcatccatattggcaaaaagaggaacctgcatattccatgaaataaaggagtttgagtcattttcgggttgacaggactaacctatttattaaacgagtcatttaaatagatggggccagatcaactcgtttataaacgggatggggatgggtttgagttttagtttttgacacgtttaataaatgggtcgggtttggttttgacatttgcttataatacttaactctcaacacgacacgaacacaaattgctacccctatacttacccttctaactaagttcaaacaaaggtgtcgtttgatgtccctcctgagatctttaggtagactctgaacaatgctttcttcatctacacctcttgtctccaaccatttgtactgattatatctccttactttttccctaagctcttgtggtagcaggcgatgatgcatccactgctcagaatcacgccttttgatcctcatctcttcgagccgaattgtgatggattgaaggtaagtctgtgaaaattgccaaaaacttttcaaaaactgatgttcatagtaaaacagctacaattgacttgttgtaactaaagaaaagtttacctgtatatttccaattagaagagcaaaaaggatgagccctgctatacctattcctatggagaacaaaacctctaaagggtaggtacttgtttgaagcccttgaccaagtgtactgcacaatatcaaatacaatattagcattaaaccctatttaggatttttgtcaccgaactataacttatgcattattgtgtcttttaaattttaaacccgtttaaaatggtcctcgaaatacagtgttgtaaactagtcattctttcaagttttgtcacaggtcacatggcaaacaaaatgataacatgactgtttagataattgtcatatcagcgctacattaatggacgtgcgtaactaatttgatatcactttacaagactgtgaatagttcggatactattttcaataaaaaattcaggagatataataatacataggtcgggagaaaaatcttaaatggccttgcataaatgctactcaaacctgtctttttaagt

SEQ ID NO: 44454 - DNA, 1566 bp, Cannabis sativa
tatggtcgggtgtatgggcacctgattatagggcaaggccaaggctgagcagccgtgagagtgagtagatgaagattgtacatgtcgggatagcgtacgatctttgggacatcatcgcttttgttgtgtagtcgctaagcgacaaacaaacttatggttagggtgttacagtgggccttttgcttccaatttatgctatgcaaactaccaagctctttaaaagattggcttcgaagattgatgggttggctagagacttttggtgggtttttgaaaaagggaaccaatgcctttgtctaaaagcttgggatcgcctttgcctttcaaagtcttctggaggtttttgattaagaagactgaggatatgaataggacttttcttgctaaatagggttggtctcttattacaaagaataatcactttgttaccaggttctaagagccaattacctaagaggtaagaatttctttaattgttatgccaagagctctaattcctggttttggaagaacgttatcaaggcaaaggatatcctaaaagaaagggcctataaggtggtgggaaaaggtgataacattaatatttgggaggacccatgagtcccatatggtgaaaatatttgtcccacaccaagggatttgttgagggagagatataaaactgttatcgacctcattgattctgatggtaattgggatcttttgaaattaaaccagttgtatgacaaggtaactattttggccattttaaaggtggtaaaccgaaaggttttggtgaagatgggtagatgtgcgttaaagagcataatagaaagttcacaaccaaattgacctaccttacaatggctatgaagagagatctgccatgtgttgtctccccgactctctggaataaattttagagtgccacaatacttgaacgacataaattcttatggtggagtataatttcaaatgctttacctaccagagcggttatcgaaacttgttttcatgttgaggacacttcttgtccattgtgtggttgtgaagagaagactattgaccacatgtttctctattgtaattttgcttatcattttggagatcctctccttggggtctcattcctatcagagaaaatggtgctcgggtgtgggatttgataaagttcatttggggccttgaccgtcatggtgtgaacacaagtgaagtgttccttttgcttctattattgtggacaccatttggcatgctagaaatgatcaagttcacaataataatgtgcagagaatcccacactacattggctcaatcttaaactgttttttttttattatgtccaatcttttttgtgtcaggtacctagtaatcctactcaaatcaactggtgccctctcatggatgactggatcaagatcaattgtgaagtagcagttgagtgggattctatggtaatagggaaaaaatgatttgggtcaagactagaaggcttttctttttagatcctatcgtaggagaggtagttgcttgccttttggaattagaaactattattgctaatactaggggtgtgcagaaagtcat

SEQ ID NO: 44455 - DNA, 2453 bp, Cannabis sativa
  modified_base (128)..(130): a, c, t, g, unknown or other
  modified_base (2389)..(2402): a, c, t, g, unknown or other
aaaaaaaaaaaaaaaaactacggtcgtgatgaaactaatttccctcaaattacgattccattcattagattcgttaactaaaaaaaaaaaacatatataaaacataaaactttacgatcgtgatgaannnaattcccctcaaattacgattccattcaaaattcaacttctattaaacttatgtatattgtaattaataaattcaatgtcatcaattatattttggtgaaaagtattaattctacaattatcactctatatttgagtattatatctcgtacccgatggcggcaatgaagctggtttttccagtaccggaagcttcgtagagtaagtagcttcgtttccaaacgtggcctaatctgtggtaaaattgtttgatttttgtcttcaattccgcgtttagaacgatggtttcaaaattagtcgggtatgtgaaaggaattgatctccactgttctttttctcccgacagattcaagtgaagttttatctccttcttcctatgtccaatttcatctgaaacttatagaatgtgctggaaatactgacaaaatactattttcttgtcatttttcttgattttgagaacgaaagacttgattccattggtgttagatttttgattggcccaacaaactctggcgccgaggaaagtatcacaaatcgattgggtggcgtcgaggtggaagaagatgtcgtttgatttggaacctgagaagaggttggtagagttagaatcttcaacagaaggaagagaattgatgtacgttgatatcttcaggtattcccttaaattataacaatcttgtggcttgtaattaattattgagcgaacagtctgaaccttccctcagttgtgtaaaattataatattcaagtactctcaacacttgtttttgcctcagttcttagtacatttgttgcagaattaaaaagccttagaatctccattataccatgaattgaacagaacaaatgagttatttgcacttgtcaaaattatgaggcagaagtttcaagaaattgccgcccaaggtaaaatcctctacgtttataagtgaaaaacttgtgtagtttgtgttatgtgcttcaagtagtaatattgagaaataacttactttttcctctgagcgttgtgcatttctttcatatcgattcttccactttgaataaattactgtgtccataacatgtttttattttgctttataatttactaggattttaccccttaaattgcgattccattggttagatctatatttttttgtctctccatttataccatttttggtattctccatttacattccaacttcttatctcagaagttgttagccaaccccatttgttgttttgaggttgttttgagaatcgggtgaatcatttataaagaaaccattattcaatcctatatatatgccatatatgtctttgttcaatactaaatatatataacctcattttttgtataaccattcattatcatatatgtctttgttcaattctcatcgagacaagcatcaatgtttttgtaagtctctagcccaacagctttcacttctctatttctaaagatttcgttgggtcttatatatggtattcagattcgtgacatttgtgattgggttctttttgatgcctcaggttatgagtttggtcttgctattctacatcgttgaggttcttttcaaacaactgtctgcatttgtttagtttctaacttcatttattaagtctctaaaggtgccagtgaaacagggtaatttgatgcatacttgccttgtgaatcatataaattatttcatatccacctaactgtctatattggtcttggtatttgggtttatagtcgtttccttagaaatattatatatgatattgatattgttcaaagtttaagctttaacttgccaatatggacacaatctgtaaactacaagaaaccattcttattaagaaatactattcatcattcaaaagttatatttttgtaattttcattcttttttttttcagcttccttaatgtctcctctttattaggatcacaaggaagaagatggatttttatatatgacaacaatgttttaagtaaaataagaactttaaagttgtacattctcataggtttgtctcttcacaccaatgttctcatccaattaatgattaaacttcattgatgatgtctattgtaattaataaattcaatgccatcaattatattttggtgaaaagcattaattctacaattatcactctatatttgagtattatttgttttaaaattacatatgaaaattgaaaaaaaaaatataaccataattaaaacttaaaataaaatttagtacttgtcacgtaacatctatatatataaatatatatannnnnnnnnnnnnnatataaagtgtgcctatataacagtattttatattaaaaataaaattattt

SEQ ID NO: 44456 - DNA, 1305 bp, Cannabis sativa
aataataataataataaaataagctttacattaggcagttaccaaatcttaacaaatccaataatataaaataggattttgataatcaaataaaccttatgtttgattgtaatgaatatctcacctttaggaaaattaaatgtcaacctaagtaaatgtacaagaaattaaaacattcctatattgtataagatagcaataatgaaattatgaatgaaggataatagagaagagtgatagtgggaggcggctgatataattgggccctataattggagtgtatgaatattggaatggagccattaatttaattacattatatttatatatataaatataaattaataaatatgtatattaatattaatgtccacttctgtaattttcgaatccgtttggtcaccaaccattggtcccactcgatccctcctctctccctatccctcttccttattataccttccttctctcatttcaacttcctatttatccaataataatgcaactatctattccctatctttattatttctttctacaatagtatttatgatttggcatcttagtacttgttaccaattcttattatgaaaaatattgtttttgattaattcgtgtaatttgttcaattattggtccggattctatattttattattttagttttttggaattttacaaaacatatcaaaataatagtctctctctattttattttggtcaaaaaataattttaattgtcctccatcaatttctctgtttttacttaacttattctattaccacaaaccgtaaaaattaattttatatttaaaattattttgattgaaattaaatctccaatatactattttaatatttttgacaaaatcacagaatctaaaatataaaacaagtacacaaaaagtaatattttttcattcaatgatatacatagcaactctaataaacatactttatatatatataaaaaaaaataacataaaaaaattaaaaattgaaccattaataatactatttaaattaatgaaagaacggcactagtctatattctttgtaattttacctacataaaaatgtgaagtccaaatcaacaaaccaaagtcttcaattagcttatttatagcaaaattatattagaagtcggtactccagaaaaacaatatattagttgggcatgcgttaaatattttttttttaaaaaaaaaaaaataccacaaacacaagtgacaagtcaatggttaccttaaaaaatagcaattaagatttagatttttcgaaattgcaagtggcaaaaataggcgc
